(19) United States
(12) Patent Application Publication
(10) Pub. No.: US 2024/0390523 A1
(43) Pub. Date: Nov. 28, 2024

(54) BASE EDITING OF PCSK9 AND METHODS OF USING SAME FOR TREATMENT OF DISEASE

(71) Applicant: Verve Therapeutics, Inc., Boston, MA (US)

(72) Inventors: Alexandra Chadwick, Somerville, MA (US); Kallanthottathil G. Rajeev, Wayland, MA (US); Ellen Rohde, Ashland, MA (US); Christopher Cheng, North Reading, MA (US); Caroline Reiss, Somerville, MA (US)

(21) Appl. No.: 18/582,406

(22) Filed: Feb. 20, 2024

Related U.S. Application Data
(63) Continuation of application No. 17/918,057, filed on Oct. 10, 2022, now Pat. No. 12,029,795.
(60) Provisional application No. 63/007,803, filed on Apr. 9, 2020.
(60) Provisional application No. 63/007,797, filed on Apr. 9, 2020.
(60) Provisional application No. 63/136,087, filed on Jan. 11, 2021.
(60) Provisional application No. 63/045,032, filed on Jun. 26, 2020.
(60) Provisional application No. 63/045,033, filed on Jun. 26, 2020.

(51) Int. Cl. A61K 48/00; A61K 9/127; A61K 31/7105; A61K 38/46; C07K 14/515; C12N 9/22; C12N 15/11; C12N 15/113; C12N 15/90

(52) U.S. Cl. CPC A61K 48/0066; A61K 9/127; A61K 31/7105; A61K 38/465; C07K 14/515; C12N 9/22; C12N 15/11; C12N 15/113; C12N 15/907; C07K 2319/09; C07K 2319/80; C12N 2310/20; C12N 2310/315; C12N 2310/321; C12N 2310/331; C12N 2310/335; C12N 2310/344; C12N 2310/3521; C12N 2800/80

(57) ABSTRACT

Provided herein are compositions for gene modification or editing and methods of using same to treat or prevent certain conditions. Specific compositions and methods capable of safely and effectively editing gene targets expressed in the liver to durably lower LDL-C thereby treating a leading cause of cardiovascular disease are disclosed.

### CROSS REFERENCE TO RELATED APPLICATIONS

[0001] This application is a continuation of U.S. application Ser. No. 17/918,057, filed Oct. 10, 2022 which is 371 U.S. National Stage of International Application No. PCT/US2021/026732, filed Apr. 9, 2021, which claims benefit under 35 U.S.C. § 119 from Provisional Application Ser. No. 63/007,803, filed Apr. 9, 2020; Provisional Application Ser. No. 63/007,797, filed Apr. 9, 2020; Provisional Application Ser. No. 63/136,087, filed Jan. 11, 2021; Provisional Application Ser. No. 63/045,032, filed Jun. 26, 2020; Provisional Application Ser. No. 63/045,033, filed Jun. 26, 2020, the disclosures of which are incorporated herein by reference in their entirety.

### SEQUENCE LISTING

[0002] The instant application contains a Sequence Listing which has been submitted electronically in XML format and is hereby incorporated by reference in its entirety. Said XML copy, created on Jun. 28, 2024, is named 53989-707_301_SL.xml and is 63,300,048 bytes in size.

### FIELD OF DISCLOSURE

[0003] Provided herein are compositions for gene modification or editing, and methods of using same that are capable of treating or preventing certain conditions, such as cardiovascular disease and conditions or diseases associated therewith such as diabetes.

### BACKGROUND

[0004] All publications, patents, and patent applications mentioned in this specification are herein incorporated by references to the same extent as if each individual publication, patent, or patent application was specifically and individually indicated to be incorporated by reference. It is not an admission that any publication or information specifically or implicitly referenced herein is prior art or necessarily relevant to the claimed subject matter. To the extent publications or patents or patent applications incorporated by reference contradict or are inconsistent with the disclosure contained in the specification, such cited or incorporated references should be considered supplementary to this disclosure with the understanding that the specification is intended to supersede and/or take precedence over any irreconcilable inconsistencies or contradictory material.

### SUMMARY

[0005] The inventive subject matter disclosed in this application is directed to compositions capable of editing a polynucleotide or target gene and methods of use of those compositions. The compositions and the constituent components thereof, individually and in combination, are considered separate aspects of the inventive subject matter, which may be defined and claimed by their respective physical and/or functional attributes described herein in any combination without limitation. The breadth, specificity, and variation of the inventive subject matter are further illustrated by specific aspects summarized here.

[0006] One significant aspect of the inventive subject matter described herein is directed to the treatment of cardiovascular disease (CVD), which is the leading cause of death worldwide, responsible for nearly one in three deaths according to the World Health Organization. CVD is also a leading contributor to reductions in life expectancy and is one of the most expensive health conditions to care for. According to the Centers for Disease Control and Prevention (CDC), CVD is a significant economic burden, costing the U.S. healthcare system more than $320 billion per year in annual costs and lost productivity. CVD collectively refers to diseases of the heart and blood vessels, which are diagnosed as either atherosclerotic cardiovascular disease (ASCVD) or cardiomyopathy, among others. ASCVD is a large subset of CVD for which cholesterol drives the development of atherosclerotic plaque, a mixture of cholesterol, cells and cellular debris in the wall of a blood vessel that results in the hardening of the arteries. The current cornerstone of the treatment and prevention of ASCVD is to lower cumulative exposure to blood lipids aiming to maintain low-density lipoprotein cholesterol (LDL-C, commonly known as “bad” cholesterol) and/or triglycerides as low as possible for as long as possible. There is significant evidence, for example, demonstrating that individuals who maintain LDL-C at sufficiently low levels over a sufficiently long period of time are substantially less likely to develop ASCVD. The relationship between the lowering of LDL-C and reduction in ASCVD is amongst the best understood of all relationships in medicine. It has been shown that lowering LDL-C by 39 mg/dL for five years in a patient with established ASCVD reduces ASCVD risk by 21%, whereas that same 39 mg/dL degree of LDL-C reduction over a lifetime reduces risk of a first ASCVD event by 88%. The current standard of care is a chronic care model that typically requires numerous daily pills and/or intermittent injections and often insufficiently controls cumulative exposure to LDL-C. Despite the availability of such chronic care therapies, cumulative exposure to LDL-C is often insufficiently controlled in many patients with ASCVD, and a large fraction of individuals with established ASCVD have LDL-C levels above the recommend goal. Higher cumulative LDL-C exposure leads to accelerated cholesterol plaque build-up in the heart or neck arteries and the rupture of which can result in heart attack, cardiac death, stroke and the need for invasive medical procedures, such as intracoronary stenting and coronary artery bypass surgery.

[0007] One aspect, disclosed herein, are compositions and methods that are capable of safely and effectively editing gene targets expressed in the liver to durably lower LDL-C and/or triglycerides thereby treating CVD such as ASCVD.

[0008] Another aspect, disclosed herein, is the efficacy and safety of the gene editing compositions described herein when administered as a single-course or dose (once-and-done) therapy, in repeat or successive doses, and combination gene editing therapy doses. The efficacy and safety of the compositions described herein are shown in in vitro and in vivo studies described herein involving various cell and animal experiments including mouse and non-human primate experiments, and the results or performance of the compositions disclosed herein represented in those studies each constitute aspects of the invention.

[0009] Another aspect of the composition and methods disclosed herein relates to the location where the edit in the gene is made, including for example compositions and methods directed at editing a gene in the splice site.

[0010] Another aspect of the compositions and methods disclosed herein are the constituent guide RNAs (gRNAs) and base editors that comprise the compositions that are capable of precisely editing a gene at a single base pair without imparting double-stranded breaks in the target gene. The compositions and method of use of those gRNAs and base editors including nucleotide or mRNA sequences that express and encode the base editor constitute yet another aspect.

[0011] Another aspect, disclosed herein, are the lipid nanoparticle (LNPs) formulations that encapsulate the gRNA and base editor drug substances, the selection of an LNP, and the relative ratios between the various components of the drug substance compositions alone and as part of the LNP.

[0012] Another aspect, disclosed herein, is directed at the dosing of gene editing compositions, such as those described herein, and the impact of dosing and repeat dosing on efficacy and safety profile indicia.

[0013] Another aspect, disclosed herein, are that the compositions and methods of use include implementations that are designed to target or edit specific genes such PCSK9, ANGPTL3, APOC3, and/or Lp(a) and/or have an impact on the protein levels of proteins expressed by those genes.

[0014] In one aspect, provided herein is a composition for editing a gene target comprising: (i) a base editor fusion protein comprising a programmable DNA binding domain and a deaminase, or a mRNA encoding the same, (ii) a guide RNA comprising a tracr sequence that serves as a binding scaffold for the base editor fusion protein, and a spacer sequence that corresponds to a protospacer on a PCSK9 gene, wherein the guide RNA directs the base editor fusion protein to effect a nucleobase alteration in the PCSK9 gene in vivo when administered to a mammalian subject, wherein when the guide RNA and the mRNA is administered at a total amount of at least 0.05 mg/kg, the base alteration occurs in at least 35% of whole liver cells in the mammalian subject as measured by next generation sequencing or Sanger sequencing. In some embodiments, the mammalian subject is a cynomolgus monkey, wherein when the guide RNA and the mRNA is administered at a total amount of at least 0.5 mg/kg, the base alteration occurs in at least 40% of whole liver cells in the cynomolgus monkey as measured by next generation sequencing or Sanger sequencing. In some embodiments, the mammalian subject is a cynomolgus monkey, wherein when the guide RNA and the mRNA is administered at a total amount of at least 1 mg/kg, the base alteration occurs in at least 45% of whole liver cells in the cynomolgus monkey as measured by next generation sequencing or Sanger sequencing. In some embodiments, the mammalian subject is a cynomolgus monkey, wherein when the guide RNA and the mRNA is administered at a total amount of at least 1.5 mg/kg, the base alteration occurs in at least 50% of whole liver cells in the cynomolgus monkey as measured by next generation sequencing or Sanger sequencing. In some embodiments, the mammalian subject is a cynomolgus monkey, wherein when the guide RNA and the mRNA is administered at a total amount of at least 3 mg/kg, the base alteration occurs in at least 55% of whole liver cells in the cynomolgus monkey as measured by next generation sequencing or Sanger sequencing. In some embodiments, the mammalian subject is a mouse, wherein when the guide RNA and the mRNA is administered at a total amount of at least 0.125 mg/kg, the base alteration occurs in at least 40% of whole liver cells in the mouse as measured by next generation sequencing or Sanger sequencing. In some embodiments, the mammalian subject is a mouse, wherein when the guide RNA and the mRNA is administered at a total amount of at least 0.5 mg/kg, the base alteration occurs in at least 45% of whole liver cells in the mouse as measured by next generation sequencing or Sanger sequencing. In some embodiments, the mammalian subject is a mouse, wherein when the guide RNA and the mRNA is administered at a total amount of at least 2 mg/kg, the base alteration occurs in at least 50% of whole liver cells in the mouse as measured by next generation sequencing or Sanger sequencing. In some embodiments, the nucleobase alteration results in a reduction of at least 50% in blood low-density lipoprotein cholesterol (LDL-C) level in the subject as compared to prior to the administration. In some embodiments, the protospacer is located in a splice site. In some embodiments, the protospacer complementary sequence is in the antisense strand of the PCSK9 gene. In some embodiments, the protospacer complementary sequence is in the sense strand of the PCSK9 gene. In some embodiments, the base alteration happens outside of the protospacer on the PCSK9 gene (off-target sites), wherein the editing percentages of off-target sites set forth in Table 11 are below or equal to the editing percentages set forth in Table 11, respectively. In some embodiments, the deaminase is an adenine deaminase and wherein the nucleobase alteration is a A•T to G•C alteration. In some embodiments, the programmable DNA binding domain comprises a nuclease inactive Cas9 or a Cas9 nickase. In some embodiments, the nucleobase alteration is at a splice site of the PCSK9 gene. In some embodiments, the nucleobase alteration is at a splice donor site of the PCSK9 gene. In some embodiments, the splice donor site is at 5′ end of PCSK9 intron 1 as referenced in SEQ ID NO: 5. In some embodiments, the nucleobase alteration is at a splice acceptor site of the PCSK9 gene. In some embodiments, the nucleobase alteration results in a frame shift, a premature stop codon, an insertion or deletion in a transcript encoded by the PCSK9 gene. In some embodiments, the nucleobase alteration results in an aberrant transcript encoded by the PCSK9 gene. In some embodiments, the guide RNA is chemically modified. In some embodiments, the tracr sequence of the guide RNA is chemically modified following the scheme depicted in FIG. 7. In some embodiments, the spacer sequence comprises a PCSK9 ABE guide RNA spacer sequence set forth in Table 1. In some embodiments, the guide RNA comprises the PCSK9 ABE guide RNA sequence of GA096, GA097, GA343, GA346, GA375-377, GA380-389, GA391, GA439 or GA440 as set forth in Table 1. In some embodiments, the protospacer sequence comprises a PCSK9 ABE protospacer sequence set forth in Table 1. In some embodiments, the protospacer comprises the sequence 5′-CCCGCACCTTGGCGCAGCGG-3′ (SEQ ID No: 13) or 5′-CCGCACCTTGGCGCAGCGG-3′ (SEQ ID No: 247). In some embodiments, the base editor fusion protein comprises an amino acid sequence of SEQ ID No: 2137. In some embodiments, the GC % content of the mRNA sequence is greater than 50%. In some embodiments, the GC % content of the mRNA sequence is greater than 56%. In some embodiments, the GC % content of the mRNA sequence is greater than or equal to 63%. In some embodiments, the mRNA comprises an adenine tTNA deaminase (TadA) region, a Cas9 region and a nuclear localization sequence (NLS) region. In some embodiments, the mRNA further comprises a first linker region which connects the TadA region and the Cas9 region, and a second linker region which connects the Cas9 region and the NLS region. In some embodiments, the GC % content of the TadA region is greater than 60%. In some embodiments, the GC % content of the TadA region is greater than or equal to 70%. In some embodiments, the GC % content of the Cas9 region is greater than 56%. In some embodiments, the GC % content of the Cas9 region is greater than or equal to 62%. In some embodiments, the GC % content of the NLS region is greater than 54%. In some embodiments, the GC % content of the NLS region is greater than or equal to 63%. In some embodiments, the GC % content of the first linker region is greater than 65%. In some embodiments, the GC % content of the first linker region is greater than or equal to 79%. In some embodiments, the GC % content of the second linker region is greater than 67%. In some embodiments, the GC % content of the second linker region is greater than or equal to 83%. In some embodiments, the GC % content of the TadA region is greater than 60%, the GC % content of the Cas9 region is greater than 56%, the GC % content of the NLS region is greater than 54%, the GC % content of the first linker region is greater than 65%, and the GC % content of the second linker region is greater than 67%. In some embodiments, the mRNA comprises a mRNA sequence selected from Table 23. In some embodiments, the mRNA comprises a mRNA sequence of SEQ ID No: 2136. In some embodiments, the mRNA comprises a poly A tail. In some embodiments, the composition further comprises a lipid nanoparticle (LNP) enclosing (i). In some embodiments, the LNP further encloses (ii). In some embodiments, the composition further comprises a second LNP enclosing (ii). In some embodiments, the ratio of the guide RNA and the mRNA encoding the base editor fusion protein is about 1:10 to about 10:1 by weight. In some embodiments, the ratio of the guide RNA and the mRNA encoding the base editor fusion protein is about 1:1, 1.5:1, 2:1, 3:1, 4:1, 1:1.5, 1:2, 1:3, or 1:4 by weight. In some embodiments, the ratio of the guide RNA and the mRNA encoding the base editor fusion protein is about 1:1 by weight.

[0015] In another aspect, provided herein is a pharmaceutical composition comprising the composition as provided herein and a pharmaceutically acceptable carrier or excipient.

[0016] In another aspect, provided herein is a method for treating or preventing a condition in a subject in need thereof, the method comprising administering to the subject a therapeutically effective amount of the composition as provided herein. In some embodiments, the administration is via intravenous infusion. In some embodiments, the method comprises sequential administration of a LNP enclosing (i) and a LNP enclosing (ii). In some embodiments, the method comprises concurrent administration of the t LNP enclosing (i) and the LNP enclosing (ii). In some embodiments, the method comprises administering a single dose of the LNP enclosing (ii) followed by staggered doses of the LNP enclosing (i) over an interval of 1 day. In some embodiments, the method comprises administering a single dose of the LNP enclosing (ii) followed by staggered doses of the LNP enclosing (i) over an interval of 2 days. In some embodiments, the method comprises administering a single dose of the LNP enclosing (ii) followed by staggered doses of the LNP enclosing (i) over an interval of 3 days. In some embodiments, the method comprises administering a single dose of the LNP enclosing (ii) followed by staggered doses of the LNP enclosing (i) over an interval of 4 days. In some embodiments, the method comprises administering a single dose of the LNP enclosing (ii) followed by staggered doses of the LNP enclosing (i) over an interval of 5 days. In some embodiments, the method comprises administering a single dose of the LNP enclosing (ii) followed by staggered doses of the LNP enclosing (i) over an interval of 6 days. In some embodiments, the method comprises administering a single dose of the LNP enclosing (ii) followed by staggered doses of the LNP enclosing (i) over an interval of 7 days. In some embodiments, the method comprises administering a single dose of the LNP enclosing (i) and (ii). In some embodiments, the single dose of the LNP is at about 0.3 to about 3 mg/kg. In some embodiments, the method comprises administering a treatment course of one or more treatments to the subject, wherein each one of the one or more treatment comprises one or more of the single doses of the LNP. In some embodiments, the method comprises administering a treatment course of two to ten treatments. In some embodiments, the method comprises administering a treatment course of two to five treatments. In some embodiments, the method comprises administering a treatment course of two treatments. In some embodiments, the method comprises administering a treatment course of three treatments. In some embodiments, the method comprises administering a treatment course of four treatments. In some embodiments, the method comprises administering a treatment course of five treatments. In some embodiments, the condition is an atherosclerotic cardiovascular disease. In some embodiments, the condition is an atherosclerotic vascular disease. In some embodiments, the subject is a human.

[0017] In another aspect, provided herein is a composition for editing a gene target comprising: (i) a base editor fusion protein comprising a programmable DNA binding domain and a deaminase, or a mRNA encoding the same, (ii) a guide RNA comprising a tracr sequence that serves as a binding scaffold for the base editor fusion protein, and a spacer sequence that corresponds to a protospacer on a PCSK9 gene, wherein the guide RNA directs the base editor fusion protein to effect a nucleobase alteration in the PCSK9 gene in vivo when administered to a mammalian subject, and wherein the guide RNA comprises the PCSK9 ABE guide RNA sequences as set forth in Table 1. In another aspect, provided herein is a composition for editing a gene target comprising: (i) a base editor fusion protein comprising a programmable DNA binding domain and a deaminase, or a mRNA encoding the same, (ii) a guide RNA comprising a tracr sequence that serves as a binding scaffold for the base editor fusion protein, and a spacer sequence that corresponds to a protospacer on a PCSK9 gene, wherein the guide RNA directs the base editor fusion protein to effect a nucleobase alteration in the PCSK9 gene in vivo when administered to a mammalian subject, and wherein the mRNA comprises a sequence selected from Table 23.

[0018] In another aspect, provided herein is a method for treating or preventing an atherosclerotic cardiovascular disease in a subject in need thereof, the method comprising administering to the subject a therapeutically effective amount of a first composition, comprising (i) a base editor fusion protein comprising a programmable DNA binding domain and a deaminase, or a mRNA encoding the same, (ii) a guide RNA comprising a tracr sequence that serves as a binding scaffold for the base editor fusion protein, and a spacer sequence that corresponds to a protospacer on a PCSK9 gene, wherein the guide RNA directs the base editor fusion protein to effect a nucleobase alteration in the PCSK9 gene in vivo when administered to a mammalian subject, wherein when the guide RNA and the mRNA is administered at a total amount of at least 0.05 mg/kg, the base alteration occurs in at least 35% of whole liver cells in the mammalian subject as measured by next generation sequencing or Sanger sequencing; and a second composition, comprising (i) a base editor fusion protein comprising a programmable DNA binding domain and a deaminase, or a mRNA encoding the same, (ii) a guide RNA comprising a tracr sequence that serves as a binding scaffold for the base editor fusion protein, and a spacer sequence that corresponds to a protospacer on a ANGPTL3 gene, wherein the guide RNA directs the base editor fusion protein to effect a nucleobase alteration in the ANGPTL3 gene in vivo when administered to a mammalian subject, wherein when the guide RNA and the mRNA is administered at a total amount of at least 0.5 mg/kg, the base alteration occurs in at least 35% of whole liver cells in the mammalian subject as measured by next generation sequencing or Sanger sequencing. In some embodiments, the method comprises sequential administration of the first composition and the second composition. In some embodiments, the method comprises administering one or more doses of the first composition followed by one or more dose of the second composition. In some embodiments, the method comprises administering one or more doses of the second composition followed by one or more dose of the first composition. In some embodiments, the method comprises concurrent administration of the first composition and the second composition. In some embodiments, the method comprises one or more doses of the first composition and the second composition.

[0019] In another aspect, provided herein is a composition for editing a gene target comprising: (i) a base editor fusion protein comprising a programmable DNA binding domain and a deaminase, or a mRNA encoding the same, (ii) a guide RNA comprising a tracr sequence that serves as a binding scaffold for the base editor fusion protein, and a spacer sequence that corresponds to a protospacer on a APOC3 gene, wherein the guide RNA comprises the APOC3 ABE guide RNA sequence of GA300-303 as set forth in Table 24. In another aspect, provided herein is a composition for editing a gene target comprising: (i) a base editor fusion protein comprising a programmable DNA binding domain and a deaminase, or a mRNA encoding the same, (ii) a guide RNA comprising a tracr sequence that serves as a binding scaffold for the base editor fusion protein, and a spacer sequence that corresponds to a protospacer on a PCSK9 gene, wherein the guide RNA directs the base editor fusion protein to effect a nucleobase alteration in the PCSK9 gene in vitro, wherein when the guide RNA and the mRNA is administered at a total amount of at least 2.5 mg/kg, the base alteration occurs in at least 35% of whole liver cells in the mammalian subject as measured by next generation sequencing or Sanger sequencing. In another aspect, provided herein is a composition for editing a PCSK9 gene comprising: (a) a mRNA encoding an adenine base editor protein having an editing window, and (b) a guide RNA comprising a tracr sequence that serves as a binding scaffold for the base editor protein and a spacer sequence that serves to guide the base editor protein to a protospacer sequence on the PCSK9 gene, wherein the spacer sequence is complimentary, at least in part, to a splice site or an exon region of the PCSK9 gene. In some embodiments, when the base editor protein is operatively bound to the guide RNA and the guide RNA is hybridized with the complementary strand to the protospacer sequence on the PCSK9 gene, the editing window encompasses the splice site of the PCSK9 gene. In some embodiments, when the base editor protein is operatively bound to the guide RNA and the guide RNA is hybridized with the complementary strand to the protospacer sequence on the PCSK9 gene, the editing window encompasses a region of an intron of the PCSK9 gene. In some embodiments, when the base editor protein is operatively bound to the guide RNA and the guide RNA is hybridized with the complementary strand to the protospacer sequence on the PCSK9 gene, the editing window encompasses a region of intron 1, intron 3 or intron 4 of the PCSK9 gene. In some embodiments, when the base editor protein is operatively bound to the guide RNA and the guide RNA is hybridized with the complementary strand to the protospacer sequence on the PCSK9 gene, the editing window encompasses a region of intron 1 of the PCSK9 gene. In some embodiments, the spacer sequence has a 80-100% nucleotide sequence identity to a spacer sequence selected from the group of guide RNA sequences identified as GA066, GA073 and GA074. In some embodiments, the tracr sequence has a 80-100% nucleotide sequence identity to a tracr sequence selected from the group of guide RNA sequences identified as GA066, GA095, GA096, GA097, GA343, GA346, GA375, GA376, GA377, GA380, GA381, GA382, GA383, GA384, GA385, GA386, GA387, GA388, GA389, GA439, and GA440. In some embodiments, the mRNA has an 80-100% sequence identity to the mRNA sequences identified as MA002, MA004, MA040, MA0041, or MA045. In some embodiments, the mRNA has one or more of the GC nucleotide region percentages set forth in the following table:

| Nucleotide region | Average GC Nucleotide Content |
|---|---|
| 27-213 | 67-73% |
| 389-661 | 67-71% |
| 735-829 | 63-74% |
| 4207-4286 | 67-70% |
| 4537-4569 | 65-73% |
| 4683-4741 | 62-67% |

[0020] In some embodiments, the mRNA has one or more of the GC nucleotide region percentages set forth in the following table:

| Nucleotide region | Average GC Nucleotide Content |
|---|---|
| 27-213 | At least 73% |
| 389-661 | At least 71% |
| 735-829 | At least 74% |
| 4207-4286 | At least 70% |
| 4537-4569 | At least 73% |
| 4683-4741 | At least 67% |

[0021] In some embodiments, the mRNA and gRNA are encapsulated within a lipid nanoparticle. In some embodiments, the mRNA and gRNA are encapsulated within a lipid nanoparticle having the following: LNP composition (mol %):
[0022] 40-65% iLipid
[0023] 2-20% DSPC
[0024] 1-5% PEG
[0025] Remaining mol % balance is cholesterol;
[0026] LNP Particle size: 55-120 nm Z average hydrodynamic diameter; and
[0027] Polydispersity index of <0.2 as determined by dynamic light scattering.

[0028] In some embodiments, the mRNA and gRNA are encapsulated within the lipid nanoparticle having an LNP particle size between 50-70 nm Z average hydrodynamic diameter. In some embodiments, the composition when administered to a group of cynomolgus monkeys via intravenous infusion at a dose of approximately 0.5 mg of the guide RNA and mRNA combined total weight per kg of the cynomolgus monkey weight is capable of inducing adenine base editing at the PCSK9 target splice site in the liver of the cynomolgus monkeys with an average editing percentage of greater than 40 percent. In some embodiments, the composition when administered to a group of cynomolgus monkeys via intravenous infusion at a dose of approximately 0.5 mg of the guide RNA and mRNA combined total weight per kg of the cynomolgus monkey weight is capable of inducing adenine base editing at the PCSK9 target splice site in the liver of the cynomolgus monkeys with an average editing percentage of greater than 50 percent. In some embodiments, the composition when administered to a group of cynomolgus monkeys via intravenous infusion at a dose of approximately 0.5 mg of the guide RNA and mRNA combined total weight per kg of the cynomolgus monkey weight is capable of inducing adenine base editing at the PCSK9 target splice site in the liver of the cynomolgus monkeys with an average editing percentage of greater than 30 percent. In some embodiments, the composition when administered to a group of cynomolgus monkeys via intravenous infusion at a dose of approximately 1 mg of the guide RNA and mRNA combined total weight per kg of the cynomolgus monkey weight is capable of inducing adenine base editing at the PCSK9 target splice site in the liver of the cynomolgus monkeys with an average editing percentage of greater than 40 percent. In some embodiments, the composition when administered to a group of cynomolgus monkeys via intravenous infusion at a dose of approximately 1 mg of the guide RNA and mRNA combined total weight per kg of the cynomolgus monkey weight is capable of inducing adenine base editing at the PCSK9 target splice site in the liver of the cynomolgus monkeys with an average editing percentage of greater than 50 percent. In some embodiments, the composition when administered to a group of cynomolgus monkeys via intravenous infusion at a dose of approximately 1 mg of the guide RNA and mRNA combined total weight per kg of the cynomolgus monkey weight is capable of inducing adenine base editing at the PCSK9 target splice site in the liver of the cynomolgus monkeys with an average editing percentage of greater than 60 percent. In some embodiments, the composition when administered to a group of cynomolgus monkeys via intravenous infusion at a dose of approximately 1 mg of the guide RNA and mRNA combined total weight per kg of the cynomolgus monkey weight is capable of inducing adenine base editing at the PCSK9 target splice site in the liver of the cynomolgus monkeys with an average editing percentage of greater than 70 percent. In some embodiments, the composition when administered to a group of cynomolgus monkeys via intravenous infusion at a dose of approximately 1.5 mg of the guide RNA and mRNA combined total weight per kg of the cynomolgus monkey weight is capable of inducing adenine base editing at the PCSK9 target splice site in the liver of the cynomolgus monkeys with an average editing percentage of greater than 40 percent. In some embodiments, the composition when administered to a group of cynomolgus monkeys via intravenous infusion at a dose of approximately 1.5 mg of the guide RNA and mRNA combined total weight per kg of the cynomolgus monkey weight is capable of inducing adenine base editing at the PCSK9 target splice site in the liver of the cynomolgus monkeys with an average editing percentage of greater than 50 percent. In some embodiments, the composition when administered to a group of cynomolgus monkeys via intravenous infusion at a dose of approximately 1.5 mg of the guide RNA and mRNA combined total weight per kg of the cynomolgus monkey weight is capable of inducing adenine base editing at the PCSK9 target splice site in the liver of the cynomolgus monkeys with an average editing percentage of greater than 60 percent. In some embodiments, the composition when administered to a group of cynomolgus monkeys via intravenous infusion at a dose of approximately 1.5 mg of the guide RNA and mRNA combined total weight per kg of the cynomolgus monkey weight is capable of inducing adenine base editing at the PCSK9 target splice site in the liver of the cynomolgus monkeys with an average editing percentage of greater than 70 percent. In some embodiments, the composition when at administered to a group of cynomolgus monkeys via intravenous infusion at a dose of approximately 1.5 mg of the guide RNA and mRNA combined total weight per kg of the cynomolgus monkey weight is capable of inducing adenine base editing at the PCSK9 target splice site in the liver of the cynomolgus monkeys with an average editing percentage of greater than 80 percent. In some embodiments, the composition when administered to a group of cynomolgus monkeys via intravenous infusion at a dose of approximately 3 mg of the guide RNA and mRNA combined total weight per kg of the cynomolgus monkey weight is capable of inducing adenine base editing at the PCSK9 target splice site in the liver of the cynomolgus monkeys with an average editing percentage of greater than 40 percent. In some embodiments, the composition when administered to a group of cynomolgus monkeys via intravenous infusion at a dose of approximately 3 mg of the guide RNA and mRNA combined total weight per kg of the cynomolgus monkey weight is capable of inducing adenine base editing at the PCSK9 target splice site in the liver of the cynomolgus monkeys with an average editing percentage of greater than 50 percent. In some embodiments, the composition when administered to a group of cynomolgus monkeys via intravenous infusion at a dose of approximately 3 mg of the guide RNA and mRNA combined total weight per kg of the cynomolgus monkey weight is capable of inducing adenine base editing at the PCSK9 target splice site in the liver of the cynomolgus monkeys with an average editing percentage of greater than 60 percent. In some embodiments, the composition when administered to a group of cynomolgus monkeys via intravenous infusion at a dose of approximately 3 mg of the guide RNA and mRNA combined total weight per kg of the cynomolgus monkey weight is capable of inducing adenine base editing at the PCSK9 target splice site in the liver of the cynomolgus monkeys with an average editing percentage of greater than 70 percent. In some embodiments, the composition when administered to a group of cynomolgus monkeys via intravenous infusion at a dose of approximately 3 mg of the guide RNA and mRNA combined total weight per kg of the cynomolgus monkey weight is capable of inducing adenine base editing at the PCSK9 target splice site in the liver of the cynomolgus monkeys with an average editing percentage of greater than 80 percent. In some embodiments, the percent editing is determined at 15 days after dosing through analysis of dosed cynomolgus monkey liver either via liver biopsy or necropsy of the monkey. In some embodiments, the percent editing is determined to be durably maintained by periodic liver biopsy testing of the dosed cynomolgus monkeys over a span of at least 168 days after dosing. In some embodiments, the percent editing is determined to be durably maintained by periodic liver biopsy testing of the dosed cynomolgus monkeys over a span of at least 300 days after dosing. In some embodiments, the composition when administered to a group of cynomolgus monkeys via intravenous infusion at a dose of approximately 0.5 mg of the guide RNA and mRNA combined total weight per kg of cynomolgus monkey weight is capable of reducing PCSK9 protein in the plasma of the dosed cynomolgus monkeys on average of at least 35 percent as compared to baseline. In some embodiments, the composition when administered to a group of cynomolgus monkeys via intravenous infusion at a dose of approximately 0.5 mg of the guide RNA and mRNA combined total weight per kg of cynomolgus monkey weight is capable of reducing PCSK9 protein in the plasma of the dosed cynomolgus monkeys on average of at least 40 percent as compared to baseline. In some embodiments, the composition when administered to a group of cynomolgus monkeys via intravenous infusion at a dose of approximately 0.5 mg of the guide RNA and mRNA combined total weight per kg of monkey weight is capable of reducing PCSK9 protein in the plasma of the dosed cynomolgus monkeys on average of at least 50 percent as compared to baseline. In some embodiments, the composition when administered to a group of cynomolgus monkeys via intravenous infusion at a dose of approximately 0.5 mg of the guide RNA and mRNA combined total weight per kg of cynomolgus monkey weight is capable of reducing PCSK9 protein in the plasma of the dosed monkeys on average of at least 60 percent as compared to baseline. In some embodiments, the composition when administered to a group of cynomolgus monkeys via intravenous infusion at a dose of approximately 0.5 mg of the guide RNA and mRNA combined total weight per kg of cynomolgus monkey weight is capable of reducing PCSK9 protein in the plasma of the dosed cynomolgus monkeys on average of at least 70 percent as compared to baseline. In some embodiments, the composition when administered to a group of cynomolgus monkeys via intravenous infusion at a dose of approximately 0.5 mg of the guide RNA and mRNA combined total weight per kg of cynomolgus monkey weight is capable of reducing PCSK9 protein in the plasma of the dosed cynomolgus monkeys on average of at least 80 percent as compared to baseline. In some embodiments, the composition when administered to a group of cynomolgus monkeys via intravenous infusion at a dose of approximately 1 mg of the guide RNA and mRNA combined total weight per kg of cynomolgus monkey weight is capable of reducing PCSK9 protein in the plasma of the dosed cynomolgus monkeys on average of at least 35 percent as compared to baseline. In some embodiments, the composition when administered to a group of cynomolgus monkeys via intravenous infusion at a dose of approximately 1 mg of the guide RNA and mRNA combined total weight per kg of cynomolgus monkey weight is capable of reducing PCSK9 protein in the plasma of the dosed cynomolgus monkeys on average of at least 40 percent as compared to baseline. In some embodiments, wherein the composition when administered to a group of cynomolgus monkeys via intravenous infusion at a dose of approximately 1 mg of the guide RNA and mRNA combined total weight per kg of monkey weight is capable of reducing PCSK9 protein in the plasma of the dosed cynomolgus monkeys on average of at least 50 percent as compared to baseline. In some embodiments, the composition when administered to a group of cynomolgus monkeys via intravenous infusion at a dose of approximately 1 mg of the guide RNA and mRNA combined total weight per kg of cynomolgus monkey weight is capable of reducing PCSK9 protein in the plasma of the dosed cynomolgus monkeys on average of at least 60 percent as compared to baseline. In some embodiments, the composition when administered to a group of cynomolgus monkeys via intravenous infusion at a dose of approximately 1 mg of the guide RNA and mRNA combined total weight per kg of cynomolgus monkey weight is capable of reducing PCSK9 protein in the plasma of the dosed cynomolgus monkeys on average of at least 70 percent as compared to baseline. In some embodiments, the composition when administered to a group of cynomolgus monkeys via intravenous infusion at a dose of approximately 1 mg of the guide RNA and mRNA combined total weight per kg of cynomolgus monkey weight is capable of reducing PCSK9 protein in the plasma of the dosed cynomolgus monkeys on average of at least 80 percent as compared to baseline. In some embodiments, the composition when administered to a group of cynomolgus monkeys via intravenous infusion at a dose of approximately 1.5 mg of the guide RNA and mRNA combined total weight per kg of cynomolgus monkey weight is capable of reducing PCSK9 protein in the plasma of the dosed cynomolgus monkeys on average of at least 35 percent as compared to baseline. In some embodiments, the composition when administered to a group of cynomolgus monkeys via intravenous infusion at a dose of approximately 1.5 mg of the guide RNA and mRNA combined total weight per kg of cynomolgus monkey weight is capable of reducing PCSK9 protein in the plasma of the dosed cynomolgus monkeys on average of at least 40 percent as compared to baseline. In some embodiments, the composition when administered to a group of cynomolgus monkeys via intravenous infusion at a dose of approximately 1.5 mg of the guide RNA and mRNA combined total weight per kg of cynomolgus monkey weight is capable of reducing PCSK9 protein in the plasma of the dosed cynomolgus monkeys on average of at least 50 percent as compared to baseline. In some embodiments, the composition when administered to a group of cynomolgus monkeys via intravenous infusion at a dose of approximately 1.5 mg of the guide RNA and mRNA combined total weight per kg of cynomolgus monkey weight is capable of reducing PCSK9 protein in the plasma of the dosed cynomolgus monkeys on average of at least 60 percent as compared to baseline. In some embodiments, the composition when administered to a group of cynomolgus monkeys via intravenous infusion at a dose of approximately 1.5 mg of the guide RNA and mRNA combined total weight per kg of cynomolgus monkey weight is capable of reducing PCSK9 protein in the plasma of the dosed cynomolgus monkeys on average of at least 70 percent as compared to baseline. In some embodiments, the composition when administered to a group of cynomolgus monkeys via intravenous infusion at a dose of approximately 1.5 mg of the guide RNA and mRNA combined total weight per kg of cynomolgus monkey weight is capable of reducing PCSK9 protein in the plasma of the dosed cynomolgus monkeys on average of at least 80 percent as compared to baseline. In some embodiments, the composition when administered to a group of cynomolgus monkeys via intravenous infusion at a dose of approximately 3 mg of the guide RNA and mRNA combined total weight per kg of cynomolgus monkey weight is capable of reducing PCSK9 protein in the plasma of the dosed cynomolgus monkeys on average of at least 35 percent as compared to baseline. In some embodiments, the composition when administered to a group of cynomolgus monkeys via intravenous infusion at a dose of approximately 3 mg of the guide RNA and mRNA combined total weight per kg of cynomolgus monkey weight is capable of reducing PCSK9 protein in the plasma of the dosed cynomolgus monkeys on average of at least 40 percent as compared to baseline. In some embodiments, the composition when administered to a group of cynomolgus monkeys via intravenous infusion at a dose of approximately 3 mg of the guide RNA and mRNA combined total weight per kg of cynomolgus monkey weight is capable of reducing PCSK9 protein in the plasma of the dosed cynomolgus monkeys on average of at least 50 percent as compared to baseline. In some embodiments, the composition when administered to a group of cynomolgus monkeys via intravenous infusion at a dose of approximately 3 mg of the guide RNA and mRNA combined total weight per kg of cynomolgus monkey weight is capable of reducing PCSK9 protein in the plasma of the dosed cynomolgus monkeys on average of at least 60 percent as compared to baseline. In some embodiments, the composition when administered to a group of cynomolgus monkeys via intravenous infusion at a dose of approximately 3 mg of the guide RNA and mRNA combined total weight per kg of cynomolgus monkey weight is capable of reducing PCSK9 protein in the plasma of the dosed cynomolgus monkeys on average of at least 70 percent as compared to baseline. In some embodiments, the composition when administered to a group of cynomolgus monkeys via intravenous infusion at a dose of approximately 3 mg of the guide RNA and mRNA combined total weight per kg of cynomolgus monkey weight is capable of reducing PCSK9 protein in the plasma of the dosed cynomolgus monkeys on average of at least 80 percent as compared to baseline. In some embodiments, the reduction in plasma protein is determined at 15 days after dosing via blood sampling and analysis of the dosed cynomolgus monkey. In some embodiments, the composition when administered to a group of cynomolgus monkeys via intravenous infusion at a dose of approximately 0.5 mg of the guide RNA and mRNA combined total weight per kg of monkey weight is capable of reducing LDL-C in the plasma of the dosed monkeys on average of at least 20 percent as compared to baseline. In some embodiments, the composition when administered to a group of cynomolgus monkeys via intravenous infusion at a dose of approximately 0.5 mg of the guide RNA and mRNA combined total weight per kg of cynomolgus monkey weight is capable of reducing LDL-C in the plasma of the dosed cynomolgus monkeys on average of at least 25 percent as compared to baseline. In some embodiments, the composition when administered to a group of cynomolgus monkeys via intravenous infusion at a dose of approximately 0.5 mg of the guide RNA and mRNA combined total weight per kg of cynomolgus monkey weight is capable of reducing LDL-C in the plasma of the dosed cynomolgus monkeys on average of at least 30 percent as compared to baseline. In some embodiments, the composition when administered to a group of cynomolgus monkeys via intravenous infusion at a dose of approximately 0.5 mg of the guide RNA and mRNA combined total weight per kg of cynomolgus monkey weight is capable of reducing LDL-C in the plasma of the dosed cynomolgus monkeys on average of at least 35 percent as compared to baseline. In some embodiments, the composition when administered to a group of cynomolgus monkeys via intravenous infusion at a dose of approximately 0.5 mg of the guide RNA and mRNA combined total weight per kg of cynomolgus monkey weight is capable of reducing LDL-C in the plasma of the dosed cynomolgus monkeys on average of at least 40 percent as compared to baseline. In some embodiments, the composition when administered to a group of cynomolgus monkeys via intravenous infusion at a dose of approximately 0.5 mg of the guide RNA and mRNA combined total weight per kg of cynomolgus monkey weight is capable of reducing LDL-C in the plasma of the dosed cynomolgus monkeys on average of at least 45 percent as compared to baseline. In some embodiments, the composition when administered to a group of cynomolgus monkeys via intravenous infusion at a dose of approximately 1 mg of the guide RNA and mRNA combined total weight per kg of cynomolgus monkey weight is capable of reducing LDL-C in the plasma of the dosed cynomolgus monkeys on average of at least 20 percent as compared to baseline. In some embodiments, the composition when administered to a group of cynomolgus monkeys via intravenous infusion at a dose of approximately 1 mg of the guide RNA and mRNA combined total weight per kg of cynomolgus monkey weight is capable of reducing LDL-C in the plasma of the dosed cynomolgus monkeys on average of at least 25 percent as compared to baseline. In some embodiments, the composition when administered to a group of cynomolgus monkeys via intravenous infusion at a dose of approximately 1 mg of the guide RNA and mRNA combined total weight per kg of cynomolgus monkey weight is capable of reducing LDL-C in the plasma of the dosed cynomolgus monkeys on average of at least 30 percent as compared to baseline. In some embodiments, the composition when administered to a group of cynomolgus monkeys via intravenous infusion at a dose of approximately 1 mg of the guide RNA and mRNA combined total weight per kg of cynomolgus monkey weight is capable of reducing LDL-C in the plasma of the dosed cynomolgus monkeys on average of at least 35 percent as compared to baseline. In some embodiments, the composition when administered to a group of cynomolgus monkeys via intravenous infusion at a dose of approximately 1 mg of the guide RNA and mRNA combined total weight per kg of cynomolgus monkey weight is capable of reducing LDL-C in the plasma of the dosed cynomolgus monkeys on average of at least 40 percent as compared to baseline. In some embodiments, the composition when administered to a group of cynomolgus monkeys via intravenous infusion at a dose of approximately 1 mg of the guide RNA and mRNA combined total weight per kg of cynomolgus monkey weight is capable of reducing LDL-C in the plasma of the dosed cynomolgus monkeys on average of at least 45 percent as compared to baseline. In some embodiments, the composition when administered to a group of cynomolgus monkeys via intravenous infusion at a dose of approximately 1 mg of the guide RNA and mRNA combined total weight per kg of cynomolgus monkey weight is capable of reducing LDL-C in the plasma of the dosed cynomolgus monkeys on average of at least 50 percent as compared to baseline. In some embodiments, the composition when administered to a group of cynomolgus monkeys via intravenous infusion at a dose of approximately 1 mg of the guide RNA and mRNA combined total weight per kg of cynomolgus monkey weight is capable of reducing LDL-C in the plasma of the dosed cynomolgus monkeys on average of at least 55 percent as compared to baseline. In some embodiments, the composition when administered to a group of cynomolgus monkeys via intravenous infusion at a dose of approximately 1 mg of the guide RNA and mRNA combined total weight per kg of cynomolgus monkey weight is capable of reducing LDL-C in the plasma of the dosed cynomolgus monkeys on average of at least 60 percent as compared to baseline. In some embodiments, the composition when administered to a group of cynomolgus monkeys via intravenous infusion at a dose of approximately 1.5 mg of the guide RNA and mRNA combined total weight per kg of cynomolgus monkey weight is capable of reducing LDL-C in the plasma of the dosed cynomolgus monkeys on average of at least 20 percent as compared to baseline. In some embodiments, the composition when administered to a group of cynomolgus monkeys via intravenous infusion at a dose of approximately 1.5 mg of the guide RNA and mRNA combined total weight per kg of cynomolgus monkey weight is capable of reducing LDL-C in the plasma of the dosed cynomolgus monkeys on average of at least 25 percent as compared to baseline. In some embodiments, the composition when administered to a group of cynomolgus monkeys via intravenous infusion at a dose of approximately 1.5 mg of the guide RNA and mRNA combined total weight per kg of cynomolgus monkey weight is capable of reducing LDL-C in the plasma of the dosed cynomolgus monkeys on average of at least 30 percent as compared to baseline. In some embodiments, the composition when administered to a group of cynomolgus monkeys via intravenous infusion at a dose of approximately 1.5 mg of the guide RNA and mRNA combined total weight per kg of cynomolgus monkey weight is capable of reducing LDL-C in the plasma of the dosed cynomolgus monkeys on average of at least 35 percent as compared to baseline. In some embodiments, the composition when administered to a group of cynomolgus monkeys via intravenous infusion at a dose of approximately 1.5 mg of the guide RNA and mRNA combined total weight per kg of cynomolgus monkey weight is capable of reducing LDL-C in the plasma of the dosed cynomolgus monkeys on average of at least 40 percent as compared to baseline. In some embodiments, the composition when administered to a group of cynomolgus monkeys via intravenous infusion at a dose of approximately 1.5 mg of the guide RNA and mRNA combined total weight per kg of cynomolgus monkey weight is capable of reducing LDL-C in the plasma of the dosed cynomolgus monkeys on average of at least 45 percent as compared to baseline. In some embodiments, the composition when administered to a group of cynomolgus monkeys via intravenous infusion at a dose of approximately 1.5 mg of the guide RNA and mRNA combined total weight per kg of cynomolgus monkey weight is capable of reducing LDL-C in the plasma of the dosed cynomolgus monkeys on average of at least 50 percent as compared to baseline. In some embodiments, the composition when administered to a group of cynomolgus monkeys via intravenous infusion at a dose of approximately 1.5 mg of the guide RNA and mRNA combined total weight per kg of cynomolgus monkey weight is capable of reducing LDL-C in the plasma of the dosed cynomolgus monkeys on average of at least 55 percent as compared to baseline. In some embodiments, the composition when administered to a group of cynomolgus monkeys via intravenous infusion at a dose of approximately 1.5 mg of the guide RNA and mRNA combined total weight per kg of cynomolgus monkey weight is capable of reducing LDL-C in the plasma of the dosed cynomolgus monkeys on average of at least 60 percent as compared to baseline. In some embodiments, the composition when administered to a group of cynomolgus monkeys via intravenous infusion at a dose of approximately 1.5 mg of the guide RNA and mRNA combined total weight per kg of cynomolgus monkey weight is capable of reducing LDL-C in the plasma of the dosed cynomolgus monkeys on average of at least 65 percent as compared to baseline. In some embodiments, the composition when administered to a group of cynomolgus monkeys via intravenous infusion at a dose of approximately 3 mg of the guide RNA and mRNA combined total weight per kg of cynomolgus monkey weight is capable of reducing LDL-C in the plasma of the dosed cynomolgus monkeys on average of at least 20 percent as compared to baseline. In some embodiments, the composition when administered to a group of cynomolgus monkeys via intravenous infusion at a dose of approximately 3 mg of the guide RNA and mRNA combined total weight per kg of cynomolgus monkey weight is capable of reducing LDL-C in the plasma of the dosed cynomolgus monkeys on average of at least 25 percent as compared to baseline. In some embodiments, the composition when administered to a group of cynomolgus monkeys via intravenous infusion at a dose of approximately 3 mg of the guide RNA and mRNA combined total weight per kg of cynomolgus monkey weight is capable of reducing LDL-C in the plasma of the dosed cynomolgus monkeys on average of at least 30 percent as compared to baseline. In some embodiments, the composition when administered to a group of cynomolgus monkeys via intravenous infusion at a dose of approximately 3 mg of the guide RNA and mRNA combined total weight per kg of cynomolgus monkey weight is capable of reducing LDL-C in the plasma of the dosed cynomolgus monkeys on average of at least 35 percent as compared to baseline. In some embodiments, the composition when administered to a group of cynomolgus monkeys via intravenous infusion at a dose of approximately 3 mg of the guide RNA and mRNA combined total weight per kg of cynomolgus monkey weight is capable of reducing LDL-C in the plasma of the dosed cynomolgus monkeys on average of at least 40 percent as compared to baseline. In some embodiments, the composition when administered to a group of cynomolgus monkeys via intravenous infusion at a dose of approximately 3 mg of the guide RNA and mRNA combined total weight per kg of cynomolgus monkey weight is capable of reducing LDL-C in the plasma of the dosed cynomolgus monkeys on average of at least 45 percent as compared to baseline. In some embodiments, the composition when administered to a group of cynomolgus monkeys via intravenous infusion at a dose of approximately 3 mg of the guide RNA and mRNA combined total weight per kg of cynomolgus monkey weight is capable of reducing LDL-C in the plasma of the dosed cynomolgus monkeys on average of at least 50 percent as compared to baseline. In some embodiments, the composition when administered to a group of cynomolgus monkeys via intravenous infusion at a dose of approximately 3 mg of the guide RNA and mRNA combined total weight per kg of cynomolgus monkey weight is capable of reducing LDL-C in the plasma of the dosed cynomolgus monkeys on average of at least 55 percent as compared to baseline. In some embodiments, the composition when administered to a group of cynomolgus monkeys via intravenous infusion at a dose of approximately 3 mg of the guide RNA and mRNA combined total weight per kg of cynomolgus monkey weight is capable of reducing LDL-C in the plasma of the dosed cynomolgus monkeys on average of at least 60 percent as compared to baseline. In some embodiments, the composition when administered to a group of cynomolgus monkeys via intravenous infusion at a dose of approximately 3 mg of the guide RNA and mRNA combined total weight per kg of cynomolgus monkey weight is capable of reducing LDL-C in the plasma of the dosed cynomolgus monkeys on average of at least 65 percent as compared to baseline. In some embodiments, the reduction in LDL-C is determined at 15 days after dosing via blood sampling and analysis of the dosed cynomolgus monkey. In some embodiments, the reduction in LDL-C is determined to be durably maintained over a span of at least 168 days by periodic blood sampling and analysis of the dosed cynomolgus monkey. In some embodiments, the reduction in LDL-C is determined to be durably maintained over a span of at least 300 days by periodic blood sampling and analysis of the dosed cynomolgus monkey. In some embodiments, the composition when administered to a group of cynomolgus monkeys via intravenous infusion at a dose of approximately 3 mg of the guide RNA and mRNA combined total weight per kg of cynomolgus monkey weight is capable of reducing lipoprotein(a) in the plasma of the dosed cynomolgus monkeys on average of at least 10 percent as compared to baseline. In some embodiments, the composition when administered to a group of cynomolgus monkeys via intravenous infusion at a dose of approximately 3 mg of the guide RNA and mRNA combined total weight per kg of cynomolgus monkey weight is capable of reducing lipoprotein(a) level in the plasma of the dosed cynomolgus monkeys on average of at least 15 percent as compared to baseline. In some embodiments, the composition when administered to a group of cynomolgus monkeys via intravenous infusion at a dose of approximately 3 mg of the guide RNA and mRNA combined total weight per kg of cynomolgus monkey weight is capable of reducing lipoprotein(a) level in the plasma of the dosed cynomolgus monkeys on average of at least 20 percent as compared to baseline. In some embodiments, the composition when administered to a group of cynomolgus monkeys via intravenous infusion at a dose of approximately 3 mg of the guide RNA and mRNA combined total weight per kg of cynomolgus monkey weight is capable of reducing lipoprotein(a) level in the plasma of the dosed cynomolgus monkeys on average of at least 25 percent as compared to baseline. In some embodiments, the composition when administered to a group of cynomolgus monkeys via intravenous infusion at a dose of approximately 3 mg of the guide RNA and mRNA combined total weight per kg of cynomolgus monkey weight is capable of reducing lipoprotein(a) level in the plasma of the dosed cynomolgus monkeys on average of at least 30 percent as compared to baseline. In some embodiments, the composition when administered to a group of cynomolgus monkeys via intravenous infusion at a dose of approximately 3 mg of the guide RNA and mRNA combined total weight per kg of cynomolgus monkey weight is capable of reducing lipoprotein(a) level in the plasma of the dosed cynomolgus monkeys on average of approximately 35 percent as compared to baseline. In some embodiments, the reduction in lipoprotein(a) is determined at 15 days after dosing via blood sampling and analysis of the dosed cynomolgus monkey. In some embodiments, the reduction in lipoprotein(a) is determined to be durably maintained over a span of at least 224 days by periodic blood sampling and analysis of the dosed cynomolgus monkey. In some embodiments, the reduction in lipoprotein(a) is determined to be durably maintained over a span of at least 300 days by periodic blood sampling and analysis of the dosed cynomolgus monkey. In some embodiments, to the extent that the dosing of the cynomolgus monkeys results in elevation of AST, ALT, or Cytokines, the elevations resulting from the dosing of the composition are transient and resolved back to approximately baseline levels within 3-15 days after dosing. In some embodiments, the percent editing of PCSK9 is negligible outside of the liver, spleen and adrenal glands tissues as illustrated in FIG. 27. In some embodiments, repeat dosing results is additive with respect to the editing percentage of PCSK9 editing percentage. In some embodiments, the repeat dosing does not elicit cytokine activation nor an immune response. In some embodiments, the spacer sequence has at least 80% nucleotide correlation with the nucleotide sequence of a targeted protospacer on the PCSK9 gene, wherein an RNA nucleotide on the spacer sequence is in correlation with a DNA nucleotide of the protospacer if it has the same nucleotide as the DNA nucleotide in the same order and wherein uracil and thymine bases are considered the same nucleotide for purposes of determining correlation. In some embodiments, the spacer sequence has at least 85% nucleotide correlation with the nucleotide sequence of a targeted protospacer on the PCSK9 gene. In some embodiments, the spacer sequence has at least 90% nucleotide correlation with the nucleotide sequence of a targeted protospacer on the PCSK9 gene. In some embodiments, the spacer sequence has at least 95% nucleotide correlation with the nucleotide sequence of a targeted protospacer on the PCSK9 gene. In some embodiments, the spacer sequence has at least 99% nucleotide correlation with the nucleotide sequence of a targeted protospacer on the PCSK9 gene. In some embodiments, the spacer sequence has at least 100% nucleotide correlation with the nucleotide sequence of a targeted protospacer on the PCSK9 gene.

[0029] In another aspect, provided herein is a method for treating or preventing an atherosclerotic cardiovascular disease in a subject in need thereof, the method comprising administering to the subject a therapeutically effective amount of (a) a mRNA encoding an adenine base editor protein having an editing window, (b) a first guide RNA comprising a tracr sequence that serves as a binding scaffold for the base editor protein and a spacer sequence that serves to guide the base editor protein to a protospacer sequence on a PCSK9 gene, wherein the spacer sequence is complimentary, at least in part, to a splice site or an exon region of the PCSK9 gene; and (c) a second guide RNA comprising a tracr sequence that serves as a binding scaffold for the base editor protein and a spacer sequence that serves to guide the base editor protein to a protospacer sequence on a ANGPTL3 gene, wherein the spacer sequence is complimentary, at least in part, to a splice site or an exon region of the ANGPTL3 gene. In some embodiments, the method further comprises a first LNP enclosing (a). In some embodiments, the first LNP encloses (b) and (c). In some embodiments, the first LNP was administered repeatedly. In some embodiments, the first LNP was administered repeatedly at an interval of one to sixty days. In some embodiments, the first LNP was administered repeatedly at an interval of seven days. In some embodiments, the first LNP further encloses (b). In some embodiments, the method further comprises a second LNP enclosing (a) and (c). In some embodiments, the first LNP and the second LNP are administered sequentially. In some embodiments, the first LNP and the second LNP are administered sequentially at an interval of one day to 12 months. In some embodiments, the interval is one day. In some embodiments, the interval is five days. In some embodiments, the interval is ten days. In some embodiments, the interval is fifteen days. In some embodiments, the interval is twenty days. In some embodiments, the interval is twenty-five days. In some embodiments, the interval is one month. In some embodiments, the interval is two months. In some embodiments, the interval is three months. In some embodiments, the interval is five months. In some embodiments, the interval is eight months. In some embodiments, the interval is ten months. In some embodiments, the interval is twelve months.

### BRIEF DESCRIPTION OF THE DRAWINGS

[0030] The features, principles, advantages, and illustrative embodiments, implementations, analysis, and examples of the subject matter of this application are set forth herein including in the appended claims with aspects of which being illustrated in the accompanying drawings of which:

[0031] FIGS. 1A-1C illustrate the modes of operation of Cas9, cytidine base editors (CBE), and adenine base editors (ABE) respectively, along with relevant terminology used in this application including “protospacer”, “PAM”, “spacer” (Mali, P. et al 2013 Nat Methods 10, 957-963; Anzalone, A V. 2020 Nat Biotechnol 38, 824-844). FIG. 1A discloses SEQ ID NO: 3160. FIG. 1D is a schematic representation of how mcPCSK9 guide RNA (gRNA)-Tracr disclosed herein were designed. Shown is a ribonucleoprotein (RNP)-single guide RNA (sgRNA) alignment with stem-loop guide intramolecular interactions (W-C base pairing at the stem). The tracrRNA sequence of the gRNA serves as a binding scaffold for the cas protein. When designing a gRNA, loop nucleotides can be aligned with a protein and the interaction of base (H-bond), 2′-hydroxyl (2′-OH), 4′-oxygen (ring-oxygen) of the sugar moiety, phosphate linkage of each nucleotide to amino acid side chains of the protein can be considered in the design of a gRNA-Tracr. Spatial arrangement of nucleotide within RNP-steric interaction, room to accommodate bulky substitution like 2′-O-Methyl (2′-OMe) and phosphorothioate (PS) can be also taken into consideration. FIG. 1D discloses SEQ ID NOS 70-71, respectively, in order of appearance.

[0032] FIG. 2 are two tables that describe how SpCas9 crystal structures were chosen in connection with designing a gRNAs disclosed herein based on structure. The top panel is a table summarizing different components of CRISPR/Cas system with Protein Data Bank (PDB) IDs and the state. The bottom panel shows the root mean square deviation (RMSD) values after alignment between the protein chains of each structure. The RNP state (4ZT0) and pre-catalytic ternary complex (5F9R) are the most relevant to determine contacts related to RNP formation and contacts related to catalysis. Some rearrangement of the protein occurs between these two states. Massive rearrangements may occur in the protein between the apo state and the RNP.

[0033] FIG. 3 depicts a gRNA secondary structure of a sgRNA based on the 4ZT0 and 5F9R crystal structures, in which the sgRNA is bound to SpCas9 either as an RNP alone or as part of a ternary complex with DNA. Secondary structure relationships are shown in the Leontis and Westhof nomenclature (RNA, 2001, 7, 499-512) (SEQ ID NO: 72).

[0034] FIG. 4 depicts a gRNA secondary structure with a PCSK9 spacer showing predicted contacts based on RNP PDB 4ZT0 (sgRNA+SpCas9 RNP). Positions 1-10 and positions 83-100 were not modeled in this crystal structure due to a lack of clear electron density (SEQ ID NO: 73). Black circle with white letter labels: protein contact, light gray with black letter: steric clash if 2′-O-Me incorporated or distant contact, dark grey with black letter: RNA contact. As a person of skill in the art would understand, the term “clash” as used herein refers to physically-unlikely overlapping atomic volumes in a structure. Incorporation of a 2′O-Me modification in these situations would potentially result in structural rearrangement(s) that could be detrimental to RNP function. As a person of skill in the art would understand, the term “contact” as used herein means a stable, non-covalent interaction between two functional groups, e.g. a hydrogen bond.

[0035] FIG. 5 depicts a gRNA secondary structure with a PCSK9 spacer showing predicted contacts based on PDB 5F9R (precatalytic ternary complex) (SEQ ID NO: 73). Black circle with white letter labels: protein contact, light gray with black letter: steric clash if 2′-O-Me incorporated or distant contact, dark grey with black letter: RNA contact.

[0036] FIG. 6 depicts plausible positions of 2′-OMe substitutions determined by structure-based designs (SEQ ID NO: 3161). Black circle with white letter labels: 2′-OMe and phosphorothioate substitution, light gray circle with black letter labels: 2′-OMe substitution only, white circle with black letter labels: unmodified nucleotide.

[0037] FIG. 7A depicts three patterns of 2′-OMe position identified in the tracr region of the single guide RNA from structure-guided incorporation of 2′-O-methylribosugar modification that produced robust editing in vivo: (1) mice: FIG. 16, GA054 (tracr1) and GA055 (tracr2) and (2) NHP: FIG. 28, GA096 (tracr1), GA097 (tracr2) and GA346 (tracr3). Black circle with white letter labels: 2′-OMe and phosphorothioate substitution, light gray circle with black letter labels: 2′-OMe substitution only, white circle with black letter labels: unmodified nucleotide. (SEQ ID NOS: 55, 2244 and 3162, respectively, in order of appearance) FIG. 7B depicts the sequence alignment of unmodified SEQ ID NO: 61, a reference tracrRNA sequence (“Lit Tracr”), tracr1, tracr2, and tracr3. (SEQ ID NOS: 3163, 57, 2249 and 3164, respectively, in order of appearance)

[0038] FIG. 8 shows base editing of the target splice site by an adenosine base editor system in modifying PCSK9 in primary human hepatocytes. The dark line represents the percent splice site editing obtained using gRNA identified a GA066.

[0039] FIG. 9 depicts a Sanger sequencing chromatogram demonstrating editing of adenine base in the antisense strand at the splice donor at the end of PCSK9 exon 1 (PCR amplification from the genomic DNA of the cells transfected with the 2500-ng/mL dose), portraying how splice-site disruption results in an in-frame stop codon. Heterozygosity for a naturally occurring single nucleotide polymorphism (SNP) is evident downstream of the editing site. The scheme shows A-to-G base editing by an adenosine base editor system to knock-out PCSK9 in primary human hepatocytes. FIG. 9 discloses SEQ ID NO: 75.

[0040] FIG. 10 depicts a Sanger sequencing chromatogram demonstrating editing of adenine base in the antisense strand at the splice donor at the end of ANGPTL3 exon 6 (PCR amplification from the genomic DNA of the cells transfected with the 2500-ng/mL dose), portraying how splice-site disruption results in an in-frame stop codon. A-to-G base editing effected by an adenosine base editor system in modifying ANGPTL3 in primary human hepatocytes. FIG. 10 discloses SEQ ID NO: 76.

[0041] FIG. 11 shows three sanger sequencing chromatograms from PCR amplified genomic DNA isolated from: 1) untreated primary hepatocytes (top panel); 2) SpCas9 mRNA/PCSK9 gRNA GA097 treated primary hepatocytes (middle panel); 3) ABE8.8 mRNA/PCSK9 gRNA treated primary hepatocytes (bottom panel). The PCSK9-gRNA GA097 protospacer sequence is highlighted in grey. The arrow points to the position 6 of the protospacer that is targeted for A-to-G base editing by the ABE8.8 editor. The scissors depict the general site of double stranded break that occurs upon cutting by the SpCas9 nuclease at this target site. SpCas9 mRNA and GA097 delivery in cells resulted in significant gene editing at the site of the double strand break (as denoted with the scissors) but this was not seen in the ABE8.8 and GA097 delivery in cells. Instead, the same gRNA GA097 in combination with ABE8.8 mRNA resulted in robust A-to-G base editing. FIG. 11 discloses SEQ ID NO 77-79, respectively in order of appearance.

[0042] FIG. 12 depicts a schematic showing potential splicing outcomes with disruption of splice donor or splice acceptor sequences. Other outcomes are possible, such as inclusion of part of intron 1 in the splicing product. Alteration of the splice donor or splice acceptor sites are shown (top panel). Alternative splice donor sites within PCSK9 intron 1 resulting from editing of PCSK9 exon 1 splice-donor adenine base in primary human hepatocytes is shown in the bottom panel. *Four different primer pairs (Table 9) were used for RT-PCR of the control/treated samples.

[0043] FIG. 13 shows lack of guide RNA-dependent DNA off-target editing in primary human hepatocytes. Human primary hepatocytes were incubated with gRNA (GA097 or GA346) and ABE8.8 mRNA as described in Example 4. The off-target reading was calculated as net adenine editing (proportion of sequencing reads with alteration of one or more adenine bases in LNP-treated cells versus untreated cells) at the on-target PCSK9 site and more than 50 candidate off-target PCSK9 sites in primary human hepatocytes from four individual donors.

[0044] FIG. 14 depicts guide RNA-independent RNA editing, assessed in SpCas9-treated or ABE8.8-treated hepatocytes after 2 days (n=4 biological replicates). Each replicate was compared against each of four untreated hepatocyte samples to eliminate any positions with editing that were common to both conditions. The jitter plots portray transcriptomic loci with editing in the treated sample (number indicates total edited loci identified in the treated sample, boxplot indicates median±interquartile range of proportion of edited reads across all edited loci in the sample). gRNA GA097, SpCas9 mRNA MS010, and ABE8.8 mRNA MA004 were used in this study as described in example 4.

[0045] FIG. 15 shows PCSK9 and ANGPTL3 base editing with lipid nanoparticles (LNPs) formulated with an embodiment of base editor system, ABE mRNA and a guide RNA, in primary human hepatocytes and primary non-human primates (NHP) hepatocytes. The human-specific ANGPTL3 guide RNA showed low editing efficiency in NHP hepatocytes within the concentration evaluated, whereas the PCSK9 guide RNA cross-reactive to both human and NHP showed high editing efficiency in both cell lines.

[0046] FIG. 16 shows gene editing of Pcsk9 in mice (n=2-5 mice) via LNPs containing SpCas9 mRNA MS002 (TriLink Biotechnologies) and mouse Pcsk9-targeting gRNA with different tracr designs (GA052, GA053, GA054, and GA055) at a 1:1 weight ratio. Wild-type C57BL/6 mice were dosed with 2 mg/kg of the LNP test article. The mg/kg dose was calculated based on total RNA and the total RNA is the quantified sum of mRNA and gRNA present in the LNP after formulation. Seven days after dosing, the mice were euthanized and genomic DNA was harvested from mouse liver, and then assessed for base editing of the target site with next-generation sequencing. All four guide RNAs evaluated carry same spacer and same pattern of chemical modification within the first 20 nucleotides from the 5′-end, but all four differ in chemical modification pattern within the tracr between nucleotides at position 21 and at position 100 of the 100-mer guide RNA.

[0047] FIG. 17 shows base editing of PCSK9 in mice (n=5) via LNPs with an embodiment of base editor system, ABE mRNA MA004 and PCSK9 guide RNA GA256 (targeting mouse intron 1 splice donor). Wild-type C57BL/6 mice were dosed with 2 mg/kg total RNA of the LNP test article. Seven days after dosing, the mice were euthanized and genomic DNA was harvested from mouse liver, and then assessed for base editing of the target site with next-generation sequencing.

[0048] FIG. 18 depicts editing of the Pcsk9 exon 1 splice-donor adenine base in wild-type mouse liver, assessed 1 week following treatment with different doses of same LNP formulation with ABE8.8 mRNA MA004 and Pcsk9 gRNA GA256 (n=4 to 5 mice per dosing group, bar indicates mean editing in group).

[0049] FIG. 19 depicts editing of the Pcsk9 exon 1 splice-donor adenine base in wild-type mouse liver, after dosed with LNPs at 0.05 mg/kg total RNA dose containing different ratios of gRNA GA256 and mRNA MA002. Additional guides GA255 and GA257 with different chemical modifications were also assessed for base editing efficiency, at mRNA to gRNA 1:1 wt ratio.

[0050] FIG. 20 shows the results from dosing LNPs containing ABE8.8 mRNA and mouse Angptl3-targeting gRNAs (GA258, GA259, GA260, GA349, GA353) at 0.05 mg/kg total RNA dose at a 1:1 weight ratio into mice. GA258, GA259 and GA260 contain three different structure-guided tracr design. GA349 and GA353 tracr designs were from published literature (Cell Reports, 2018 22, 2227-2235). The mice were later euthanized and genomic DNA was harvested from mouse liver, and then assessed for base editing of the target splice site with next-generation sequencing.

[0051] FIG. 21 is a schematic showing the general dosing strategy for introducing adenine base editing of a target gene in NHP via LNPs formulated with an embodiment of base editor system, ABE mRNA and a guide RNA, and subsequent analysis after 2 weeks.

[0052] FIG. 22 shows that administration of LNPs formulated with an embodiment of base editor system, ABE mRNA MA002 and PCSK9 guide RNA GA066, at 1 mg/kg and 3 mg/kg total RNA dose to cynomolgus monkeys via intravenous infusion, induced adenine base editing at the PCSK9 target splice site in the liver of cynomolgus monkeys.

[0053] FIG. 23 shows that administration of LNPs formulated with an embodiment of base editor system, ABE mRNA MA004 and PCSK9 guide RNA GA066, to cynomolgus monkeys via intravenous infusion resulted in reduction in the blood PCSK9 protein level compared to pre-dosing levels at 2 weeks after dosing.

[0054] FIG. 24 shows that administration of LNPs at 3 mg/kg formulated with an embodiment of base editor system, ABE mRNA MA002 and PCSK9 guide RNA GA066, to cynomolgus monkeys via intravenous infusion resulted in reduction of the blood low-density lipoprotein cholesterol (LDL-C) level at 1 and 2 weeks after dosing compared to pre-dosing levels.

[0055] FIGS. 25A-25C show short-term adenine base editing of PCSK9 in non-human primates. FIG. 25A depicts editing of the PCSK9 exon 1 splice-donor adenine base in the livers of cynomolgus monkeys receiving an intravenous infusion of a 1 mg/kg dose of an LNP formulation with ABE8.8 mRNA MA004 and PCSK9 gRNA GA097 with necropsy at either 2 weeks (three animals) or 24 hours (two animals) following treatment. For each animal, editing was assessed in samples collected from sites distributed throughout the liver (n=8 samples; bar indicates mean editing in animal). Reduction of the blood PCSK9 protein level (FIG. 25B) or blood LDL-C level (FIG. 25C) in the three animals that underwent necropsy at 2 weeks following treatment are shown, comparing the level at 2 weeks versus the baseline pre-treatment level (n=1 blood sample per animal).

[0056] FIGS. 26A-26C shows adenine base editing of PCSK9 in non-human primates. FIG. 26A depicts editing of the PCSK9 exon 1 splice-donor adenine base in the livers of cynomolgus monkeys receiving an intravenous infusion of 0.5, 1.0, or 1.5 mg/kg dose of an LNP formulation with ABE8.8 mRNA MA004 and PCSK9 gRNA GA346. Reduction of the blood PCSK9 protein level (FIG. 26B) or blood LDL-C level (FIG. 26C) for the animals are shown.

[0057] FIG. 27 depicts tissue distribution of editing of the PCSK9 exon 1 splice donor adenine base in the three animals that underwent necropsy at 2 weeks following treatment (n=1 sample per animal for each indicated organ except liver; the liver data represent the means shown in a calculated from eight liver samples each). The LNP constituted with ABE mRNA MA004 and guide RNA GA346 was used in this study, and the dose administered was 0.5 mg/kg.

[0058] FIG. 28 illustrates editing of the PCSK9 exon 1 splice-donor adenine base editing in the livers of cynomolgus monkeys following intravenous infusions of individual lipid nanoparticles (LNPs) constituted with ABE mRNA MA004 and different guide RNAs with same spacer but with different tracer modifications. The guide RNAs used in this study were GA066, GA096, GA097 and GA346. The gRNA GA097 from two different sources were used in the same study and the sources are identified as (1) and (2). For tracr comparison studies the LNPS were dosed at 1 mg/kg total RNA dose where the guide RNA and mRNA were mixed at 1:1 weight ratio. The GA066 with published tracr design (Cell Reports, 2018 22, 2227-2235) produced lower base editing in monkey compared to all other tracr designs (FIG. 7)—GA095, GA097, and GA346—under same experimental conditions.

[0059] FIG. 29 shows SpCas9 nuclease versus adenine base editing of PCSK9 in non-human primates. LNPs containing either SpCas9 mRNA and PCSK9 gRNA, (MS010/GA097) or ABE8.8 mRNA and PCSK9 gRNA (MA004/GA097) were infused intravenously in cynomolgus monkeys. The MS010/GA097 LNP was dosed at 0.75 and 1.5 mg/kg, and the MA004/GA097 LNP was dosed at 1 mg/kg total RNA dose. The MS010/GA097 LNP test article at 1.5 mg/kg produced low single digit gene editing in NHP whereas the ABE/GA097 test article produced about 40% adenine base editing at 1 mg/kg, showing the robustness of ABE base editor over SpCas9 system. All LNPs used in this study were prepared using same excipients and compositions.

[0060] FIG. 30 shows adenine base editing of PCSK9 in non-human primates. This graph depicts editing of the PCSK9 exon 1 splice-donor adenine base in the livers of cynomolgus monkeys (each bar is an individual animal, with editing recorded for multiple sampling areas) receiving an intravenous infusion of 0.5, 1.0, 1.5, or 3 mg/kg total RNA dose of LNP #1. LNP #2 at 3 mg/kg total RNA was dosed as a benchmark from a previous study. Both LNP formulations contain ABE8.8 mRNA MA004 and PCSK9 gRNA GA346.

[0061] FIG. 31 shows the reduction of PCSK9 protein levels from basal on Day 15, from the same experiment described in FIG. 30.

[0062] FIG. 32 depicts editing of the PCSK9 exon 1 splice-donor adenine base in the livers of four cynomolgus monkeys received an intravenous infusion of a 3 mg/kg total RNA dose of an LNP formulation with ABE8.8 mRNA MA004 and PCSK9 gRNA GA066. For each animal, editing was assessed in a liver biopsy sample at 2 weeks following treatment (n=1 sample per animal).

[0063] FIG. 33 depicts reduction of the blood PCSK9 protein levels in the four animals from FIG. 32 (animals that received 3 mg/kg total RNA dose of an LNP formulation with ABE8.8 mRNA MA004 and PCSK9 gRNA GA066) and in two contemporaneous control animals that received phosphate-buffered saline, comparing levels at various time points following treatment versus the baseline pre-treatment level (mean±standard deviation for each group, n=4 or n=2, at each time point). The dotted lines indicate 100% and 10% of baseline levels, respectively.

[0064] FIG. 34 depicts reduction of the blood LDL-C level in the four animals from FIG. 32 (animals that received 3 mg/kg total RNA dose of an LNP formulation with ABE8.8 mRNA MA004 and PCSK9 gRNA GA066) and in two contemporaneous control animals that received phosphate-buffered saline, comparing levels at various time points following treatment versus the baseline pre-treatment level (mean±standard deviation for each group, n=4 or n=2, at each time point). The dotted lines indicate 100% and 40% of baseline levels, respectively (top panel). The absolute values of individual animals are shown in the bottom panel.

[0065] FIG. 35 depicts reduction of Lipoprotein(a) in the four animals from FIG. 32 and in two contemporaneous control animals that received phosphate-buffered saline, comparing levels at various time points following treatment versus the baseline pre-treatment level (mean±standard deviation for each group, n=4 or n=2, at each time point).

[0066] FIG. 36 shows long-term phenotypic effects of liver PCSK9 base editing in non-human primates. Absolute values of aspartate aminotransferase (AST) (top panel), and alanine aminotransferase (ALT) (bottom panel) in the individual animals portrayed in FIG. 32 (n=4 animals treated with 3 mg/kg dose of an LNP formulation with ABE8.8 mRNA and PCSK9-gRNA, and n=2 animals treated with phosphate-buffered saline) at various time points following treatment.

[0067] FIGS. 37A-37G show liver function markers of individual animals. AST (FIG. 37A, FIG. 37B), ALT (FIG. 37A, FIG. 37C), Alkaline phosphate (FIG. 37A, FIG. 37D), gamma-glutamyltransferase (FIG. 37A, FIG. 37E), total bilirubin (FIG. 37A, FIG. 37F), and albumin (FIG. 37A, FIG. 37G), up to 15 days post dose, from cynomolgus monkeys that received an intravenous infusion of a 0.5, 1.0, or 1.5 mg/kg dose of an LNP formulation with ABE8.8 mRNA and PCSK9 gRNA.

[0068] FIG. 38 is a schematic of the representative candidate ONE-seq sites using a specific library designed against the cynomolgus genome. The PCSK9 protospacer is depicted at the top with a ONE-seq score of 1.00. All sites listed are ranked by decreasing ONE-seq score, with mismatches to the protospacer sequence identified. FIG. 38 discloses SEQ ID NOS: 80, 3173, 2193-2196, 3165, 2231-2232, 2198-2205, 3166, 2206-2211, 2233, 2212-2220, 3167, 2221-2224, 3168-3171, 2225, 3172 and 2227-2230, respectively, in order of appearance.

[0069] FIG. 39 shows gRNA-dependent, DNA off-target analysis of the sites identified in FIG. 38. Samples from cynomolgus primary hepatocytes (top panel) or cynomolgus monkey livers (bottom panel) were assessed for net A>G base editing (n=3 treated, n=3 untreated samples).

[0070] FIG. 40 shows net A>G % base editing at one off-target site (C5), identified in FIG. 39, from livers of NHPs that received either 0.5, 1.0, or 1.5 mg/kg LNP.

[0071] FIG. 41 shows base editing of ANGPTL3 in NHPs via LNPs formulated with an embodiment of base editor system, ABE mRNA MA004 and ANGPTL3 guide RNA GA067. Liver editing (left panel), ANGPTL3 protein levels (middle panel), and triglyceride levels (right panel) are shown for three NHPs.

[0072] FIG. 42 shows simultaneous ANGPTL3 and PCSK9 base editing with lipid nanoparticles (LNPs) formulated with an embodiment of base editor system, ABE mRNA MA002 and dual guide RNAs GA095 (hcPCSK9) and GA098 (hANGPTL3), in human primary hepatocytes at concentrations ranging from 0-2500 ng/test article/mL.

[0073] FIG. 43 shows Day 15 and Day 44 liver biopsy adenosine base editing results. NHPs were dosed with LNPs formulated with ABE8.8 mRNA MA004 and either a gRNA targeting PCSK9 (GA346) or a gRNA targeting ANGPTL3 (GA347) via intravenous infusion at a total RNA doses ranging from 0.5-2 mg/kg. Two weeks after administration of test article, biopsies were performed to assess base editing. After 30 days from the initiation of the study, the opposite LNP was administered. Following a second biopsy after an additional 2 weeks, the gDNA was extracted, and base editing was assessed using next generation sequencing. Results for PCSK9 base editing (top panel) and ANGPTL3 base editing (bottom panel) are shown. 2 mg/kg total RNA dose of LNP encapsulating ABE8.8 mRNA, PCSK9 gRNA GA346 and ANGPTL3 gRNA GA347 at 1:0.5:0.5 weight ratio produced robust synchronized PCSK9 and ANGPTL3 gene editing (Example 10).

[0074] FIG. 44 illustrates the corresponding % change in PCSK9 (top panel) and ANGPTL3 (bottom panel) protein levels from NHPs described in FIG. 43.

[0075] FIG. 45 illustrates that repeat LNP dosing in NHPs causes additive adenosine base editing in the liver, post Day 14, Day 46, and Day 75 liver biopsies. NHPs were dosed with either LNP #1 or LNP #2 formulated with ABE8.8 mRNA MA004 and a gRNA targeting PCSK9 (GA097) via intravenous infusion at a total RNA doses of 0.5 mg/kg (see Example 10 for details on dosing intervals and related details).

[0076] FIG. 46 illustrates that repeat LNP dosing in NHPs causes additive base editing in the liver and translates to dose-dependent additive decrease in plasma PCSK9 protein levels over 90 days. As described in FIG. 45, NHPs were repeat dosed with LNPs formulated with ABE8.8 mRNA MA004 and a gRNA targeting PCSK9 (GA097). NHPs were dosed via intravenous infusion at a total RNA doses of 0.5 mg/kg at days 0, 30, and 60 (arrow is illustrated on graph to depict dosing). For description of analysis of PCSK9 protein levels, see detailed methods section.

[0077] FIG. 47 illustrates that repeat LNP dosing in NHPs causes additive base editing in the liver with only transient liver marker increase, and the transient liver marker increase correlates well with the day of each dose administered. The data shows 71 days of the liver marker levels of ALT, AST, total bilirubin, and creatine kinase post first dose (see Example 10, FIG. 45 for details).

[0078] FIG. 48 illustrates that repeat LNP dosing in NHPs causes additive base editing in the liver, with only transient liver marker increase showing up to 71 days post dose of the liver enzyme levels of LDH, GLDH, GGT, and ALP, in NHPs (See Example 10, FIG. 45 for details).

[0079] FIGS. 49A and 49B illustrate that base editing of ANGPTL3 results in long-term decreased ANGPTL3 protein and triglyceride levels after a single dose of LNP constituted with ABE8.8 mRNA MA004 and ANGPTL3 gRNA GA067. The results illustrates the effect of long-term adenine base editing of ANGPTL3 on ANGPTL3 protein (FIG. 49A) and triglycerides (FIG. 49B) in non-human primates over 6 months. ANGPTL3 protein (96% reduction) and triglyceride levels were substantially decreased upon single dose administration of the LNP, and remain stably reduced for more than 170 days (see Example 10 for details).

[0080] FIGS. 50A-50E illustrate the effect of LNP dosing in NHPs on cytokine activation and immune response. Cynomolgus monkeys received intravenous infusions of 0.5 mg/kg doses at specified time points (FIG. 50A and FIG. 50B) of an LNP formulation with ABE8.8 mRNA MA004 and PCSK9 gRNA GA346. Blood was collected at timepoints specified and the graph, and IP-10 and MCP-1 were analyzed. In additional studies, IL-6, MCP-1, and SC5b-9 (FIG. 50C, FIG. 50D, and FIG. 50E, respectively) were analyzed at different time points from blood collected from NHPs that received an intravenous infusion of 1.0 mg/kg total RNA dose of LNP formulated with MA004 and PCSK9 gRNA GA346.

[0081] FIG. 51 illustrates liver editing in NHPs at 15 days after treatment with an LNP containing SpCas9 mRNA/gRNA. FIG. 51 shows the results from gene editing of ANGPTL3 or PCSK9 in non-human primates. Cynomolgus monkeys received an intravenous infusion of a 1.5 mg/kg dose of an LNP formulation with SpCas9 mRNA MS004 and one gRNA targeting either ANGPTL3 (GA261-GA263) or PCSK9 (GA266-GA271). Upon necropsy after 2 weeks, two pieces from each liver lobe (8 pieces total) were isolated and gDNA was extracted. Samples were processed as described in the detailed methods section. Indel % was analyzed for each separate piece and are graphed as individual points. High editing efficiency was observed in most NHP livers.

[0082] FIG. 52 illustrates LDL-C levels in NHPs at 15 days after treatment with SpCas9/gRNA. FIG. 52 shows the reduction of LDL-C from gene editing of ANGPTL3 or PCSK9 in non-human primates. Cynomolgus monkeys received an intravenous infusion of a 1.5 mg/kg dose of an LNP formulation with SpCas9 mRNA MS004 and one gRNA targeting either ANGPTL3 (GA261-GA263) or PCSK9 (GA266-GA271. Samples were processed as described in the detailed methods section. All NHPs that received LNPs with SpCas9 mRNA/PCSK9 gRNA had at least 35% reduction in circulating LDL-C levels. Although more modest, LNPs with SpCas9 mRNA/ANGPTL3 gRNA had 10-25% reduction in circulating LDL-C levels.

[0083] FIG. 53 illustrates triglyceride levels in NHPs at 15 days after treatment with SpCas9/gRNA. FIG. 53 shows the triglyceride levels from gene editing of ANGPTL3 or PCSK9 in non-human primates. Cynomolgus monkeys received an intravenous infusion of a 1.5 mg/kg dose of an LNP formulation with SpCas9 mRNA MS004 and one gRNA targeting either ANGPTL3 (GA261-GA263) or PCSK9 (GA266-GA271. Samples were processed as described in the detailed methods section. NHPs that received LNPs with SpCas9 mRNA/ANGPTL3 gRNA had around 10-50% reduction in triglyceride levels. NHPs that received LNPs with SpCas9 mRNA/PCSK9 gRNA did not show a significant reduction in triglyceride levels.

[0084] FIGS. 54A and 54B illustrate that PACE-modifications to the gRNA decrease off-target editing efficiency. Human primary hepatocytes were transfected at 2500, 1250, 500, and 250 ng/test article/mL with SpCas9 mRNA (commercially purchased from Trilink) and a gRNA targeting PCSK9 with modifications to the tracr. Genomic DNA was processed, sequenced, and analyzed as described in the detailed methods section. GA156 was transfected to serve as a positive control. GA248 and GA249 contain PACE-modifications to the gRNA that have previously been demonstrated to decrease off-target editing efficiency. Indeed, although GA248 and GA249 had lower on-target editing compared to the unmodified gRNA, GA156 (FIG. 54A), GA248 and GA249 showed decreased off-target editing at an identified off-target site (FIG. 54B).

[0085] FIG. 55A illustrates the GC comparison of ABE-encoding nucleotides, MA004, MA019, MA020, MA021, and ABE8.8m (Table 23), as well as a more detailed look at MA004 (FIG. 55A, bottom panel). FIG. 55B illustrates the editing % obtained using ABE-encoding nucleotides, MA004, MA019, MA020, and MA021 (Table 23).

### DETAILED DESCRIPTION

[0086] Certain specific details of this description are set forth in order to provide a thorough understanding of various embodiments. However, one skilled in the art will understand that the present disclosure may be practiced without these details. In other instances, well-known structures have not been shown or described in detail to avoid unnecessarily obscuring descriptions of the embodiments.

[0087] Unless otherwise defined, all technical and scientific terms used herein have the same meaning as commonly understood by one of ordinary skill in the art to which this disclosure belongs. Although methods and materials similar or equivalent to those described herein can be used in the practice or testing of the present disclosure, suitable methods, and materials are described below. Further, headings provided herein are for convenience only and do not interpret the scope or meaning of the claimed disclosure. It is contemplated that any embodiment discussed in this specification can be implemented with respect to any method or composition of the present disclosure, and vice versa. Furthermore, compositions of the present disclosure can be used to achieve methods of the present disclosure.

### Definitions

[0088] To facilitate an understanding of the present disclosure, a number of terms and phrases are defined below.

[0089] As used in this specification and the appended claims, the singular forms “a,” “an,” and “the” include plural referents unless the content clearly dictates otherwise.

[0090] It should also be noted that the term “or” is generally employed in its sense including “and/or” unless the content clearly dictates otherwise. The terms “and/or” and “any combination thereof” and their grammatical equivalents as used herein, can be used interchangeably. These terms can convey that any combination is specifically contemplated. Solely for illustrative purposes, the following phrases “A, B, and/or C” or “A, B, C, or any combination thereof” can mean “A individually; B individually; C individually; A and B; B and C; A and C; and A, B, and C.” The term “or” can be used conjunctively or disjunctively, unless the context specifically refers to a disjunctive use.

[0091] The term “about” or “approximately” can mean within an acceptable error range for the particular value as determined by one of ordinary skill in the art, which will depend in part on how the value is measured or determined, i.e., the limitations of the measurement system. For example, “about” can mean within 1 or more than 1 standard deviation, per the practice in the art. Alternatively, “about” can mean a range of up to 20%, up to 10%, up to 5%, or up to 1% of a given value. Alternatively, particularly with respect to biological systems or processes, the term can mean within an order of magnitude, within 5-fold, and more preferably within 2-fold, of a value. Where particular values are described in the application and claims, unless otherwise stated the term “about” meaning within an acceptable error range for the particular value should be assumed.

[0092] As used in this specification and claim(s), the words “comprising” (and any form of comprising, such as “comprise” and “comprises”), “having” (and any form of having, such as “have” and “has”), “including” (and any form of including, such as “includes” and “include”) or “containing” (and any form of containing, such as “contains” and “contain”) are inclusive or open-ended and do not exclude additional, unrecited elements or method steps.

[0093] As used herein, “some embodiments,” “an embodiment,” “one embodiment,” “embodiments” or “other embodiments” means that a particular feature, structure, or characteristic described in connection with the embodiments is included in at least some embodiments, but not necessarily all embodiments, of the present disclosures.

[0094] The term “nucleic acid” as used herein refers to a polymer containing at least two nucleotides (i.e., deoxyribonucleotides or ribonucleotides) in either single- or double-stranded form and includes DNA and RNA. “Nucleotides” contain a sugar deoxyribose (DNA) or ribose (RNA), a base, and a phosphate group. Nucleotides are linked together through the phosphate groups. “Bases” include purines and pyrimidines, which further include natural compounds adenine, thymine, guanine, cytosine, uracil, inosine, and natural analogs, and synthetic derivatives of purines and pyrimidines, which include, but are not limited to, modifications which place new reactive groups such as, but not limited to, amines, alcohols, thiols, carboxylates, and alkylhalides. A nucleic acid includes any oligonucleotide or polynucleotide, with fragments containing up to 60 nucleotides generally termed oligonucleotides, and longer fragments termed polynucleotides. A deoxyribooligonucleotide consists of a 5-carbon sugar called deoxyribose joined covalently to phosphate at the 5′ and 3′ carbons of this sugar to form an alternating, unbranched polymer. DNA may be in the form of, e.g., antisense molecules, plasmid DNA, pre-condensed DNA, a PCR product, vectors, expression cassettes, chimeric sequences, chromosomal DNA, or derivatives and combinations of these groups. A ribooligonucleotide consists of a similar repeating structure where the 5-carbon sugar is ribose. Accordingly, the terms “polynucleotide” and “oligonucleotide” can refer to a polymer or oligomer of nucleotide or nucleoside monomers consisting of naturally-occurring bases, sugars and intersugar (backbone) linkages. Additionally, nucleic acids include nucleic acids containing known nucleotide analogs or modified backbone residues or linkages, which are synthetic, nonstandard, and/or non-naturally occurring, and which have similar binding properties as the reference nucleic acid. The nucleic acid may be modified at the base moiety (e.g., at one or more atoms that typically are available to form a hydrogen bond with a complementary nucleotide and/or at one or more atoms that are not typically capable of forming a hydrogen bond with a complementary nucleotide), sugar moiety, or phosphate backbone. Backbone modifications can include, but are not limited to, a phosphorothioate, a phosphorodithioate, a phosphoroselenoate, a phosphorodiselenoate, a phosphoroanilothioate, a phosphoraniladate, a phosphoramidate, and a phosphorodiamidate linkage. A phosphorothioate linkage substitutes a sulfur atom for a non-bridging oxygen in the phosphate backbone and delays nuclease degradation of oligonucleotides. A phosphorodiamidate linkage (N3′→P5′) allows preventing nuclease recognition and degradation. Backbone modifications can also include having peptide bonds instead of phosphorous in the backbone structure (e.g., N-(2-aminoethyl)-glycine units linked by peptide bonds in a peptide nucleic acid), or linking groups including carbamate, amides, and linear and cyclic hydrocarbon groups. Oligonucleotides with modified backbones are reviewed in Micklefield, Backbone modification of nucleic acids: synthesis, structure and therapeutic applications, Curr. Med. Chem., 8 (10): 1157-79, 2001 and Lyer et al., Modified oligonucleotides-synthesis, properties and applications, Curr. Opin. Mol. Ther., 1 (3): 344-358, 1999. Nucleic acid molecules described herein may contain a sugar moiety that comprises ribose or deoxyribose, as present in naturally occurring nucleotides, or a modified sugar moiety or sugar analog. The examples of modified sugar moieties include, but are not limited to, 2′-O-methyl, 2′-O-methoxyethyl, 2′-O-aminoethyl, 2′-Flouro, N3′→P5′ phosphoramidate, 2′dimethylaminooxyethoxy, 2′ 2′dimethylaminoethoxyethoxy, 2′-guanidinidium, 2′-O-guanidinium ethyl, carbamate modified sugars, and bicyclic modified sugars. 2′-O-methyl or 2′-O-methoxyethyl modifications promote the A-form or RNA-like conformation in oligonucleotides, increase binding affinity to RNA, and have enhanced nuclease resistance. Modified sugar moieties can also include having an extra bridge bond (e.g., a methylene bridge joining the 2′-O and 4′-C atoms of the ribose in a locked nucleic acid) or sugar analog such as a morpholine ring (e.g., as in a phosphorodiamidate morpholino). Examples of such analogs and/or modified residues include, but are not limited to diaminopurine, 5-fluorouracil, 5-bromouracil, 5-chlorouracil, 5-iodouracil, hypoxanthine, xantine, 4-acetylcytosine, 5-(carboxyhydroxylmethyl)uracil, 5-carboxymethylaminomethyl-2-thiouridine, 5-carboxymethylaminomethyluracil, dihydrouracil, beta-D-galactosylqueosine, inosine, N6-isopentenyladenine, 1-methylguanine, 1-methylinosine, 2,2-dimethylguanine, 2-methyladenine, 2-methylguanine, 3-methylcytosine, 5-methylcytosine, N6-adenine, 7-methylguanine, 5-methylaminomethyluracil, 5-methoxyaminomethyl-2-thiouracil, beta-D-mannosylqueosine, 5′-methoxycarboxymethyluracil, 5-methoxyuracil, 2-methylthio-N6-isopentenyladenine, uracil-5-oxyacetic acid (v), wybutoxosine, pseudouracil, queosine, 2-thiocytosine, 5-methyl-2-thiouracil, 2-thiouracil, 4-thiouracil, 5-methyluracil, uracil-5-oxyacetic acid methylester, 5-methyl-2-thiouracil, 3-(3-amino-3-N-2-carboxypropyl) uracil, (acp3)w, 2,6-diaminopurine, methyl phosphonates, chiral-methyl phosphonates, 2′-O-methyl ribonucleotides, peptide-nucleic acids (PNAs), and the like. In some cases, nucleotides may include modifications in their phosphate moieties, including modifications to a triphosphate moiety. Non-limiting examples of such modifications include phosphate chains of greater length (e.g., a phosphate chain having, 4, 5, 6, 7, 8, 9, 10 or more phosphate moieties) and modifications with thiol moieties (e.g., alpha-thiotriphosphate and beta-thiotriphosphates). Such modified or substituted oligonucleotides are often preferred over native forms because of properties such as, for example, enhanced cellular uptake, reduced immunogenicity, and increased stability in the presence of nucleases. Thus, the terms “polynucleotide” and “oligonucleotide” can also include polymers or oligomers comprising non-naturally occurring monomers, or portions thereof, which function similarly.

[0095] Unless otherwise indicated, a particular nucleic acid sequence also implicitly encompasses conservatively modified variants thereof (e.g., degenerate codon substitutions), alleles, orthologs, SNPs, and complementary sequences as well as the sequence explicitly indicated. Specifically, degenerate codon substitutions may be achieved by generating sequences in which the third position of one or more selected (or all) codons is substituted with mixed-base and/or deoxyinosine residues (Batzer et al., Nucleic Acid Res., 19:5081 (1991); Ohtsuka et al., J. Biol. Chem., 260:2605-2608 (1985); Rossolini et al., Mol. Cell. Probes, 8:91-98 (1994)).

[0096] The present disclosure encompasses isolated or substantially purified nucleic acid molecules and compositions containing those molecules. As used herein, an “isolated” or “purified” DNA molecule or RNA molecule is a DNA molecule or RNA molecule that exists apart from its native environment. An isolated DNA molecule or RNA molecule may exist in a purified form or may exist in a non-native environment such as, for example, a transgenic host cell. For example, an “isolated” or “purified” nucleic acid molecule or biologically active portion thereof, is substantially free of other cellular material, or culture medium when produced by recombinant techniques, or substantially free of chemical precursors or other chemicals when chemically synthesized. In one embodiment, an “isolated” nucleic acid is free of sequences that naturally flank the nucleic acid (i.e., sequences located at the 5′ and 3′ ends of the nucleic acid) in the genomic DNA of the organism from which the nucleic acid is derived. For example, in some embodiments, the isolated nucleic acid molecule can contain less than about 5 kb, 4 kb, 3 kb, 2 kb, 1 kb, 0.5 kb, or 0.1 kb of nucleotide sequences that naturally flank the nucleic acid molecule in genomic DNA of the cell from which the nucleic acid is derived.

[0097] The term “vector,” as used herein, refers to a nucleic acid molecule capable of transporting another nucleic acid to which it has been linked. In some examples, a vector is an expression vector that is capable of directing the expression of nucleic acids to which they are operatively linked. The term “operably linked,” as used herein, means that the nucleotide sequence of interest is linked to regulatory sequence(s) in a manner that allows for expression of the nucleotide sequence. The term “regulatory sequence,” as used herein, includes, but is not limited to promoters, enhancers and other expression control elements. Such regulatory sequences are well known in the art and are described, for example, in Goeddel; Gene Expression Technology: Methods in Enzymology 185, Academic Press, San Diego, CA (1990). Examples of expression vectors include, but are not limited to, plasmid vectors, viral vectors based on vaccinia virus, poliovirus, adenovirus, adeno-associated virus, SV40, herpes simplex virus, human immunodeficiency virus, retrovirus (e.g., Murine Leukemia Virus, spleen necrosis virus, and vectors derived from retroviruses such as Rous Sarcoma Virus, Harvey Sarcoma Virus, avian leukosis virus, a lentivirus, human immunodeficiency virus, myeloproliferative sarcoma virus, and mammary tumor virus) and other recombinant vectors.

[0098] As used herein, the terms “protein,” “polypeptide,” and “peptide” are used interchangeably and refer to a polymer of amino acid residues linked via peptide bonds and which may be composed of two or more polypeptide chains. The terms “polypeptide,” “protein,” and “peptide” refer to a polymer of at least two amino acid monomers joined together through amide bonds. An amino acid may be the L-optical isomer or the D-optical isomer. More specifically, the terms “polypeptide,” “protein,” and “peptide” refer to a molecule composed of two or more amino acids in a specific order; for example, the order as determined by the base sequence of nucleotides in the gene or RNA coding for the protein. Proteins are essential for the structure, function, and regulation of the body's cells, tissues, and organs, and each protein has unique functions. Examples are hormones, enzymes, antibodies, and any fragments thereof. In some cases, a protein can be a portion of the protein, for example, a domain, a subdomain, or a motif of the protein. In some cases, a protein can be a variant (or mutation) of the protein, wherein one or more amino acid residues are inserted into, deleted from, and/or substituted into the naturally occurring (or at least a known) amino acid sequence of the protein. A protein or a variant thereof can be naturally occurring or recombinant. Methods for detection and/or measurement of polypeptides in biological material are well known in the art and include, but are not limited to, Western-blotting, flow cytometry, ELISAs, RIAs, and various proteomics techniques. An exemplary method to measure or detect a polypeptide is an immunoassay, such as an ELISA. This type of protein quantitation can be based on an antibody capable of capturing a specific antigen, and a second antibody capable of detecting the captured antigen. Exemplary assays for detection and/or measurement of polypeptides are described in Harlow, E. and Lane, D. Antibodies: A Laboratory Manual, (1988), Cold Spring Harbor Laboratory Press.

[0099] The term “sequence identity,” as used herein, refers to the amount of nucleotide which match exactly between two different sequences. When comparing RNA and DNA sequences Uracil and Thymine bases are considered to be the same base. Gaps are not counted and the measurement is typically in relation to the shorter of the two sequences. For example:

| | |
|---|---|
| A: | AAGGCTT |
| B: | AAGGC |
| C: | AAGGCAT |

Here identity (A,B)=100% (5 identical nucleotides/min(length(A),length(B))). Identity(B,C)=100%, but identity(A,C)=85% ((6 identical nucleotides/7). So 100% identity does not mean two sequences are the same.

[0100] The term “sequence similarity,” as used herein, can be described as an optimal matching problem that finds the minimal number of edit operations (inserts, deletes, and substitutions) in order to transform the one sequence into an exact copy of the other sequence being aligned (edit distance). Using this, the percentage sequence similarity of the examples above are sim(A,B)=60%, sim(B,C)=60%, sim(A,C)=86% (semi-global, sim=1−(edit distance/unaligned length of the shorter sequence)).

[0101] A “subject” in need thereof, refers to an individual who has a disease, a symptom of the disease, or a predisposition toward the disease, with the purpose to cure, heal, alleviate, relieve, alter, remedy, ameliorate, improve, or affect the disease, the symptom of the disease, or the predisposition toward the disease. In some embodiments, the subject has hypercholesterolemia. In some embodiments, the subject has atherosclerotic vascular disease. In some embodiments, the subject has hypertriglyceridemia. In some embodiments, the subject has diabetes. The term “subject” or “patient” encompasses mammals. Examples of mammals include, but are not limited to, any member of the mammalian class: humans, non-human primates such as chimpanzees, and other apes and monkey species; farm animals such as cattle, horses, sheep, goats, swine; domestic animals such as rabbits, dogs, and cats; laboratory animals including rodents, such as rats, mice and guinea pigs, and the like.

[0102] The term “condition,” as used herein, includes diseases, disorders, and susceptibilities. In some embodiments, the condition is an atherosclerotic vascular disease. In some embodiments, the condition is a hypertriglyceridemia. In some embodiments, the condition is a diabetes.

[0103] The term “atherosclerosis” or “atherosclerotic vascular disease,” as used herein, refers to a disease in which the inside of an artery narrows due to the buildup of plaque. In some embodiments, it may result in coronary artery disease, stroke, peripheral artery disease, or kidney problems.

[0104] The term “hypertriglyceridemia,” as used herein, refers to high (hyper-) blood levels (-emia) of triglycerides, the most abundant fatty molecule in most organisms. In some embodiments, elevated levels of triglycerides are associated with atherosclerosis, even in the absence of hypercholesterolemia (high cholesterol levels), and predispose to cardiovascular disease. In some embodiments, very high triglyceride levels increase the risk of acute pancreatitis. In some embodiments, hypertriglyceridemia is associated with overeating, obesity, diabetes mellitus and insulin resistance, excess alcohol consumption, kidney failure, nephrotic syndrome, genetic predisposition (e.g., familial combined hyperlipidemia, i.e., Type II hyperlipidemia), lipoprotein lipase deficiency, lysosomal acid lipase deficiency, cholesteryl ester storage disease, certain medications (e.g., isotretinoin, hydrochlorothiazide diuretics, beta blockers, protease inhibitors), hypothyroidism (underactive thyroid), systemic lupus erythematosus and associated autoimmune responses, glycogen storage disease type 1, propofol, or HIV medications.

[0105] The term “diabetes,” as used herein, refers to a group of metabolic disorders characterized by a high blood sugar level over a prolonged period of time. In some embodiments, diabetes is type 1 diabetes that results from the pancreas's failure to produce enough insulin due to loss of beta cells. In some embodiments, diabetes is type 2 diabetes characterized by insulin resistance, a condition in which cells fail to respond to insulin properly. In some embodiments, diabetes is gestational diabetes that occurs when pregnant women without a previous history of diabetes develop high blood sugar levels.

[0106] The term “low-density lipoprotein (LDL),” as used herein, refers to a microscopic blob made up of an outer rim of lipoprotein and a cholesterol center. In some embodiments, LDL has a highly hydrophobic core composed of a polyunsaturated fatty acid known as linoleate and hundreds to thousands esterified and unesterified cholesterol molecules. In some embodiments, the core of LDL also carries triglycerides and other fats and is surrounded by a shell of phospholipids and unesterified cholesterol.

[0107] The term “high-density lipoprotein (HDL),” as used herein, refers to the smallest lipoprotein particles. In embodiments, plasma enzyme lecithin-cholesterol acyltransferase (LCAT) converts the free cholesterol into cholesteryl, which is then sequestered into the core of the lipoprotein particle, eventually causing the newly synthesized HDL to assume a spherical shape. In embodiments, HDL particles increase in size as they circulate through the bloodstream and incorporate more cholesterol and phospholipid molecules from cells and other lipoproteins.

[0108] The term “cholesterol,” as used herein, refers to a lipid with a unique structure composed of four linked hydrocarbon rings forming the bulky steroid structure. The term “triglyceride,” as used herein, refers to a tri-ester composed of a glycerol bound to three fatty acid molecules. In some embodiments, the fatty acids are saturated or unsaturated fatty acids.

[0109] The terms “treat,” “treating,” or “treatment,” and its grammatical equivalents as used herein, can include alleviating, abating, or ameliorating at least one symptom of a disease or a condition, preventing additional symptoms, inhibiting the disease or the condition, e.g. delaying, decreasing, suppressing, attenuating, diminishing, arresting, or stabilizing the development or progression of a disease or the condition, relieving the disease or the condition, causing regression of the disease or the condition, relieving a condition caused by the disease or the condition, reducing disease severity, or stopping the symptoms of the disease or the condition either prophylactically and/or therapeutically. “Treating” also includes lessening the frequency of occurrence or recurrence, or the severity, of any symptoms or other ill effects related to a disease or condition and/or the side effects associated with the disease or condition. “Treating” does not necessarily require curative results. It is appreciated that, although not precluded, treating a disorder or condition also does not require that the disorder, condition, or symptoms associated therewith be completely eliminated. The term “treating” encompasses the concept of “managing” which refers to reducing the severity of a particular disease or disorder in a patient or delaying its recurrence, e.g., lengthening the period of remission in a patient who had suffered from the disease. “Treating” may refer to the application or administration or a composition to a subject after the onset, or suspected onset, of a disease or condition.

[0110] The term “treating” further encompasses the concept of “prevent,” “preventing,” and “prevention.” The terms “prevent,” “preventing,” and “prevention,” as used herein, refer to a decrease in the occurrence of pathology of a condition in a subject, who does not have, but is at risk of or susceptible to developing a disease or condition. The prevention may be complete, e.g., the total absence of pathology of a condition in a subject. The prevention may also be partial, such that the occurrence of pathology of a condition in a subject is less than that which would have occurred without the present disclosure.

[0111] By “treating or preventing a condition,” for example, as compared with an equivalent untreated control, alleviating a symptom of a disorder may involve reduction or degree of prevention at least 3%, 5%, 10%, 20%, 40%, 50%, 60%, 80%, 90%, 95%, 98%, 99%, 99.5%, 99.9%, or 100% as measured by any standard technique. In some embodiments, alleviating a symptom of a disorder may involve reduction or degree of prevention by at least 2, 3, 4, 5, 10, 20, 25, 30, 40, 50, 60, 70, 80, 90, 100, 200, 300, 400, 500, 600, 700, 800, 900, 1000, 2000, 3000, 4000, 5000, 6000, 7000, 8000, 9000, or 10000 fold as compared with an equivalent untreated control.

[0112] As used therein, “delaying” the development of a disease means to defer, hinder, slow, retard, stabilize, and/or postpone progression of the disease. This delay can be of varying lengths of time, depending on the history of the disease and/or individuals being treated. A method that “delays” or alleviates the development of a disease, or delays the onset of the disease, is a method that reduces probability of developing one or more symptoms of the disease in a given time frame and/or reduces extent of the symptoms in a given time frame, when compared to not using the method. Such comparisons are typically based on clinical studies, using a number of subjects sufficient to give a statistically significant result.

[0113] “Development” or “progression” of a disease means initial manifestations and/or ensuing progression of the disease. Development of the disease can be detectable and assessed using standard clinical techniques as well known in the art. However, development also refers to progression that may be undetectable. For purpose of this disclosure, development or progression refers to the biological course of the symptoms. “Development” includes occurrence, recurrence, and onset.

[0114] As used herein “onset” or “occurrence” of a disease includes initial onset and/or recurrence.

[0115] “Administering” and its grammatical equivalents as used herein can refer to providing pharmaceutical compositions described herein to a subject or a patient. Conventional methods, known to those of ordinary skill in the art of medicine, can be used to administer the composition to the subject, depending upon the type of disease to be treated or the site of the disease. For example, the composition can be administered, e.g., orally, parenterally, by inhalation spray, topically, rectally, nasally, buccally, vaginally, via an implanted reservoir, or via infusion. One or more such routes can be employed.

[0116] The term “parenteral” as used herein includes subcutaneous, intracutaneous, intravenous, intramuscular, intraperitoneal, intradermal, intraarterial, intrasynovial, intrasternal, intrathecal, intravascular, intralesional, and intracranial injection or infusion techniques. In addition, it can be administered to the subject via injectable depot routes of administration such as using 1-, 3-, or 6-month depot injectable or biodegradable materials and methods.

[0117] By “co-administering” is meant administering one or more additional therapeutic regimens or agents or treatments and the composition of the disclosure sufficiently close in time to enhance the effect of one or more additional therapeutic agents, or vice versa. In this regard, the composition of the disclosure described herein can be administered simultaneously with one or more additional therapeutic regimens or agents or treatments, at a different time, or on an entirely different therapeutic schedule (e.g., the first treatment can be daily, while the additional treatment is weekly). For example, in embodiments, the secondary therapeutic regimens or agents or treatments are administered simultaneously, prior to, or subsequent to the composition of the disclosure.

[0118] The terms “pharmaceutical composition” and its grammatical equivalents as used herein can refer to a mixture or solution comprising a therapeutically effective amount of an active pharmaceutical ingredient together with one or more pharmaceutically acceptable excipients, carriers, and/or a therapeutic agent to be administered to a subject, e.g., a human in need thereof.

[0119] The term “pharmaceutically acceptable” and its grammatical equivalents as used herein can refer to an attribute of a material which is useful in preparing a pharmaceutical composition that is generally safe, non-toxic, and neither biologically nor otherwise undesirable and is acceptable for veterinary as well as human pharmaceutical use. “Pharmaceutically acceptable” can refer a material, such as a carrier or diluent, which does not abrogate the biological activity or properties of the compound, and is relatively nontoxic, i.e., the material may be administered to a subject without causing undesirable biological effects or interacting in a deleterious manner with any of the components of the pharmaceutical composition in which it is contained.

[0120] A “pharmaceutically acceptable excipient, carrier, or diluent” refers to an excipient, carrier, or diluent that can be administered to a subject, together with an agent, and which does not destroy the pharmacological activity thereof and is nontoxic when administered in doses sufficient to deliver a therapeutic amount of the agent.

[0121] A “pharmaceutically acceptable salt” may be an acid or base salt that is generally considered in the art to be suitable for use in contact with the tissues of human beings or animals without excessive toxicity, irritation, allergic response, or other problem or complication. Such salts include mineral and organic acid salts of basic residues such as amines, as well as alkali or organic salts of acidic residues such as carboxylic acids. Specific pharmaceutical salts include, but are not limited to, salts of acids such as hydrochloric, phosphoric, hydrobromic, malic, glycolic, fumaric, sulfuric, sulfamic, sulfanilic, formic, toluenesulfonic, methanesulfonic, benzene sulfonic, ethane disulfonic, 2-hydroxyethyl sulfonic, nitric, benzoic, 2-acetoxybenzoic, citric, tartaric, lactic, stearic, salicylic, glutamic, ascorbic, pamoic, succinic, fumaric, maleic, propionic, hydroxymaleic, hydroiodic, phenylacetic, alkanoic such as acetic, HOOC—(CH₂)n-COOH where n is 0-4, and the like. Similarly, pharmaceutically acceptable cations include, but are not limited to sodium, potassium, calcium, aluminum, lithium and ammonium. Those of ordinary skill in the art will recognize from this disclosure and the knowledge in the art that further pharmaceutically acceptable salts include those listed by Remington's Pharmaceutical Sciences, 17th ed., Mack Publishing Company, Easton, PA, p. 1418 (1985). In general, a pharmaceutically acceptable acid or base salt can be synthesized from a parent compound that contains a basic or acidic moiety by any conventional chemical method. Briefly, such salts can be prepared by reacting the free acid or base forms of these compounds with a stoichiometric amount of the appropriate base or acid in an appropriate solvent.

[0122] The term “therapeutic agent” can refer to any agent that, when administered to a subject, has a therapeutic, diagnostic, and/or prophylactic effect and/or elicits a desired biological and/or pharmacological effect. Therapeutic agents can also be referred to as “actives” or “active agents.” Such agents include, but are not limited to, cytotoxins, radioactive ions, chemotherapeutic agents, small molecule drugs, proteins, and nucleic acids.

[0123] “A therapeutically effective amount” as used herein refers to the amount of each composition of the present disclosure required to confer therapeutic effect on the subject, either alone or in combination with one or more other therapeutic agents. Hence, as used herein, the term “therapeutically effective amount” means an amount of an agent to be delivered (e.g., nucleic acid, composition, therapeutic agent, prophylactic agent, etc.) that is sufficient, when administered to a subject suffering from or susceptible to a disease, disorder, and/or condition, to treat, improve symptoms of, diagnose, prevent, and/or delay the onset of the disease, disorder, and/or condition. In terms of treatment, a “therapeutically effective amount” is an amount that is sufficient to palliate, ameliorate, stabilize, reverse or slow the progression of a disease or a condition, e.g., an atherosclerotic vascular disease, hypertriglyceridemia, or diabetes. A “therapeutically effective amount” varies, as recognized by those skilled in the art, depending on the particular condition being treated, the severity of the condition, the individual subject parameters including age, physical condition, size, gender and weight, the duration of the treatment, the nature of concurrent therapy (if any), the specific route of administration and like factors within the knowledge and expertise of the health practitioner. These factors are well known to those of ordinary skill in the art and can be addressed with no more than routine experimentation. It is generally preferred that a maximum dose of the individual components or combinations thereof be used, that is, the highest safe dose according to sound medical judgment. It will be understood by those of ordinary skill in the art, however, that a subject may insist upon a lower dose or tolerable dose for medical reasons, psychological reasons or for virtually any other reasons. Additionally, other medication the patient may be receiving will affect the determination of the therapeutically effective amount of the therapeutic agent to administer. Empirical considerations, such as the half-life, generally will contribute to the determination of the dosage. A “therapeutically effective amount” may be of any of the compositions of the disclosure used alone or in conjunction with one or more agents used to treat a condition. A therapeutically effective amount can be administered in one or more administrations.

[0124] An effective initial method to determine a “therapeutically effective amount” may be by carrying out cell culture assays (for example, using neuronal cells) or using animal models (for example, mice, rats, rabbits, dogs or pigs). A dose may be formulated in animal models to achieve a concentration range that includes the IC50 (i.e., the concentration of the composition which achieves a half-maximal inhibition of symptoms) as determined in cell culture. Such information can be used to more accurately determine useful doses in humans. In addition to determining the appropriate concentration range for an disclosure composition to be therapeutically effective, animal models may also yield other relevant information such as preferable routes of administration that will give maximum effectiveness. Adjusting the dose to achieve maximal efficacy in humans based on the methods described above and other methods is well within the capabilities of the ordinarily skilled artisan.

[0125] Ranges provided herein are understood to be shorthand for all of the values within the range. For example, a range of 1 to 50 is understood to include any number, combination of numbers, or sub-range from the group consisting of 1, 2, 3, 4, 5, 6, 7, 8, 9, 10, 11, 12, 13, 14, 15, 16, 17, 18, 19, 20, 21, 22, 23, 24, 25, 26, 27, 28, 29, 30, 31, 32, 33, 34, 35, 36, 37, 38, 39, 40, 41, 42, 43, 44, 45, 46, 47, 48, 49, or 50, as well as all intervening decimal values between the aforementioned integers such as, for example, 1.1, 1.2, 1.3, 1.4, 1.5, 1.6, 1.7, 1.8, and 1.9. With respect to sub-ranges, “nested sub-ranges” that extend from either end point of the range are specifically contemplated. For example, a nested sub-range of an exemplary range of 1 to 50 may comprise 1 to 10, 1 to 20, 1 to 30, and 1 to 40 in one direction, or 50 to 40, 50 to 30, 50 to 20, and 50 to 10 in the other direction.

[0126] The term “protospacer,” or “target sequence” and their grammatical equivalents as used herein can refer to a DNA sequence of a target gene. In the native state, a protospacer is adjacent to a PAM (protospacer adjacent motif). The term “spacer” can be the RNA version of the protospacer that binds to the complementary strand of the protospacer. A spacer can be within a guide RNA (gRNA). The site of cleavage by an RNA-guided nuclease is within a protospacer sequence. Please see FIG. 1A for an illustration.

[0127] The term “base editing,” “gene editing,” or “gene modification” and its grammatical equivalents as used herein can refer to genetic engineering in which one or more nucleotides are inserted, replaced, or removed from a genome. Gene editing can be performed using a nuclease (e.g., a natural-existing nuclease or an artificially engineered nuclease). Gene modification can include introducing a double stranded break, a non-sense mutation, a frameshift mutation, a splice site alteration, or an inversion in a polynucleotide sequence, e.g., a target polynucleotide sequence.

[0128] The term “base editor (BE)” or “nucleobase editor (NBE)” as used herein can refer to an agent that binds a polynucleotide and has nucleobase modifying activity. In various embodiments, the base editor comprises a nucleobase modifying polypeptide (e.g., a deaminase) and a nucleic acid programmable nucleotide binding domain in conjunction with a guide polynucleotide (e.g., guide RNA), or nucleic acids encoding the programmable nucleotide binding domain and the deaminase. In various embodiments, the agent is a biomolecular complex comprising a protein domain having base editing activity, i.e., a domain capable of modifying a base (e.g., A, T, C, G, or U) within a nucleic acid molecule (e.g., DNA), or a nucleic acid encoding the same. In some embodiments, the polynucleotide programmable DNA binding domain is fused or linked to a deaminase domain, resulting in a base editor fusion protein. In some embodiments, the base editor comprises a nucleic acid encoding the base editor fusion protein, e.g., a mRNA encoding the base editor fusion protein. The base editor fusion protein may comprise one or more linkers, for example, peptide linkers. In one embodiment, the agent is a fusion protein comprising a domain having base editing activity. In another embodiment, the protein domain having base editing activity is linked to the guide RNA (e.g., via an RNA binding motif on the guide RNA and an RNA binding domain fused to the deaminase). In some embodiments, the domain having base editing activity is capable of deaminating a base within a nucleic acid molecule. In some embodiments, the base editor is capable of deaminating one or more bases within a DNA molecule. In some embodiments, the base editor is capable of deaminating an adenosine (A) within DNA. In some embodiments, the base editor is an adenosine base editor (ABE). In some embodiments, the base editor is capable of deaminating an cytosine (C) within DNA. In some embodiments, the base editor is a cytosine base editor (CBE).

[0129] The term “base editor system” refers to a system for editing a nucleobase of a target nucleotide sequence. In various embodiments, the base editor system comprises (1) a polynucleotide programmable nucleotide binding domain (e.g., Cas9); (2) a deaminase domain (e.g., an adenosine deaminase or a cytidine deaminase) for deaminating said nucleobase; and (3) one or more guide polynucleotide (e.g., guide RNA). In some embodiments, the base editor system comprises a base editor fusion protein comprising (1) and (2). In some embodiments, the polynucleotide programmable nucleotide binding domain is a polynucleotide programmable DNA binding domain. In some embodiments, the base editor is an adenine or adenosine base editor (ABE). In some embodiments, the base editor is a cytosine base editor (CBE).

### Nucleobase Editor Systems

[0130] In some aspects, provided herein are base editor systems capable of nucleobase modifications. In some embodiments, the base editor system comprises (i) a guide polynucleotide or a nucleic acid encoding same, and (ii) a base editor fusion protein comprising a programmable DNA binding domain and a deaminase, or a nucleic acid encoding same. In some embodiments, the base editor system comprises a guide polynucleotide. In some embodiments, the base editor system comprises a nucleic acid encoding a guide polynucleotide. In some embodiments, the base editor system comprises a base editor fusion protein comprising a programmable DNA binding domain and a deaminase. In some embodiments, the base editor system comprises a nucleic acid encoding a base editor fusion protein comprising a programmable DNA binding domain and a deaminase.

[0131] In some embodiments, the guide polynucleotide directs the base editor system to effect a nucleobase alteration in a PCSK9 or ANGPTL3 gene in vivo when administered to a subject.

[0132] In some embodiments, the base alteration occurs in at least 35% of whole liver cells in the subject as measured by next generation sequencing or Sanger sequencing.

[0133] In some embodiments, the base alteration occurs in at least 1%, 2%, 3%, 4%, 5%, 6%, 7%, 8%, 9%, 10%, 15%, 20%, 25%, 30%, 35%, 40%, 45%, 50%, 55%, 60%, 65%, 70%, 75%, 80%, 85%, 90%, 95%, 97%, 98%, 99%, 99.3%, 99.5%, 99.7%, 99.8%, or 99.9% of whole liver cells in the subject as measured by next generation sequencing or Sanger sequencing. In some embodiments, the base alteration occurs in at most 1%, 2%, 3%, 4%, 5%, 6%, 7%, 8%, 9%, 1, 15%, 20%, 25%, 30%, 35%, 40%, 45%, 50%, 55%, 60%, 65%, 70%, 75%, 80%, 85%, 90%, 95%, 97%, 98%, 99%, 99.3%, 99.5%, 99.7%, 99.8%, or 99.9% of whole liver cells in the subject as measured by next generation sequencing or Sanger sequencing. In some embodiments, the base alteration occurs in 1%-99.9%, 2%-99.9%, 3%-99.9%, 4%-99.9%, 5%-99.9%, 6%-99.9%, 7%-99.9%, 8%-99.9%, 9%-99.9%, 10%-99.9%, 15%-99.9%, 20%-99.9%, 25%-99.9%, 30%-99.9%, 35%-99.9%, 40%-99.9%, 45%-99.9%, 50%-99.9%, 55%-99.9%, 60%-99.9%, 65%-99.9%, 70%-99.9%, 75%-99.9%, 80%-99.9%, 85%-99.9%, 90%-99.9%, or 95-99.9% of whole liver cells in the subject as measured by next generation sequencing or Sanger sequencing. In some embodiments, the base alteration occurs in 1%-99.5%, 1%-99%, 1%-98%, 1%-97%, 1%-96%, 1%-95%, 1%-90%, 1%-85%, 1%-80%, 1%-75%, 1%-70%, 1%-65%, 1%-60%, 1%-55%, 1%-50%, 1%-45%, 1%-40%, 1%-35%, 1%-30%, 1%-25%, 1%-20%, 1%-15%, 1%-10%, 1%-9%, 1%-8%, 1%-7%, 1%-6%, 1%-5%, 1%-4%, 1%-3%, or 1%-2% of whole liver cells in the subject as measured by next generation sequencing or Sanger sequencing. In some embodiments, the base alteration occurs in 1%-90%, 5%-85%, 10%-80%, 15%-75%, 20%-70%, 25%-65%, 30%-60%, 35%-55%, or 40%-50% of whole liver cells in the subject as measured by next generation sequencing or Sanger sequencing. In some embodiments, the base alteration occurs in 100% of whole liver cells in the subject as measured by next generation sequencing or Sanger sequencing.

[0134] In some embodiments, the base alteration occurs in hepatocytes in the subject. In some embodiments, the base alteration occurs in at least 30% of hepatocytes in the subject as measured by next generation sequencing or Sanger sequencing. In some embodiments, the base alteration occurs in hepatocytes in the subject. In some embodiments, the base alteration occurs in at least % of hepatocytes in the subject as measured by next generation sequencing or Sanger sequencing. In some embodiments, the base alteration occurs in at least 1%, 2%, 3%, 4%, 5%, 6%, 7%, 8%, 9%, 10%, 15%, 20%, 25%, 30%, 35%, 40%, 45%, 50%, 55%, 60%, 65%, 70%, 75%, 80%, 85%, 90%, 95%, 97%, 98%, 99%, 99.3%, 99.5%, 99.7%, 99.8%, or 99.9% of hepatocytes in the subject as measured by next generation sequencing or Sanger sequencing. In some embodiments, the base alteration occurs in at most 1%, 2%, 3%, 4%, 5%, 10%, 15%, 20%, 25%, 30%, 35%, 40%, 45%, 50%, 55%, 60%, 65%, 70%, 75%, 80%, 85%, 90%, 95%, 97%, 98%, 99%, 99.3%, 99.5%, 99.7%, 99.8%, or 99.9% of hepatocytes in the subject as measured by next generation sequencing or Sanger sequencing. In some embodiments, the base alteration occurs in 1%-99.9%, 2%-99.9%, 3%-99.9%, 4%-99.9%, 5%-99.9%, 6%-99.9%, 7%-99.9%, 8%-99.9%, 9%-99.9%, 10%-99.9%, 15%-99.9%, 20%-99.9%, 25%-99.9%, 30%-99.9%, 35%-99.9%, 40%-99.9%, 45%-99.9%, 50%-99.9%, 55%-99.9%, 60%-99.9%, 65%-99.9%, 70%-99.9%, 75%-99.9%, 80%-99.9%, 85%-99.9%, 90%-99.9%, or 95-99.9% of hepatocytes in the subject as measured by next generation sequencing or Sanger sequencing. In some embodiments, the base alteration occurs in 1%-99.5%, 1%-99%, 1%-98%, 1%-97%, 1%-96%, 1%-95%, 1%-90%, 1%-85%, 1%-80%, 1%-75%, 1%-70%, 1%-65%, 1%-60%, 1%-55%, 1%-50%, 1%-45%, 1%-40%, 1%-35%, 1%-30%, 1%-25%, 1%-20%, 1%-15%, 1%-10%, 1%-9%, 1%-8%, 1%-7%, 1%-6%, 1%-5%, 1%-4%, 1%-3%, or 1%-2% hepatocytes in the subject as measured by next generation sequencing or Sanger sequencing. In some embodiments, the base alteration occurs in 1%-90%, 5%-85%, 10%-80%, 15%-75%, 20%-70%, 25%-65%, 30%-60%, 35%-55%, or 40%-50% of hepatocytes in the subject as measured by next generation sequencing or Sanger sequencing. In some embodiments, the base alteration occurs in 100% of hepatocytes in the subject as measured by next generation sequencing or Sanger sequencing.

[0135] In some embodiments, the base alteration occurred in whole liver cells in the subject is measured by next generation sequencing. In some embodiments, the base alteration occurred in whole liver cells in the subject is measured by Sanger sequencing. In some embodiments, the base alteration occurred in hepatocytes in the subject is measured by next generation sequencing. In some embodiments, the base alteration occurred in hepatocytes in the subject is measured by Sanger sequencing.

[0136] In some embodiments, the nucleobase alteration results in a reduction of at least 35% in blood PCSK9 protein level in the subject as compared to prior to the administration as measured by ELISA, Western blots, or LC-MS/MS. In some embodiments, the nucleobase alteration results in a reduction of at least 35% in blood ANGPTL3 protein level in the subject as compared to prior to the administration as measured by ELISA, Western blots, or LC-MS/MS

[0137] In some embodiments, the nucleobase alteration results in a reduction of at least 30%, 35%, 40%, 45%, 50%, 55%, 60%, 65%, 70%, 75%, 80%, 85%, 90%, 95%, 97%, 98%, or 99% in blood PCSK9 protein level in the subject as compared to prior to the administration as measured by ELISA, Western blots, or LC-MS/MS. In some embodiments, the nucleobase alteration results in a reduction of at least 1%, 2%, 3%, 4%, 5%, 6%, 7%, 8%, 9%, 10%, 15%, 20%, 25%, 30%, 31%, 32%, 33%, 34%, 35%, 36%, 37%, 38%, 39%, 40%, 45%, 50%, 55%, 60%, 65%, 70%, 71%, 72%, 73%, 74%, 75%, 76%, 77%, 78%, 79%, 80%, 85%, 90%, 95%, 97%, 98%, 90%, 95%, 97%, 98%, 99%, 99.3%, 99.5%, 99.7%, 99.8%, or 99.9% in blood PCSK9 protein level in the subject as compared to prior to the administration as measured by ELISA, Western blots, or LC-MS/MS. In some embodiments, the nucleobase alteration results in a reduction of at most 1%, 2%, 3%, 4%, 5%, 6%, 7%, 8%, 9%, 10%, 15%, 20%, 25%, 30%, 31%, 32%, 33%, 34%, 35%, 36%, 37%, 38%, 39%, 40%, 45%, 50%, 55%, 60%, 65%, 70%, 71%, 72%, 73%, 74%, 75%, 76%, 77%, 78%, 79%, 80%, 85%, 90%, 95%, 97%, 98%, 90%, 95%, 97%, 98%, 99%, 99.3%, 99.5%, 99.7%, 99.8%, or 99.9% in blood PCSK9 protein level in the subject as compared to prior to the administration as measured by ELISA, Western blots, or LC-MS/MS. In some embodiments, the nucleobase alteration results in a reduction of 1%-99.9%, 2%-99.9%, 3%-99.9%, 4%-99.9%, 5%-99.9%, 6%-99.9%, 7%-99.9%, 8%-99.9%, 9%-99.9%, 10%-99.9%, 15%-99.9%, 20%-99.9%, 25%-99.9%, 30%-99.9%, 31%-99.9%, 32%-99.9%, 33%-99.9%, 34%-99.9%, 35%-99.9%, 36%-99.9%, 37%-99.9%, 38%-99.9%, 39%-99.9%, 40%-99.9%, 45%-99.9%, 50%-99.9%, 55%-99.9%, 60%-99.9%, 65%-99.9%, 70%-99.9%, 75%-99.9%, 80%-99.9%, 85%-99.9%, 90%-99.9%, or 95-99.9% in blood PCSK9 protein level in the subject as compared to prior to the administration as measured by ELISA, Western blots, or LC-MS/MS. In some embodiments, the nucleobase alteration results in a reduction of 1%-99.5%, 1%-99%, 1%-98%, 1%-97%, 1%-96%, 1%-95%, 1%-90%, 1%-85%, 1%-80%, 1%-79%, 1%-78%, 1%-77%, 1%-76%, 1%-75%, 1%-74%, 1%-73%, 1%-72%, 1%-71%, 1%-70%, 1%-65%, 1%-60%, 1%-55%, 1%-50%, 1%-45%, 1%-40%, 1%-39%, 1%-38%, 1%-37%, 1%-36%, 1%-35%, 1%-34%, 1%-33%, 1%-32%, 1%-31%, 1%-30%, 1%-25%, 1%-20%, 1%-15%, 1%-10%, 1%-9%, 1%-8%, 1%-7%, 1%-6%, 1%-5%, 1%-4%, 1%-3%, or 1%-2% in blood PCSK9 protein level in the subject as compared to prior to the administration as measured by ELISA, Western blots, or LC-MS/MS. In some embodiments, the nucleobase alteration results in a reduction of 1%-99.9%, 5%-99.5%, 10%-99%, 15%-97%, 20%-95%, 25%-90%, 30%-85%, 31%-80%, 32%-79%, 33%-78%, 34%-77%, 35%-76%, 36%-76%, 37%-75%, 38%-74%, 39%-73%, 40%-72%, 45%-71%, 50%-70%, or 55%-65% in blood PCSK9 protein level in the subject as compared to prior to the administration as measured by ELISA, Western blots, or LC-MS/MS. In some embodiments, the nucleobase alteration results in a reduction of 100% in blood PCSK9 protein level in the subject as compared to prior to the administration as measured by ELISA, Western blots, or LC-MS/MS.

[0138] In some embodiments, the nucleobase alteration results in at least 1%, 2%, 3%, 4%, 5%, 6%, 7%, 8%, 9%, 10%, 11%, 12%, 13%, 14%, 15%, 20%, 25%, 30%, 35%, 40%, 50%, 75%, 90%, 100%, 110%, 120%, 130%, 140%, 150%, 160%, 170%, 180%, 190%, 200%, 210%, 220%, 230%, 240%, 250%, 260%, 270%, 280%, 290%, 300%, 400% 500%, 600%, 700%, 800%, 900%, 1000% less blood PCSK9 protein level in the subject as compared to prior to the administration as measured by ELISA, Western blots, or LC-MS/MS. In some embodiments, the nucleobase alteration results in at least 1.1-fold, 1.2-fold, 1.3-fold, 1.4-fold, 1.5-fold, 1.6-fold, 1.7-fold, 1.8-fold, 1.9-fold, 2-fold, 2.5-fold, 3-fold, 3.5-fold, 4-fold, 4.5-fold, 5-fold, 6-fold, 7-fold, 8-fold, 9-fold, 10-fold, or more than 10-fold less blood PCSK9 protein level in the subject as compared to prior to the administration as measured by ELISA, Western blots, or LC-MS/MS.

[0139] In some embodiments, the reduction of blood PCSK9 protein level or the blood PCSK9 protein level in the subject as compared to prior to the administration is measured by ELISA (enzyme-linked immunosorbent assay). In some embodiments, the reduction of blood PCSK9 protein level or the blood PCSK9 protein level in the subject as compared to prior to the administration is measured by Western blot analysis. In some embodiments, the reduction of blood PCSK9 protein level or the blood PCSK9 protein level in the subject as compared to prior to the administration is measured by LC-MS/MS (liquid chromatography-tandem mass spectrometry).

[0140] In some embodiments, the nucleobase alteration results in a reduction of at least 30%, 35%, 40%, 45%, 50%, 55%, 60%, 65%, 70%, 75%, 80%, 85%, 90%, 95%, 97%, 98%, or 99% in blood ANGPTL3 protein level in the subject as compared to prior to the administration as measured by ELISA, Western blots, or LC-MS/MS. In some embodiments, the nucleobase alteration results in a reduction of at least 1%, 2%, 3%, 4%, 5%, 6%, 7%, 8%, 9%, 10%, 15%, 20%, 25%, 30%, 31%, 32%, 33%, 34%, 35%, 36%, 37%, 38%, 39%, 40%, 45%, 50%, 55%, 60%, 65%, 70%, 71%, 72%, 73%, 74%, 75%, 76%, 77%, 78%, 79%, 80%, 85%, 90%, 95%, 97%, 98%, 90%, 95%, 97%, 98%, 99%, 99.3%, 99.5%, 99.7%, 99.8%, or 99.9% in blood ANGPTL3 protein level in the subject as compared to prior to the administration as measured by ELISA, Western blots, or LC-MS/MS. In some embodiments, the nucleobase alteration results in a reduction of at most 1%, 2%, 3%, 4%, 5%, 6%, 7%, 8%, 9%, 10%, 15%, 20%, 25%, 30%, 31%, 32%, 33%, 34%, 35%, 36%, 37%, 38%, 39%, 40%, 45%, 50%, 55%, 60%, 65%, 70%, 71%, 72%, 73%, 74%, 75%, 76%, 77%, 78%, 79%, 80%, 85%, 90%, 95%, 97%, 98%, 90%, 95%, 97%, 98%, 99%, 99.3%, 99.5%, 99.7%, 99.8%, or 99.9% in blood ANGPTL3 protein level in the subject as compared to prior to the administration as measured by ELISA, Western blots, or LC-MS/MS. In some embodiments, the nucleobase alteration results in a reduction of 1%-99.9%, 2%-99.9%, 3%-99.9%, 4%-99.9%, 5%-99.9%, 6%-99.9%, 7%-99.9%, 8%-99.9%, 9%-99.9%, 10%-99.9%, 15%-99.9%, 20%-99.9%, 25%-99.9%, 30%-99.9%, 31%-99.9%, 32%-99.9%, 33%-99.9%, 34%-99.9%, 35%-99.9%, 36%-99.9%, 37%-99.9%, 38%-99.9%, 39%-99.9%, 40%-99.9%, 45%-99.9%, 50%-99.9%, 55%-99.9%, 60%-99.9%, 65%-99.9%, 70%-99.9%, 75%-99.9%, 80%-99.9%, 85%-99.9%, 90%-99.9%, or 95-99.9% in blood ANGPTL3 protein level in the subject as compared to prior to the administration as measured by ELISA, Western blots, or LC-MS/MS. In some embodiments, the nucleobase alteration results in a reduction of 1%-99.5%, 1%-99%, 1%-98%, 1%-97%, 1%-96%, 1%-95%, 1%-90%, 1%-85%, 1%-80%, 1%-79%, 1%-78%, 1%-77%, 1%-76%, 1%-75%, 1%-74%, 1%-73%, 1%-72%, 1%-71%, 1%-70%, 1%-65%, 1%-60%, 1%-55%, 1%-50%, 1%-45%, 1%-40%, 1%-39%, 1%-38%, 1%-37%, 1%-36%, 1%-35%, 1%-34%, 1%-33%, 1%-32%, 1%-31%, 1%-30%, 1%-25%, 1%-20%, 1%-15%, 1%-10%, 1%-9%, 1%-8%, 1%-7%, 1%-6%, 1%-5%, 1%-4%, 1%-3%, or 1%-2% in blood ANGPTL3 protein level in the subject as compared to prior to the administration as measured by ELISA, Western blots, or LC-MS/MS. In some embodiments, the nucleobase alteration results in a reduction of 1%-99.9%, 5%-99.5%, 10%-99%, 15%-97%, 20%-95%, 25%-90%, 30%-85%, 31%-80%, 32%-79%, 33%-78%, 34%-77%, 35%-76%, 36%-76%, 37%-75%, 38%-74%, 39%-73%, 40%-72%, 45%-71%, 50%-70%, or 55%-65% in blood ANGPTL3 protein level in the subject as compared to prior to the administration as measured by ELISA, Western blots, or LC-MS/MS. In some embodiments, the nucleobase alteration results in a reduction of 100% in blood ANGPTL3 protein level in the subject as compared to prior to the administration as measured by ELISA, Western blots, or LC-MS/MS.

[0141] In some embodiments, the nucleobase alteration results in at least 1%, 2%, 3%, 4%, 5%, 6%, 7%, 8%, 9%, 10%, 11%, 12%, 13%, 14%, 15%, 20%, 25%, 30%, 35%, 40%, 50%, 75%, 90%, 100%, 110%, 120%, 130%, 140%, 150%, 160%, 170%, 180%, 190%, 200%, 210%, 220%, 230%, 240%, 250%, 260%, 270%, 280%, 290%, 300%, 400% 500%, 600%, 700%, 800%, 900%, 1000% less blood ANGPTL3 protein level in the subject as compared to prior to the administration as measured by ELISA, Western blots, or LC-MS/MS. In some embodiments, the nucleobase alteration results in at least 1.1-fold, 1.2-fold, 1.3-fold, 1.4-fold, 1.5-fold, 1.6-fold, 1.7-fold, 1.8-fold, 1.9-fold, 2-fold, 2.5-fold, 3-fold, 3.5-fold, 4-fold, 4.5-fold, 5-fold, 6-fold, 7-fold, 8-fold, 9-fold, 10-fold, or more than 10-fold less blood ANGPTL3 protein level in the subject as compared to prior to the administration as measured by ELISA, Western blots, or LC-MS/MS.

[0142] In some embodiments, the reduction of blood ANGPTL3 protein level or the blood ANGPTL3 protein level in the subject as compared to prior to the administration is measured by ELISA (enzyme-linked immunosorbent assay). In some embodiments, the reduction of blood ANGPTL3 protein level or the blood ANGPTL3 protein level in the subject as compared to prior to the administration is measured by Western blot analysis. In some embodiments, the reduction of blood ANGPTL3 protein level or the blood ANGPTL3 protein level in the subject as compared to prior to the administration is measured by LC-MS/MS (liquid chromatography-tandem mass spectrometry).

[0143] In some embodiments, the nucleobase alteration results in a reduction of at least 35% in blood or low-density lipoprotein cholesterol (LDL-C) levels in the subject as compared to prior to the administration. In some embodiments, the nucleobase alteration results in a reduction of at least 35%, 40%, 45%, 46%, 47%, 48%, 49%, 50%, 51%, 52%, 53%, 54%, 55%, 56%, 57%, 58%, 59%, 60%, 61%, 62%, 63%, 64%, 65%, 70%, 75%, 80%, 85%, 90%, 95%, 97%, 98%, or 99% in blood low-density lipoprotein cholesterol (LDL-C) level in the subject as compared to prior to the administration. In some embodiments, the nucleobase alteration results in a reduction of at least 1%, 2%, 3%, 4%, 5%, 6%, 7%, 8%, 9%, 10%, 15%, 20%, 25%, 30%, 35%, 40%, 45%, 46%, 47%, 48%, 49%, 50%, 51%, 52%, 53%, 54%, 55%, 56%, 57%, 58%, 59%, 60%, 61%, 62%, 63%, 64%, 65%, 70%, 75%, 80%, 85%, 90%, 95%, 97%, 98%, 99%, 99.3%, 99.5%, 99.7%, 99.8%, or 99.9% in blood low-density lipoprotein cholesterol (LDL-C) level in the subject as compared to prior to the administration. In some embodiments, the nucleobase alteration results in a reduction of at most 1%, 2%, 3%, 4%, 5%, 6%, 7%, 8%, 9%, 10%, 15%, 20%, 25%, 30%, 35%, 40%, 45%, 50%, 55%, 60%, 65%, 70%, 75%, 80%, 85%, 90%, 95%, 97%, 98%, 99%, 99.3%, 99.5%, 99.7%, 99.8%, or 99.9% in blood low-density lipoprotein cholesterol (LDL-C) level in the subject as compared to prior to the administration. In some embodiments, the nucleobase alteration results in a reduction of 1%-99.9%, 2%-99.9%, 3%-99.9%, 4%-99.9%, 5%-99.9%, 6%-99.9%, 7%-99.9%, 8%-99.9%, 9%-99.9%, 10%-99.9%, 15%-99.9%, 20%-99.9%, 25%-99.9%, 30%-99.9%, 35%-99.9%, 40%-99.9%, 45%-99.9%, 50%-99.9%, 55%-99.9%, 60%-99.9%, 65%-99.9%, 70%-99.9%, 75%-99.9%, 80%-99.9%, 85%-99.9%, 90%-99.9%, or 95-99.9% in blood low-density lipoprotein cholesterol (LDL-C) level in the subject as compared to prior to the administration. In some embodiments, the nucleobase alteration results in a reduction of 1%-99.5%, 1%-99%, 1%-98%, 1%-97%, 1%-96%, 1%-95%, 1%-90%, 1%-85%, 1%-80%, 1%-75%, 1%-70%, 1%-65%, 1%-60%, 1%-55%, 1%-50%, 1%-45%, 1%-40%, 1%-35%, 1%-30%, 1%-25%, 1%-20%, 1%-15%, 1%-10%, 1%-9%, 1%-8%, 1%-7%, 1%-6%, 1%-5%, 1%-4%, 1%-3%, or 1%-2% in blood low-density lipoprotein cholesterol (LDL-C) level in the subject as compared to prior to the administration. In some Embodiments, the nucleobase alteration results in a reduction of 1%-99.9%, 5%-99.5%, 10%-99%, 15%-97%, 20%-95%, 25%-90%, 30%-85%, 35%-80%, 40%-75%, 45%-70%, 50%-65%, or 55%-60% in blood low-density lipoprotein cholesterol (LDL-C) level in the subject as compared to prior to the administration. In some embodiments, the nucleobase alteration results in a reduction of 100% in blood low-density lipoprotein cholesterol (LDL-C) level in the subject as compared to prior to the administration. In some embodiments, the nucleobase alteration results in at least 1%, 2%, 3%, 4%, 5%, 6%, 7%, 8%, 9%, 10%, 11%, 12%, 13%, 14%, 15%, 20%, 25%, 30%, 35%, 40%, 50%, 75%, 90%, 100%, 110%, 120%, 130%, 140%, 150%, 160%, 170%, 180%, 190%, 200%, 210%, 220%, 230%, 240%, 250%, 260%, 270%, 280%, 290%, 300%, 400% 500%, 600%, 700%, 800%, 900%, 1000% less blood low-density lipoprotein cholesterol (LDL-C) level in the subject as compared to prior to the administration. In some embodiments, the nucleobase alteration results in at least 1.1-fold, 1.2-fold, 1.3-fold, 1.4-fold, 1.5-fold, 1.6-fold, 1.7-fold, 1.8-fold, 1.9-fold, 2-fold, 2.5-fold, 3-fold, 3.5-fold, 4-fold, 4.5-fold, 5-fold, 6-fold, 7-fold, 8-fold, 9-fold, 10-fold, or more than 10-fold less blood low-density lipoprotein cholesterol (LDL-C) level in the subject as compared to prior to the administration.

[0144] In some embodiments, the nucleobase alteration results in a reduction of at least 35% in blood triglyceride levels in the subject as compared to prior to the administration. In some embodiments, the nucleobase alteration results in a reduction of at least 30%, 35%, 40%, 45%, 46%, 47%, 48%, 49%, 50%, 51%, 52%, 53%, 54%, 55%, 56%, 57%, 58%, 59%, 60%, 61%, 62%, 63%, 64%, 65%, 70%, 75%, 80%, 85%, 90%, 95%, 97%, 98%, or 99% in blood triglyceride level in the subject as compared to prior to the administration. In some embodiments, the nucleobase alteration results in a reduction of at least 1%, 2%, 3%, 4%, 5%, 6%, 7%, 8%, 9%, 10%, 20%, 25%, 30%, 35%, 40%, 45%, 46%, 47%, 48%, 49%, 50%, 51%, 52%, 53%, 54%, 55%, 56%, 57%, 58%, 59%, 60%, 61%, 62%, 63%, 64%, 65%, 70%, 75%, 80%, 85%, 90%, 95%, 97%, 98%, 99%, 99.3%, 99.5%, 99.7%, 99.8%, or 99.9% in blood triglyceride level in the subject as compared to prior to the administration. In some embodiments, the nucleobase alteration results in a reduction of at most 1%, 2%, 3%, 4%, 5%, 6%, 7%, 8%, 9%, 10%, 15%, 20%, 25%, 30%, 35%, 40%, 45%, 50%, 55%, 60%, 65%, 70%, 75%, 80%, 85%, 90%, 95%, 97%, 98%, 99%, 99.3%, 99.5%, 99.7%, 99.8%, or 99.9% in blood triglyceride level in the subject as compared to prior to the administration. In some embodiments, the nucleobase alteration results in a reduction of 1%-99.9%, 2%-99.9%, 3%-99.9%, 4%-99.9%, 5%-99.9%, 6%-99.9%, 7%-99.9%, 8%-99.9%, 9%-99.9%, 10%-99.9%, 15%-99.9%, 20%-99.9%, 25%-99.9%, 30%-99.9%, 35%-99.9%, 40%-99.9%, 45%-99.9%, 50%-99.9%, 55%-99.9%, 60%-99.9%, 65%-99.9%, 70%-99.9%, 75%-99.9%, 80%-99.9%, 85%-99.9%, 90%-99.9%, or 95-99.9% in blood triglyceride level in the subject as compared to prior to the administration. In some embodiments, the nucleobase alteration results in a reduction of 1%-99.5%, 1%-99%, 1%-98%, 1%-97%, 1%-96%, 1%-95%, 1%-90%, 1%-85%, 1%-80%, 1%-75%, 1%-70%, 1%-65%, 1%-60%, 1%-55%, 1%-50%, 1%-45%, 1%-40%, 1%-35%, 1%-30%, 1%-25%, 1%-20%, 1%-15%, 1%-10%, 1%-9%, 1%-8%, 1%-7%, 1%-6%, 1%-5%, 1%-4%, 1%-3%, or 1%-2% in blood triglyceride level in the subject as compared to prior to the administration. In some embodiments, the nucleobase alteration results in a reduction of 1%-99.9%, 5%-99.5%, 10%-99%, 15%-97%, 20%-95%, 25%-90%, 30%-85%, 35%-80%, 40%-75%, 45%-70%, 50%-65%, or 55%-60% in blood triglyceride level in the subject as compared to prior to the administration. In some embodiments, the nucleobase alteration results in a reduction of 100% in blood triglyceride level in the subject as compared to prior to the administration. In some embodiments, the nucleobase alteration results in at least 1%, 2%, 3%, 4%, 5%, 6%, 7%, 8%, 9%, 10%, 11%, 12%, 13%, 14%, 15%, 20%, 25%, 30%, 35%, 40%, 50%, 75%, 90%, 100%, 110%, 120%, 130%, 140%, 150%, 160%, 170%, 180%, 190%, 200%, 210%, 220%, 230%, 240%, 250%, 260%, 270%, 280%, 290%, 300%, 400% 500%, 600%, 700%, 800%, 900%, 1000% less blood triglyceride level in the subject as compared to prior to the administration. In some embodiments, the nucleobase alteration results in at least 1.1-fold, 1.2-fold, 1.3-fold, 1.4-fold, 1.5-fold, 1.6-fold, 1.7-fold, 1.8-fold, 1.9-fold, 2-fold, 2.5-fold, 3-fold, 3.5-fold, 4-fold, 4.5-fold, 5-fold, 6-fold, 7-fold, 8-fold, 9-fold, 10-fold, or more than 10-fold less blood triglyceride level in the subject as compared to prior to the administration.

[0145] In some embodiments, the blood triglyceride level or the reduction of blood triglyceride level in the subject as compared to prior to the administration is measured by any standard technique. In some embodiments, the blood low-density lipoprotein cholesterol (LDL-C) level or the reduction of blood low-density lipoprotein cholesterol (LDL-C) level in the subject as compared to prior to the administration is measured by any standard technique. For example, a clinical analyzer instrument may be used to measure a ‘lipid panel’ in serum samples which entails the direct measurement of cholesterol (total C), triglycerides (TG) and high-density lipoprotein cholesterol (HDL-C) enzymatically. Reagent kits specific for each analyte contain buffers, calibrators, blanks and controls. As used in the present disclosure, cholesterol, triglycerides and HDL-C may be quantified using absorbance measurements of specific enzymatic reaction products. LDL-C may be determined indirectly. In some instances, most of circulating cholesterol can be found in three major lipoprotein fractions: very low-density lipoproteins (VLDL), LDL and HDL. In some embodiments, total circulating cholesterol may be estimated with the formula [Total C]=[VLDL-C]+[LDL-C]+[HDL-C]. Thus the LDL-C can be calculated from measured values of total cholesterol, triglycerides and HDL-C according to the relationship: [LDL-C]=[total C]−[HDL-C]−[TG]/5, where [TG]/5 is an estimate of VLDL-cholesterol. A reagent kit specific for triglycerides containing buffers, calibrators, blanks and controls may be used. As used herein, serum samples from the study may be analyzed and triglycerides may be measured using a series of coupled enzymatic reactions. In some embodiments, H₂O₂ may be used to quantify the analyte.as the end product of the last one and its absorbance at 500 nm, and the color intensity is proportional to triglyceride concentrations.

[0146] In some embodiments, the guide polynucleotide is a guide RNA, wherein the guide RNA comprises a spacer sequence that binds to the complementary strand of a protospacer sequence of the PCSK9 gene with 0, 1, or 2 mismatches. In some embodiments, the guide RNA comprises a spacer sequence that binds to the complementary strand of a protospacer sequence of the PCSK9 gene with no mismatches. In some embodiments, the guide RNA comprises a spacer sequence that binds to the complementary strand of a protospacer sequence of the PCSK9 gene with 1 mismatch. In some embodiments, the guide RNA comprises a spacer sequence that binds to the complementary strand of a protospacer sequence of the PCSK9 gene with 2 mismatches. In some embodiments, the guide RNA comprises a spacer sequence that binds to the complementary strand of a protospacer sequence of the PCSK9 gene with 3 mismatches. In some embodiments, the guide RNA comprises a spacer sequence that binds to the complementary strand of a protospacer sequence of the PCSK9 gene with 4 mismatches. In some embodiments, the guide RNA comprises a spacer sequence that binds to the complementary strand of a protospacer sequence of the PCSK9 gene with 5 mismatches.

[0147] In some embodiments, the guide polynucleotide is a guide RNA, wherein the guide RNA comprises a spacer sequence that binds to the complementary strand of a protospacer sequence of the ANGPTL3 gene with 0, 1, or 2 mismatches. In some embodiments, the guide RNA comprises a spacer sequence that binds to the complementary strand of a protospacer sequence of the ANGPTL3 gene with no mismatches. In some embodiments, the guide RNA comprises a spacer sequence that binds to the complementary strand of a protospacer sequence of the ANGPTL3 gene with 1 mismatch. In some embodiments, the guide RNA comprises a spacer sequence that binds to the complementary strand of a protospacer sequence of the ANGPTL3 gene with 2 mismatches. In some embodiments, the guide RNA comprises a spacer sequence that binds to the complementary strand of a protospacer sequence of the ANGPTL3 gene with 3 mismatches. In some embodiments, the guide RNA comprises a spacer sequence that binds to the complementary strand of a protospacer sequence of the ANGPTL3 gene with 4 mismatches. In some embodiments, the guide RNA comprises a spacer sequence that binds to the complementary strand of a protospacer sequence of the ANGPTL3 gene with 5 mismatches.

[0148] In some embodiments, the nucleobase alteration is outside of the protospacer sequence in less than 1% of whole liver cells in the subject as measured by net nucleobase editing. In some embodiments, the nucleobase alteration is outside of the protospacer sequence in less than 1% of hepatocytes in the subject as measured by net nucleobase editing. In some embodiments, the nucleobase alteration is only within the protospacer sequence as measured by net nucleobase editing.

[0149] In some embodiments, the nucleobase alteration is outside of the protospacer sequence in less than 0.01%. 0.02%, 0.03% 0.04%, 0.05%, 0.06%, 0.07%, 0.08%, 0.09%, 0.1%, 0.2%, 0.3%, 0.4%, 0.5%, 0.6%, 0.7%, 0.8%, 0.9%, 1.0%, 2.0%, 3.0% 4.0%, 5.0%, 6.0%, 7.0%, 8.0%, 9.0%, 10%, 15%, 20%, 25%, 30%, 35%, 40%, 45%, 50%, 55%, 60%, 65%, 70%, 65%, 80%, 85%, 90% of whole liver cells in the subject as measured by net nucleobase editing. In some embodiments, the nucleobase alteration is outside of the protospacer sequence in less than 0.01%. 0.02%, 0.03% 0.04%, 0.05%, 0.06%, 0.07%, 0.08%, 0.09%, 0.1%, 0.2%, 0.3%, 0.4%, 0.5%, 0.6%, 0.7%, 0.8%, 0.9%, 1.0%, 2.0%, 3.0% 4.0%, 5.0%, 6.0%, 7.0%, 8.0%, 9.0%, 10%, 15%, 20%, 25%, 30%, 35%, 40%, 45%, 50%, 55%, 60%, 65%, 70%, 65%, 80%, 85%, 90% of hepatocytes in the subject as measured by net nucleobase editing. In some embodiments, the nucleobase alteration is outside of the protospacer sequence in less than 0.01%. 0.02%, 0.03% 0.04%, 0.05%, 0.06%, 0.07%, 0.08%, 0.09%, 0.1%, 0.2%, 0.3%, 0.4%, 0.5%, 0.6%, 0.7%, 0.8%, 0.9%, 1.0%, 2.0%, 3.0% 4.0%, 5.0%, 6.0%, 7.0%, 8.0%, 9.0%, 10%, 15%, 20%, 25%, 30%, 35%, 40%, 45%, 50%, 55%, 60%, 65%, 70%, 65%, 80%, 85%, 90% of cells in the subject as measured by net nucleobase editing.

[0150] In some embodiments, the deaminase is an adenine deaminase. In some embodiments, the nucleobase alteration is a A•T to G•C alteration. In some embodiments, the deaminase is an adenine deaminase and the nucleobase alteration is a A•T to G•C alteration. In some embodiments, the programmable DNA binding domain comprises a nuclease inactive Cas9 or a Cas9 nickase. In some embodiments, the programmable DNA binding domain comprises a Cas9.

[0151] In some embodiments, the nucleobase alteration is at a splice site of the PCSK9 gene. In some embodiments, the nucleobase alteration is at a splice donor site of the PCSK9 gene. In some embodiments, the splice donor site is at 5′ end of PCSK9 intron 1 as referenced in SEQ ID NO: 5. In some embodiments, the nucleobase alteration is at a splice acceptor site of the PCSK9 gene. In some embodiments, the nucleobase alteration results in a frame shift, a premature stop codon, a insertion or deletion in a transcript encoded by the PCSK9 gene. In some embodiments, the nucleobase alteration results in an aberrant transcript encoded by the PCSK9 gene. In some embodiments, the guide polynucleotide is a guide RNA. In some embodiments, the guide RNA is chemically modified. In some embodiments, the guide RNA comprises a tracrRNA sequence. In some embodiments, the guide RNA comprises a chemical modification as set forth in Table 1 or Table 24.

[0152] In some embodiments, the nucleobase alteration is at a splice site of the ANGPTL3 gene. In some embodiments, the nucleobase alteration is at a splice donor site of the ANGPTL3 gene. In some embodiments, the splice donor site is at 5′ end of ANGPTL3 intron 6 as referenced in SEQ ID NO: 7. In some embodiments, the nucleobase alteration is at a splice acceptor site of the ANGPTL3 gene. In some embodiments, the nucleobase alteration results in a frame shift, a premature stop codon, a insertion or deletion in a transcript encoded by the ANGPTL3 gene. In some embodiments, the nucleobase alteration results in an aberrant transcript encoded by the ANGPTL3 gene. In some embodiments, the guide polynucleotide is a guide RNA. In some embodiments, the guide RNA is chemically modified. In some embodiments, the guide RNA comprises a tracrRNA sequence. In some embodiments, the guide RNA comprises a chemical modification as set forth in Table 1 or Table 24.

[0153] In some embodiments, the guide RNA comprises a guide RNA sequence set forth in Table 1 or Table 24. In some embodiments, the guide RNA comprises the sequence 5′-5′-cscscsGCACCUUGGCGCAGCGGgUUUUAGagcuaGaaauagcaaGUUaAaAuAaggCUaGUC cG UUAucAAcuuGaaaaaguGgcaccgAgUCggugcusususu-3′ (SEQ ID NO: 9), 5′-cscscsGCACCUUGGCGCAGCGGgUUUUAGagcuagaaauagcaaGUUaAaAuAaggcuaGUcc GU UAucAAcuugaaaaagugGcaccgagucggugcusususu-3′ (SEQ ID NO: 2234), 5′-cscscsGCACCUUGGCGCAGCGGgUUUUAGagcuaGaaauagcaaGUUaAaAuAaggcuaGUcc GUUAucAAcuuGaaaaagugGcaccgagucggugcusususu-3′ (SEQ ID NO: 2235) (GA346), 5′-cscscsGCACCUUGGCGCAGCGGgUUUUAGagcuagaaauagcaaGUUaAaAuAaggcuaGUcc GUUAacAAcuugaaaaagugGcaccgagucggugcusususu-3′ (SEQ ID NO: 10) (GA374), 5′-cscscsGCACCUUGGCGCAGCGGgUUUUAGagcuagaaauagcaaGUUaAaAuAaggcuaGUcc GUUAucAAcuugaaaaagugGcaccgagucggugcusususuuuu-3′ (SEQ ID NO: 11) (GA385), 5′-cscscsGCACCUUGGCGCAGCGGgUUUUAGagcuagaaauagcaaGUUaAaAuAaggcuaGUcc GUUAucAAcuugaaaaagugGcaccgagucggugcusususuuUu-3′ (SEQ ID NO: 2241) (GA386) or 5′-cscscsGCACCUUGGCGCAGCGgUUUUAGagcuaGaaauagcaaGUUaAaAuAaggcuaGUccG UUAucAAcuuGaaaaagugGcaccgagucggugcuususuuuu-3′ (SEQ ID NO: 12) (GA387).

[0154] In some embodiments, the protospacer sequence comprises a protospacer sequence set forth in Table 1 or Table 24. In some embodiments the protospacer comprises the sequence

(SEQ ID NO: 13)
5′-CCCGCACCTTGGCGCAGCGG-3′,
(SEQ ID NO: 14)
AAGATACCTGAATAACTCTC-3′,
and
(SEQ ID NO: 15)
5′-AAGATACCTGAATAACCCTC-3′.

[0155] In some embodiments, the base editor fusion protein comprises the sequence of SEQ ID NO: 3. In some embodiments, the adenosine deaminase comprises an amino acid sequence that is at least 60%, at least 65%, at least 70%, at least 75%, at least 80%, at least 85%, at least 90%, at least 95%, at least 96%, at least 97%, at least 98%, at least 99%, or at least 99.5% identical to the amino acid sequence set forth in SEQ ID NO: 3 or to any of the adenosine deaminases provided herein. It should be appreciated that adenosine deaminases provided herein may include one or more mutations (e.g., any of the mutations provided herein). The disclosure provides any deaminase domains with a certain percent identity plus any of the mutations or combinations thereof described herein. In some embodiments, the adenosine deaminase comprises an amino acid sequence that has 1, 2, 3, 4, 5, 6, 7, 8, 9, 10, 11, 12, 13, 14, 15, 16, 17, 18, 19, 20, 21, 22, 21, 24, 25, 26, 27, 28, 29, 30, 31, 32, 33, 34, 35, 36, 37, 38, 39, 40, 41, 42, 43, 44, 45, 46, 47, 48, 49, 50, or more mutations compared to the amino acid sequence set forth in SEQ ID NO: 3 or any of the adenosine deaminases provided herein. In some embodiments, the adenosine deaminase comprises an amino acid sequence that has at least 5, at least 10, at least 15, at least 20, at least 25, at least 30, at least 35, at least 40, at least 45, at least 50, at least 60, at least 70, at least 80, at least 90, at least 100, at least 110, at least 120, at least 130, at least 140, at least 150, at least 160, or at least 170 identical contiguous amino acid residues as compared to any one of the amino acid sequences set forth in SEQ ID NO: 3 or any of the adenosine deaminases provided herein.

[0156] In some embodiments, the nucleic acid encoding the base editor fusion protein is a mRNA. The mRNA may comprise modifications, for example, modifications at 3′ or 5′ end of the mRNA. In some embodiments, the mRNA comprises a cap analog.

[0157] In some embodiments, the mRNA comprises at least 1, 2, or 3 nucleotides at the 5′ end that comprises 2′-hydroxyl group, 2′-O-methyl group, or additional 2′ chemical modification or a combination thereof. In some embodiments, the mRNA comprises at least 1, 2, or 3 nucleotides at the 5′ end that comprises 2′-hydroxyl group, 2′-O-methyl group, or additional 2′ chemical modification or a combination thereof. In some embodiments, the mRNA comprises at least 1 nucleotide at the 5′ end that comprises 2′-hydroxyl group, 2′-O-methyl group, or additional 2′ chemical modification or a combination thereof. In some embodiments, the mRNA comprises at least 2 nucleotides at the 5′ end that comprises 2′-hydroxyl group, 2′-O-methyl group, or additional 2′ chemical modification or a combination thereof. In some embodiments, the mRNA comprises at least 3 nucleotides at the 5′ end that comprises 2′-hydroxyl group, 2′-O-methyl group, or additional 2′ chemical modification or a combination thereof. In some embodiments, the mRNA comprises at least 4 nucleotides at the 5′ end that comprises 2′-hydroxyl group, 2′-O-methyl group, or additional 2′ chemical modification or a combination thereof. In some embodiments, the mRNA comprises at least 5 nucleotides at the 5′ end that comprises 2′-hydroxyl group, 2′-O-methyl group, or additional 2′ chemical modification or a combination thereof. In some embodiments, the mRNA comprises at least 6 nucleotides at the 5′ end that comprises 2′-hydroxyl group, 2′-O-methyl group, or additional 2′ chemical modification or a combination thereof. In some embodiments, the mRNA comprises at least 7 nucleotides at the 5′ end that comprises 2′-hydroxyl group, 2′-O-methyl group, or additional 2′ chemical modification or a combination thereof. In some embodiments, the mRNA comprises at least 8 nucleotides at the 5′ end that comprises 2′-hydroxyl group, 2′-O-methyl group, or additional 2′ chemical modification or a combination thereof. In some embodiments, the mRNA comprises at least 9 nucleotides at the 5′ end that comprises 2′-hydroxyl group, 2′-O-methyl group, or additional 2′ chemical modification or a combination thereof. In some embodiments, the mRNA comprises at least 10 nucleotides at the 5′ end that comprises 2′-hydroxyl group, 2′-O-methyl group, or additional 2′ chemical modification or a combination thereof.

[0158] In some embodiments, the mRNA comprises a poly A tail. The poly A tail may be at the 3′ end of the mRNA.

[0159] In some embodiments, the GC % content of the mRNA sequence is greater than or equal to 40%, 41%, 42%, 43%, 44%, 45%, 46%, 47%, 48%, 49%, 50%, 51%, 52%, 53%, 54%, 55%, 56%, 57%, 58%, 59%, 60%, 61%, 62%, 63%, 64%, 65%, 66%, 67%, 68%, 69%, 70%, 71%, 72%, 73%, 74%, 75%, 76%, 77%, 78%, 79%, 80%, 81%, 82%, 83%, 84%, 85%, 86%, 87%, 88%, 89% or 90%. In some embodiments, the GC % content of the mRNA sequence is greater than or equal to 40%, 45%, 50%, 55%, 60%, 65%, 70%, 75% or 80%.

[0160] In some embodiments, the mRNA sequence comprises an adenine tTNA deaminase (TadA) region. In some embodiments, the GC % of the TadA region is greater than or equal to 40%, 41%, 42%, 43%, 44%, 45%, 46%, 47%, 48%, 49%, 50%, 51%, 52%, 53%, 54%, 55%, 56%, 57%, 58%, 59%, 60%, 61%, 62%, 63%, 64%, 65%, 66%, 67%, 68%, 69%, 70%, 71%, 72%, 73%, 74%, 75%, 76%, 77%, 78%, 79%, 80%, 81%, 82%, 83%, 84%, 85%, 86%, 87%, 88%, 89% or 90%. In some embodiments, the GC % content of the TadA region is greater than or equal to 40%, 45%, 50%, 55%, 60%, 65%, 70%, 75% or 80%.

[0161] In some embodiments, the mRNA sequence comprises a Cas9 region. In some embodiments, the GC % of the Cas9 region is greater than or equal to 40%, 41%, 42%, 43%, 44%, 45%, 46%, 47%, 48%, 49%, 50%, 51%, 52%, 53%, 54%, 55%, 56%, 57%, 58%, 59%, 60%, 61%, 62%, 63%, 64%, 65%, 66%, 67%, 68%, 69%, 70%, 71%, 72%, 73%, 74%, 75%, 76%, 77%, 78%, 79%, 80%, 81%, 82%, 83%, 84%, 85%, 86%, 87%, 88%, 89% or 90%. In some embodiments, the GC % content of the Cas9 region is greater than or equal to 40%, 45%, 50%, 55%, 60%, 65%, 70%, 75% or 80%.

[0162] In some embodiments, the mRNA sequence comprises a NLS region. In some embodiments, the GC % of the NLS region is greater than or equal to 40%, 41%, 42%, 43%, 44%, 45%, 46%, 47%, 48%, 49%, 50%, 51%, 52%, 53%, 54%, 55%, 56%, 57%, 58%, 59%, 60%, 61%, 62%, 63%, 64%, 65%, 66%, 67%, 68%, 69%, 70%, 71%, 72%, 73%, 74%, 75%, 76%, 77%, 78%, 79%, 80%, 81%, 82%, 83%, 84%, 85%, 86%, 87%, 88%, 89% or 90%. In some embodiments, the GC % content of the NLS region is greater than or equal to 40%, 45%, 50%, 55%, 60%, 65%, 70%, 75% or 80%.

[0163] In some embodiments, the mRNA sequence comprises a first linker region that connects the TadA region and the Cas9 region. In some embodiments, the GC % of the first linker region is greater than or equal to 40%, 41%, 42%, 43%, 44%, 45%, 46%, 47%, 48%, 49%, 50%, 51%, 52%, 53%, 54%, 55%, 56%, 57%, 58%, 59%, 60%, 61%, 62%, 63%, 64%, 65%, 66%, 67%, 68%, 69%, 70%, 71%, 72%, 73%, 74%, 75%, 76%, 77%, 78%, 79%, 80%, 81%, 82%, 83%, 84%, 85%, 86%, 87%, 88%, 89% or 90%. In some embodiments, the GC % content of the first linker region is greater than or equal to 40%, 45%, 50%, 55%, 60%, 65%, 70%, 75% or 80%.

[0164] In some embodiments, the mRNA sequence comprises a second linker region that connects the Cas9 region and the NLS region. In some embodiments, the GC % of the second linker region is greater than or equal to 40%, 41%, 42%, 43%, 44%, 45%, 46%, 47%, 48%, 49%, 50%, 51%, 52%, 53%, 54%, 55%, 56%, 57%, 58%, 59%, 60%, 61%, 62%, 63%, 64%, 65%, 66%, 67%, 68%, 69%, 70%, 71%, 72%, 73%, 74%, 75%, 76%, 77%, 78%, 79%, 80%, 81%, 82%, 83%, 84%, 85%, 86%, 87%, 88%, 89% or 90%. In some embodiments, the GC % content of the second linker region is greater than or equal to 40%, 45%, 50%, 55%, 60%, 65%, 70%, 75% or 80%.

[0165] In some embodiments, the base editor system as provided herein further comprises a lipid nanoparticle (LNP) enclosing a guide polynucleotide or a nucleic acid encoding the guide polynucleotide (i). In some embodiments, the LNP further encloses a base editor fusion protein comprising a programmable DNA binding domain and a deaminase, or a nucleic acid encoding same (ii). In some embodiments, the base editor system further comprises a second LNP enclosing a base editor fusion protein comprising a programmable DNA binding domain and a deaminase, or a nucleic acid encoding same (ii).

[0166] A base editor system as provided herein can include one or more LNPs. For example, a base editor system may comprise a LNP enclosing both a guide polynucleotide and a nucleic acid encoding the base editor fusion protein, e.g. an mRNA encoding the base editor fusion protein. In another example, a base editor system may comprise a LNP enclosing a guide polynucleotide, e.g. a guide RNA, and a LNP enclosing a nucleic acid, e.g. an mRNA, encoding the base editor fusion protein. LNPs separately enclosing the guide polynucleotide and the base editor fusion protein or mRNA encoding the base editor fusion protein may allow for flexible dosing and administration of the base editor system. For example, a LNP enclosing a guide RNA can be administered first, followed by administration of a LNP enclosing a mRNA encoding the base editor fusion protein. In some embodiments, a LNP enclosing a guide RNA and a second LNP enclosing a mRNA encoding the base editor fusion protein are administered to a subject at the same time. In some embodiments, a LNP enclosing a guide RNA and a LNP enclosing a mRNA encoding the base editor protein are administered to a subject sequentially. In some embodiments, a LNP enclosing mRNA encoding the base editor fusion protein is administered to a subject, followed by multiple administration or doses of a second LNP enclosing a guide RNA after 1 day, 2 days, 3 days, 4 days, 5 days, 6 days, 7 days, 2 weeks, 3 weeks, 4 weeks, 5 weeks, 6 weeks, 7 weeks, 8 weeks, 9 weeks, 10 weeks, 11 weeks, or 12 weeks or more. The multiple doses of the second LNP may be administered with intervals of 1, 2, 3, 4, 5, 6, 7, 8, 9, 10, 11, 12, 13, 14, 15, 16, 17, 18, 19, or 20 days or more.

[0167] In some embodiments, the ratio of the guide polynucleotide and the nucleic acid encoding the base editor fusion protein is about 1:10 to about 10:1 by weight. In some embodiments, the ratio of the guide polynucleotide and the nucleic acid encoding the base editor fusion protein is about 1:1, 1.5:1, 2:1, 3:1, 4:1, 1:1.5, 1:2, 1:3, 1:4 or any ratio between 4:1 or 1:4 by weight. In some embodiments, the ratio of the guide polynucleotide and the nucleic acid encoding the base editor fusion protein can be determined by titration of the guide polynucleotide and the nucleic acid encoding the base editor fusion protein.

[0168] In some embodiments, the molar ratio of the guide polynucleotide and the nucleic acid encoding the base editor fusion protein is about 500:1 to about 1:500.

[0169] In some embodiments, the ratio of the guide polynucleotide and the nucleic acid encoding the base editor fusion protein is about 1000:1 to about 1:1000 by weight. In some embodiments, the ratio of the guide polynucleotide and the nucleic acid encoding the base editor fusion protein is about 1000:1, 950:1, 900:1, 850:1, 800:1, 750:1, 700:1, 650:1, 600:1, 550:1, 500:1, 450:1, 400:1, 350:1, 300:1, 250:1, 200:1, 100:1, 95:1, 90:1, 85:1, 80:1, 75:1, 70:1, 65:1, 60:1, 55:1, 50:1, 45:1, 40:1, 35:1, 30:1, 25:1, 20:1, 19:1, 18:1, 17:1, 17:1, 15:1, 14:1, 13:1, 12:1, 11:1, 10:1, 9:1, 8:1, 7:1, 6:1, 5:1, 4:1, 3:1, 2.1, 1.9:1, 1.8:1, 1.7:1, 1.6:1, 1.5:1, 1.4:1, 1.3:1, 1.2:1, 1.1:1, 1.0:1, 0.9:1, 0.8:1, 0.7:1, 0.6:1, 0.5:1, 0.4:1, 0.3:1, 0.2:1, or 0.1 by weight. In some embodiments, the ratio of the guide polynucleotide and the nucleic acid encoding the base editor fusion protein is about 1:0.1, 1:0.2, 1:0.3, 1:0.4, 1:0.5, 1:0.6, 1:0.7, 1:0.8, 1:0.9, 1:1.0, 1:1.1, 1:1.2, 1:1.3, 1:1.4, 1:1.5, 1:1.6, 1:1.7, 1:1.8, 1:1.9, 1:2, 1:3, 1:4, 1:5, 1:6, 1:7, 1:8, 1:9, 1:10, 1:11, 1:12, 1:13, 1:14, 1:15, 1:16, 1:17, 1:18, 1:19, 1:20, 1:25, 1:30, 1:35, 1:40, 1:45, 1:50, 1:55, 1:60, 1:65, 1:70, 1:75, 1:80, 1:85, 1:90, 1:95, 1:100, 1:150, 1:200, 1:250, 1:300, 1:350, 1:400, 1:450, 1:500, 1:550, 1:600, 1:650, 1:700, 1:750, 1:800, 1:850, 1:900, 1:950, or 1:1000 by weight. In some embodiments, the ratio of the guide polynucleotide and the nucleic acid encoding the base editor fusion protein is at least about 1000:1, 950:1, 900:1, 850:1, 800:1, 750:1, 700:1, 650:1, 600:1, 550:1, 500:1, 450:1, 400:1, 350:1, 300:1, 250:1, 200:1, 100:1, 95:1, 90:1, 85:1, 80:1, 75:1, 70:1, 65:1, 60:1, 55:1, 50:1, 45:1, 40:1, 35:1, 30:1, 25:1, 20:1, 19:1, 18:1, 17:1, 17:1, 15:1, 14:1, 13:1, 12:1, 11:1, 10:1, 9:1, 8:1, 7:1, 6:1, 5:1, 4:1, 3:1, 2.1, 1.9:1, 1.8:1, 1.7:1, 1.6:1, 1.5:1, 1.4:1, 1.3:1, 1.2:1, 1.1:1, 1.0:1, 0.9:1, 0.8:1, 0.7:1, 0.6:1, 0.5:1, 0.4:1, 0.3:1, 0.2:1, or 0.1 by weight. In some embodiments, the ratio of the guide polynucleotide and the nucleic acid encoding the base editor fusion protein is at least about 1:0.1, 1:0.2, 1:0.3, 1:0.4, 1:0.5, 1:0.6, 1:0.7, 1:0.8, 1:0.9, 1:1.0, 1:1.1, 1:1.2, 1:1.3, 1:1.4, 1:1.5, 1:1.6, 1:1.7, 1:1.8, 1:1.9, 1:2, 1:3, 1:4, 1:5, 1:6, 1:7, 1:8, 1:9, 1:10, 1:11, 1:12, 1:13, 1:14, 1:15, 1:16, 1:17, 1:18, 1:19, 1:20, 1:25, 1:30, 1:35, 1:40, 1:45, 1:50, 1:55, 1:60, 1:65, 1:70, 1:75, 1:80, 1:85, 1:90, 1:95, 1:100, 1:150, 1:200, 1:250, 1:300, 1:350, 1:400, 1:450, 1:500, 1:550, 1:600, 1:650, 1:700, 1:750, 1:800, 1:850, 1:900, 1:950, or 1:1000 by weight. In some embodiments, the ratio of the guide polynucleotide and the nucleic acid encoding the base editor fusion protein is at most about 1000:1, 950:1, 900:1, 850:1, 800:1, 750:1, 700:1, 650:1, 600:1, 550:1, 500:1, 450:1, 400:1, 350:1, 300:1, 250:1, 200:1, 100:1, 95:1, 90:1, 85:1, 80:1, 75:1, 70:1, 65:1, 60:1, 55:1, 50:1, 45:1, 40:1, 35:1, 30:1, 25:1, 20:1, 19:1, 18:1, 17:1, 17:1, 15:1, 14:1, 13:1, 12:1, 11:1, 10:1, 9:1, 8:1, 7:1, 6:1, 5:1, 4:1, 3:1, 2.1, 1.9:1, 1.8:1, 1.7:1, 1.6:1, 1.5:1, 1.4:1, 1.3:1, 1.2:1, 1.1:1, 1.0:1, 0.9:1, 0.8:1, 0.7:1, 0.6:1, 0.5:1, 0.4:1, 0.3:1, 0.2:1, or 0.1 by weight. In some embodiments, the ratio of the guide polynucleotide and the nucleic acid encoding the base editor fusion protein is at most about 1:0.1, 1:0.2, 1:0.3, 1:0.4, 1:0.5, 1:0.6, 1:0.7, 1:0.8, 1:0.9, 1:1.0, 1:1.1, 1:1.2, 1:1.3, 1:1.4, 1:1.5, 1:1.6, 1:1.7, 1:1.8, 1:1.9, 1:2, 1:3, 1:4, 1:5, 1:6, 1:7, 1:8, 1:9, 1:10, 1:11, 1:12, 1:13, 1:14, 1:15, 1:16, 1:17, 1:18, 1:19, 1:20, 1:25, 1:30, 1:35, 1:40, 1:45, 1:50, 1:55, 1:60, 1:65, 1:70, 1:75, 1:80, 1:85, 1:90, 1:95, 1:100, 1:150, 1:200, 1:250, 1:300, 1:350, 1:400, 1:450, 1:500, 1:550, 1:600, 1:650, 1:700, 1:750, 1:800, 1:850, 1:900, 1:950, or 1:1000 by weight.

[0170] In some embodiments, the molar ratio of the guide polynucleotide and the nucleic acid encoding the base editor fusion protein is about 10000:1 to about 1:10000. In some embodiments, the molar ratio of the guide polynucleotide and the nucleic acid encoding the base editor fusion protein is about 10000:1, 9500:1, 9000:1, 8500:1, 8000:1, 7500:1, 7000:1, 6500:1, 6000:1, 5500:1, 5000:1, 4500:1, 4000:1, 3500:1, 3000:1, 2500:1, 2000:1, 1500:1, 1000:1, 950:1, 900:1, 850:1, 800:1, 750:1, 700:1, 650:1, 600:1, 550:1, 500:1, 450:1, 400:1, 350:1, 300:1, 250:1, 200:1, 190:1, 180:1, 170:1, 160:1, 150:1, 140:1, 130:1, 120:1, 110:1, 100:1, 95:1, 90:1, 85:1, 80:1, 75:1, 70:1, 69:1, 68:1, 67:1, 66:1, 65:1, 64:1, 63:1, 62:1, 61:1, 60:1, 59:1, 58:1, 57:1, 56:1, 55:1, 54:1, 53:1, 52:1, 51:1, 50:1, 49:1, 48:1, 47:1, 46:1, 45:1, 44:1, 43:1, 42:1, 41:1, 40:1, 39:1, 38:1, 37:1, 36:1, 35:1, 34:1, 33:1, 32:1, 31:1, 30:1, 29:1, 28:1, 27:1, 26:1, 25:1, 24:1, 23:1, 22:1, 21:1, 20:1, 19:1, 18:1, 17:1, 16:1, 15:1, 14:1, 13:1, 12:1, 11:1, 10:1, 9:1, 8:1, 7:1, 6:1, 5:1, 4:1, 3:1, 2:1, 1:1, 0.9:1, 0.8:1, 0.7:1, 0.6:1, 0.5:1, 0.4:1, 0.3:1, 0.2:1, or 0.1:1. In some embodiments, the molar ratio of the guide polynucleotide and the nucleic acid encoding the base editor fusion protein is at least about 1:10000, 1:9500, 1:9000, 1:8500, 1:8000, 1:7500, 1:7000, 1:6500, 1:6000, 1:5500, 1:5000, 1:4500, 1:4000, 1:3500, 1:3000, 1:2500, 1:2000, 1:1500, 1:1000, 1:950, 1:900, 1:850, 1:800, 1:750, 1:700, 1:650, 1:600, 1:550, 1:500, 1:450, 1:400, 1:350, 1:300, 1:250, 1:200, 1:190, 1:180, 1:170, 1:160, 1:150, 1:140, 1:130, 1:120, 1:110, 1:100, 1:95, 1:90, 1:85, 1:80, 1:75, 1:70, 1:69, 1:68, 1:67, 1:66, 1:65, 1:64, 1:63, 1:62, 1:61, 1:60, 1:59, 1:58, 1:57, 1:56, 1:55, 1:54, 1:53, 1:52, 1:51, 1:50, 1:49, 1:48, 1:47, 1:46, 1:45, 1:44, 1:43, 1:42, 1:41, 1:40, 1:39, 1:38, 1:37, 1:36, 1:35, 1:34, 1:33, 1:32, 1:31, 1:30, 1:29, 1:28, 1:27, 1:26, 1:25, 1:24, 1:23, 1:22, 1:21, 1:20, 1:19, 1:18, 1:17, 1:16, 1:15, 1:14, 1:13, 1:12, 1:11, 1:10, 1:9, 1:8, 1:7, 1:6, 1:5, 1:4, 1:3, 1:2, 1:1, 1:0.9, 1:0.8, 1:0.7, 1:0.6, 1:0.5, 1:0.4, 1:0.3, 1:0.2, or 1:0.1. In some embodiments, the molar ratio of the guide polynucleotide and the nucleic acid encoding the base editor fusion protein is at least about 10000:1, 9500:1, 9000:1, 8500:1, 8000:1, 7500:1, 7000:1, 6500:1, 6000:1, 5500:1, 5000:1, 4500:1, 4000:1, 3500:1, 3000:1, 2500:1, 2000:1, 1500:1, 1000:1, 950:1, 900:1, 850:1, 800:1, 750:1, 700:1, 650:1, 600:1, 550:1, 500:1, 450:1, 400:1, 350:1, 300:1, 250:1, 200:1, 190:1, 180:1, 170:1, 160:1, 150:1, 140:1, 130:1, 120:1, 110:1, 100:1, 95:1, 90:1, 85:1, 80:1, 75:1, 70:1, 69:1, 68:1, 67:1, 66:1, 65:1, 64:1, 63:1, 62:1, 61:1, 60:1, 59:1, 58:1, 57:1, 56:1, 55:1, 54:1, 53:1, 52:1, 51:1, 50:1, 49:1, 48:1, 47:1, 46:1, 45:1, 44:1, 43:1, 42:1, 41:1, 40:1, 39:1, 38:1, 37:1, 36:1, 35:1, 34:1, 33:1, 32:1, 31:1, 30:1, 29:1, 28:1, 27:1, 26:1, 25:1, 24:1, 23:1, 22:1, 21:1, 20:1, 19:1, 18:1, 17:1, 16:1, 15:1, 14:1, 13:1, 12:1, 11:1, 10:1, 9:1, 8:1, 7:1, 6:1, 5:1, 4:1, 3:1, 2:1, 1:1, 0.9:1, 0.8:1, 0.7:1, 0.6:1, 0.5:1, 0.4:1, 0.3:1, 0.2:1, or 0.1:1. In some embodiments, the molar ratio of the guide polynucleotide and the nucleic acid encoding the base editor fusion protein is at least about 1:10000, 1:9500, 1:9000, 1:8500, 1:8000, 1:7500, 1:7000, 1:6500, 1:6000, 1:5500, 1:5000, 1:4500, 1:4000, 1:3500, 1:3000, 1:2500, 1:2000, 1:1500, 1:1000, 1:950, 1:900, 1:850, 1:800, 1:750, 1:700, 1:650, 1:600, 1:550, 1:500, 1:450, 1:400, 1:350, 1:300, 1:250, 1:200, 1:190, 1:180, 1:170, 1:160, 1:150, 1:140, 1:130, 1:120, 1:110, 1:100, 1:95, 1:90, 1:85, 1:80, 1:75, 1:70, 1:69, 1:68, 1:67, 1:66, 1:65, 1:64, 1:63, 1:62, 1:61, 1:60, 1:59, 1:58, 1:57, 1:56, 1:55, 1:54, 1:53, 1:52, 1:51, 1:50, 1:49, 1:48, 1:47, 1:46, 1:45, 1:44, 1:43, 1:42, 1:41, 1:40, 1:39, 1:38, 1:37, 1:36, 1:35, 1:34, 1:33, 1:32, 1:31, 1:30, 1:29, 1:28, 1:27, 1:26, 1:25, 1:24, 1:23, 1:22, 1:21, 1:20, 1:19, 1:18, 1:17, 1:16, 1:15, 1:14, 1:13, 1:12, 1:11, 1:10, 1:9, 1:8, 1:7, 1:6, 1:5, 1:4, 1:3, 1:2, 1:1, 1:0.9, 1:0.8, 1:0.7, 1:0.6, 1:0.5, 1:0.4, 1:0.3, 1:0.2, or 1:0.1. In some embodiments, the molar ratio of the guide polynucleotide and the nucleic acid encoding the base editor fusion protein is at most about 10000:1, 9500:1, 9000:1, 8500:1, 8000:1, 7500:1, 7000:1, 6500:1, 6000:1, 5500:1, 5000:1, 4500:1, 4000:1, 3500:1, 3000:1, 2500:1, 2000:1, 1500:1, 1000:1, 950:1, 900:1, 850:1, 800:1, 750:1, 700:1, 650:1, 600:1, 550:1, 500:1, 450:1, 400:1, 350:1, 300:1, 250:1, 200:1, 190:1, 180:1, 170:1, 160:1, 150:1, 140:1, 130:1, 120:1, 110:1, 100:1, 95:1, 90:1, 85:1, 80:1, 75:1, 70:1, 69:1, 68:1, 67:1, 66:1, 65:1, 64:1, 63:1, 62:1, 61:1, 60:1, 59:1, 58:1, 57:1, 56:1, 55:1, 54:1, 53:1, 52:1, 51:1, 50:1, 49:1, 48:1, 47:1, 46:1, 45:1, 44:1, 43:1, 42:1, 41:1, 40:1, 39:1, 38:1, 37:1, 36:1, 35:1, 34:1, 33:1, 32:1, 31:1, 30:1, 29:1, 28:1, 27:1, 26:1, 25:1, 24:1, 23:1, 22:1, 21:1, 20:1, 19:1, 18:1, 17:1, 16:1, 15:1, 14:1, 13:1, 12:1, 11:1, 10:1, 9:1, 8:1, 7:1, 6:1, 5:1, 4:1, 3:1, 2:1, 1:1, 0.9:1, 0.8:1, 0.7:1, 0.6:1, 0.5:1, 0.4:1, 0.3:1, 0.2:1, or 0.1:1. In some embodiments, the molar ratio of the guide polynucleotide and the nucleic acid encoding the base editor fusion protein is at most about 1:10000, 1:9500, 1:9000, 1:8500, 1:8000, 1:7500, 1:7000, 1:6500, 1:6000, 1:5500, 1:5000, 1:4500, 1:4000, 1:3500, 1:3000, 1:2500, 1:2000, 1:1500, 1:1000, 1:950, 1:900, 1:850, 1:800, 1:750, 1:700, 1:650, 1:600, 1:550, 1:500, 1:450, 1:400, 1:350, 1:300, 1:250, 1:200, 1:190, 1:180, 1:170, 1:160, 1:150, 1:140, 1:130, 1:120, 1:110, 1:100, 1:95, 1:90, 1:85, 1:80, 1:75, 1:70, 1:69, 1:68, 1:67, 1:66, 1:65, 1:64, 1:63, 1:62, 1:61, 1:60, 1:59, 1:58, 1:57, 1:56, 1:55, 1:54, 1:53, 1:52, 1:51, 1:50, 1:49, 1:48, 1:47, 1:46, 1:45, 1:44, 1:43, 1:42, 1:41, 1:40, 1:39, 1:38, 1:37, 1:36, 1:35, 1:34, 1:33, 1:32, 1:31, 1:30, 1:29, 1:28, 1:27, 1:26, 1:25, 1:24, 1:23, 1:22, 1:21, 1:20, 1:19, 1:18, 1:17, 1:16, 1:15, 1:14, 1:13, 1:12, 1:11, 1:10, 1:9, 1:8, 1:7, 1:6, 1:5, 1:4, 1:3, 1:2, 1:1, 1:0.9, 1:0.8, 1:0.7, 1:0.6, 1:0.5, 1:0.4, 1:0.3, 1:0.2, or 1:0.1.

[0171] In some embodiments, the ratio of a nucleic acid encoding the guide polynucleotide and the nucleic acid encoding the base editor fusion protein is about 10:1 to about 1:10 by weight. In some embodiments, the ratio of a nucleic acid encoding the guide polynucleotide and the nucleic acid encoding the base editor fusion protein is about 4:1, 3.1, 2:1, 1.5:1, 1:1, 1:1.5, 1:2, 1:3, or 1:4 by weight. In some embodiments, the molar ratio of a nucleic acid encoding the guide polynucleotide and the nucleic acid encoding the base editor fusion protein is about 500:1 to about 1:500.

[0172] In some embodiments, the ratio of a nucleic acid encoding the guide polynucleotide and the nucleic acid encoding the base editor fusion protein is about 1000:1 to about 1:1000 by weight. In some embodiments, the ratio of a nucleic acid encoding the guide polynucleotide and the nucleic acid encoding the base editor fusion protein is about 1000:1, 950:1, 900:1, 850:1, 800:1, 750:1, 700:1, 650:1, 600:1, 550:1, 500:1, 450:1, 400:1, 350:1, 300:1, 250:1, 200:1, 100:1, 95:1, 90:1, 85:1, 80:1, 75:1, 70:1, 65:1, 60:1, 55:1, 50:1, 45:1, 40:1, 35:1, 30:1, 25:1, 20:1, 19:1, 18:1, 17:1, 17:1, 15:1, 14:1, 13:1, 12:1, 11:1, 10:1, 9:1, 8:1, 7:1, 6:1, 5:1, 4:1, 3:1, 2.1, 1.9:1, 1.8:1, 1.7:1, 1.6:1, 1.5:1, 1.4:1, 1.3:1, 1.2:1, 1.1:1, 1.0:1, 0.9:1, 0.8:1, 0.7:1, 0.6:1, 0.5:1, 0.4:1, 0.3:1, 0.2:1, or 0.1 by weight. In some embodiments, the ratio of a nucleic acid encoding the guide polynucleotide and the nucleic acid encoding the base editor fusion protein is about 1:0.1, 1:0.2, 1:0.3, 1:0.4, 1:0.5, 1:0.6, 1:0.7, 1:0.8, 1:0.9, 1:1.0, 1:1.1, 1:1.2, 1:1.3, 1:1.4, 1:1.5, 1:1.6, 1:1.7, 1:1.8, 1:1.9, 1:2, 1:3, 1:4, 1:5, 1:6, 1:7, 1:8, 1:9, 1:10, 1:11, 1:12, 1:13, 1:14, 1:15, 1:16, 1:17, 1:18, 1:19, 1:20, 1:25, 1:30, 1:35, 1:40, 1:45, 1:50, 1:55, 1:60, 1:65, 1:70, 1:75, 1:80, 1:85, 1:90, 1:95, 1:100, 1:150, 1:200, 1:250, 1:300, 1:350, 1:400, 1:450, 1:500, 1:550, 1:600, 1:650, 1:700, 1:750, 1:800, 1:850, 1:900, 1:950, or 1:1000 by weight. In some embodiments, the ratio of a nucleic acid encoding the guide polynucleotide and the nucleic acid encoding the base editor fusion protein is at least about 1000:1, 950:1, 900:1, 850:1, 800:1, 750:1, 700:1, 650:1, 600:1, 550:1, 500:1, 450:1, 400:1, 350:1, 300:1, 250:1, 200:1, 100:1, 95:1, 90:1, 85:1, 80:1, 75:1, 70:1, 65:1, 60:1, 55:1, 50:1, 45:1, 40:1, 35:1, 30:1, 25:1, 20:1, 19:1, 18:1, 17:1, 17:1, 15:1, 14:1, 13:1, 12:1, 11:1, 10:1, 9:1, 8:1, 7:1, 6:1, 5:1, 4:1, 3:1, 2.1, 1.9:1, 1.8:1, 1.7:1, 1.6:1, 1.5:1, 1.4:1, 1.3:1, 1.2:1, 1.1:1, 1.0:1, 0.9:1, 0.8:1, 0.7:1, 0.6:1, 0.5:1, 0.4:1, 0.3:1, 0.2:1, or 0.1 by weight. In some embodiments, the ratio of a nucleic acid encoding the guide polynucleotide and the nucleic acid encoding the base editor fusion protein is at least about 1:0.1, 1:0.2, 1:0.3, 1:0.4, 1:0.5, 1:0.6, 1:0.7, 1:0.8, 1:0.9, 1:1.0, 1:1.1, 1:1.2, 1:1.3, 1:1.4, 1:1.5, 1:1.6, 1:1.7, 1:1.8, 1:1.9, 1:2, 1:3, 1:4, 1:5, 1:6, 1:7, 1:8, 1:9, 1:10, 1:11, 1:12, 1:13, 1:14, 1:15, 1:16, 1:17, 1:18, 1:19, 1:20, 1:25, 1:30, 1:35, 1:40, 1:45, 1:50, 1:55, 1:60, 1:65, 1:70, 1:75, 1:80, 1:85, 1:90, 1:95, 1:100, 1:150, 1:200, 1:250, 1:300, 1:350, 1:400, 1:450, 1:500, 1:550, 1:600, 1:650, 1:700, 1:750, 1:800, 1:850, 1:900, 1:950, or 1:1000 by weight. In some embodiments, the ratio of a nucleic acid encoding the guide polynucleotide and the nucleic acid encoding the base editor fusion protein is at most about 1000:1, 950:1, 900:1, 850:1, 800:1, 750:1, 700:1, 650:1, 600:1, 550:1, 500:1, 450:1, 400:1, 350:1, 300:1, 250:1, 200:1, 100:1, 95:1, 90:1, 85:1, 80:1, 75:1, 70:1, 65:1, 60:1, 55:1, 50:1, 45:1, 40:1, 35:1, 30:1, 25:1, 20:1, 19:1, 18:1, 17:1, 17:1, 15:1, 14:1, 13:1, 12:1, 11:1, 10:1, 9:1, 8:1, 7:1, 6:1, 5:1, 4:1, 3:1, 2.1, 1.9:1, 1.8:1, 1.7:1, 1.6:1, 1.5:1, 1.4:1, 1.3:1, 1.2:1, 1.1:1, 1.0:1, 0.9:1, 0.8:1, 0.7:1, 0.6:1, 0.5:1, 0.4:1, 0.3:1, 0.2:1, or 0.1 by weight. In some embodiments, the ratio of a nucleic acid encoding the guide polynucleotide and the nucleic acid encoding the base editor fusion protein is at most about 1:0.1, 1:0.2, 1:0.3, 1:0.4, 1:0.5, 1:0.6, 1:0.7, 1:0.8, 1:0.9, 1:1.0, 1:1.1, 1:1.2, 1:1.3, 1:1.4, 1:1.5, 1:1.6, 1:1.7, 1:1.8, 1:1.9, 1:2, 1:3, 1:4, 1:5, 1:6, 1:7, 1:8, 1:9, 1:10, 1:11, 1:12, 1:13, 1:14, 1:15, 1:16, 1:17, 1:18, 1:19, 1:20, 1:25, 1:30, 1:35, 1:40, 1:45, 1:50, 1:55, 1:60, 1:65, 1:70, 1:75, 1:80, 1:85, 1:90, 1:95, 1:100, 1:150, 1:200, 1:250, 1:300, 1:350, 1:400, 1:450, 1:500, 1:550, 1:600, 1:650, 1:700, 1:750, 1:800, 1:850, 1:900, 1:950, or 1:1000 by weight.

[0173] In some embodiments, the molar ratio of a nucleic acid encoding the guide polynucleotide and the nucleic acid encoding the base editor fusion protein is about 10000:1 to about 1:10000. In some embodiments, the molar ratio of a nucleic acid encoding the guide polynucleotide and the nucleic acid encoding the base editor fusion protein is about 10000:1, 9500:1, 9000:1, 8500:1, 8000:1, 7500:1, 7000:1, 6500:1, 6000:1, 5500:1, 5000:1, 4500:1, 4000:1, 3500:1, 3000:1, 2500:1, 2000:1, 1500:1, 1000:1, 950:1, 900:1, 850:1, 800:1, 750:1, 700:1, 650:1, 600:1, 550:1, 500:1, 450:1, 400:1, 350:1, 300:1, 250:1, 200:1, 190:1, 180:1, 170:1, 160:1, 150:1, 140:1, 130:1, 120:1, 110:1, 100:1, 95:1, 90:1, 85:1, 80:1, 75:1, 70:1, 69:1, 68:1, 67:1, 66:1, 65:1, 64:1, 63:1, 62:1, 61:1, 60:1, 59:1, 58:1, 57:1, 56:1, 55:1, 54:1, 53:1, 52:1, 51:1, 50:1, 49:1, 48:1, 47:1, 46:1, 45:1, 44:1, 43:1, 42:1, 41:1, 40:1, 39:1, 38:1, 37:1, 36:1, 35:1, 34:1, 33:1, 32:1, 31:1, 30:1, 29:1, 28:1, 27:1, 26:1, 25:1, 24:1, 23:1, 22:1, 21:1, 20:1, 19:1, 18:1, 17:1, 16:1, 15:1, 14:1, 13:1, 12:1, 11:1, 10:1, 9:1, 8:1, 7:1, 6:1, 5:1, 4:1, 3:1, 2:1, 1:1, 0.9:1, 0.8:1, 0.7:1, 0.6:1, 0.5:1, 0.4:1, 0.3:1, 0.2:1, or 0.1:1. In some embodiments, the molar ratio of a nucleic acid encoding the guide polynucleotide and the nucleic acid encoding the base editor fusion protein is at least about 1:10000, 1:9500, 1:9000, 1:8500, 1:8000, 1:7500, 1:7000, 1:6500, 1:6000, 1:5500, 1:5000, 1:4500, 1:4000, 1:3500, 1:3000, 1:2500, 1:2000, 1:1500, 1:1000, 1:950, 1:900, 1:850, 1:800, 1:750, 1:700, 1:650, 1:600, 1:550, 1:500, 1:450, 1:400, 1:350, 1:300, 1:250, 1:200, 1:190, 1:180, 1:170, 1:160, 1:150, 1:140, 1:130, 1:120, 1:110, 1:100, 1:95, 1:90, 1:85, 1:80, 1:75, 1:70, 1:69, 1:68, 1:67, 1:66, 1:65, 1:64, 1:63, 1:62, 1:61, 1:60, 1:59, 1:58, 1:57, 1:56, 1:55, 1:54, 1:53, 1:52, 1:51, 1:50, 1:49, 1:48, 1:47, 1:46, 1:45, 1:44, 1:43, 1:42, 1:41, 1:40, 1:39, 1:38, 1:37, 1:36, 1:35, 1:34, 1:33, 1:32, 1:31, 1:30, 1:29, 1:28, 1:27, 1:26, 1:25, 1:24, 1:23, 1:22, 1:21, 1:20, 1:19, 1:18, 1:17, 1:16, 1:15, 1:14, 1:13, 1:12, 1:11, 1:10, 1:9, 1:8, 1:7, 1:6, 1:5, 1:4, 1:3, 1:2, 1:1, 1:0.9, 1:0.8, 1:0.7, 1:0.6, 1:0.5, 1:0.4, 1:0.3, 1:0.2, or 1:0.1. In some embodiments, the molar ratio of a nucleic acid encoding the guide polynucleotide and the nucleic acid encoding the base editor fusion protein is at least about 10000:1, 9500:1, 9000:1, 8500:1, 8000:1, 7500:1, 7000:1, 6500:1, 6000:1, 5500:1, 5000:1, 4500:1, 4000:1, 3500:1, 3000:1, 2500:1, 2000:1, 1500:1, 1000:1, 950:1, 900:1, 850:1, 800:1, 750:1, 700:1, 650:1, 600:1, 550:1, 500:1, 450:1, 400:1, 350:1, 300:1, 250:1, 200:1, 190:1, 180:1, 170:1, 160:1, 150:1, 140:1, 130:1, 120:1, 110:1, 100:1, 95:1, 90:1, 85:1, 80:1, 75:1, 70:1, 69:1, 68:1, 67:1, 66:1, 65:1, 64:1, 63:1, 62:1, 61:1, 60:1, 59:1, 58:1, 57:1, 56:1, 55:1, 54:1, 53:1, 52:1, 51:1, 50:1, 49:1, 48:1, 47:1, 46:1, 45:1, 44:1, 43:1, 42:1, 41:1, 40:1, 39:1, 38:1, 37:1, 36:1, 35:1, 34:1, 33:1, 32:1, 31:1, 30:1, 29:1, 28:1, 27:1, 26:1, 25:1, 24:1, 23:1, 22:1, 21:1, 20:1, 19:1, 18:1, 17:1, 16:1, 15:1, 14:1, 13:1, 12:1, 11:1, 10:1, 9:1, 8:1, 7:1, 6:1, 5:1, 4:1, 3:1, 2:1, 1:1, 0.9:1, 0.8:1, 0.7:1, 0.6:1, 0.5:1, 0.4:1, 0.3:1, 0.2:1, or 0.1:1. In some embodiments, the molar ratio of a nucleic acid encoding the guide polynucleotide and the nucleic acid encoding the base editor fusion protein is at least about 1:10000, 1:9500, 1:9000, 1:8500, 1:8000, 1:7500, 1:7000, 1:6500, 1:6000, 1:5500, 1:5000, 1:4500, 1:4000, 1:3500, 1:3000, 1:2500, 1:2000, 1:1500, 1:1000, 1:950, 1:900, 1:850, 1:800, 1:750, 1:700, 1:650, 1:600, 1:550, 1:500, 1:450, 1:400, 1:350, 1:300, 1:250, 1:200, 1:190, 1:180, 1:170, 1:160, 1:150, 1:140, 1:130, 1:120, 1:110, 1:100, 1:95, 1:90, 1:85, 1:80, 1:75, 1:70, 1:69, 1:68, 1:67, 1:66, 1:65, 1:64, 1:63, 1:62, 1:61, 1:60, 1:59, 1:58, 1:57, 1:56, 1:55, 1:54, 1:53, 1:52, 1:51, 1:50, 1:49, 1:48, 1:47, 1:46, 1:45, 1:44, 1:43, 1:42, 1:41, 1:40, 1:39, 1:38, 1:37, 1:36, 1:35, 1:34, 1:33, 1:32, 1:31, 1:30, 1:29, 1:28, 1:27, 1:26, 1:25, 1:24, 1:23, 1:22, 1:21, 1:20, 1:19, 1:18, 1:17, 1:16, 1:15, 1:14, 1:13, 1:12, 1:11, 1:10, 1:9, 1:8, 1:7, 1:6, 1:5, 1:4, 1:3, 1:2, 1:1, 1:0.9, 1:0.8, 1:0.7, 1:0.6, 1:0.5, 1:0.4, 1:0.3, 1:0.2, or 1:0.1. In some embodiments, the molar ratio of a nucleic acid encoding the guide polynucleotide and the nucleic acid encoding the base editor fusion protein is at most about 10000:1, 9500:1, 9000:1, 8500:1, 8000:1, 7500:1, 7000:1, 6500:1, 6000:1, 5500:1, 5000:1, 4500:1, 4000:1, 3500:1, 3000:1, 2500:1, 2000:1, 1500:1, 1000:1, 950:1, 900:1, 850:1, 800:1, 750:1, 700:1, 650:1, 600:1, 550:1, 500:1, 450:1, 400:1, 350:1, 300:1, 250:1, 200:1, 190:1, 180:1, 170:1, 160:1, 150:1, 140:1, 130:1, 120:1, 110:1, 100:1, 95:1, 90:1, 85:1, 80:1, 75:1, 70:1, 69:1, 68:1, 67:1, 66:1, 65:1, 64:1, 63:1, 62:1, 61:1, 60:1, 59:1, 58:1, 57:1, 56:1, 55:1, 54:1, 53:1, 52:1, 51:1, 50:1, 49:1, 48:1, 47:1, 46:1, 45:1, 44:1, 43:1, 42:1, 41:1, 40:1, 39:1, 38:1, 37:1, 36:1, 35:1, 34:1, 33:1, 32:1, 31:1, 30:1, 29:1, 28:1, 27:1, 26:1, 25:1, 24:1, 23:1, 22:1, 21:1, 20:1, 19:1, 18:1, 17:1, 16:1, 15:1, 14:1, 13:1, 12:1, 11:1, 10:1, 9:1, 8:1, 7:1, 6:1, 5:1, 4:1, 3:1, 2:1, 1:1, 0.9:1, 0.8:1, 0.7:1, 0.6:1, 0.5:1, 0.4:1, 0.3:1, 0.2:1, or 0.1:1. In some embodiments, the molar ratio of a nucleic acid encoding the guide polynucleotide and the nucleic acid encoding the base editor fusion protein is at most about 1:10000, 1:9500, 1:9000, 1:8500, 1:8000, 1:7500, 1:7000, 1:6500, 1:6000, 1:5500, 1:5000, 1:4500, 1:4000, 1:3500, 1:3000, 1:2500, 1:2000, 1:1500, 1:1000, 1:950, 1:900, 1:850, 1:800, 1:750, 1:700, 1:650, 1:600, 1:550, 1:500, 1:450, 1:400, 1:350, 1:300, 1:250, 1:200, 1:190, 1:180, 1:170, 1:160, 1:150, 1:140, 1:130, 1:120, 1:110, 1:100, 1:95, 1:90, 1:85, 1:80, 1:75, 1:70, 1:69, 1:68, 1:67, 1:66, 1:65, 1:64, 1:63, 1:62, 1:61, 1:60, 1:59, 1:58, 1:57, 1:56, 1:55, 1:54, 1:53, 1:52, 1:51, 1:50, 1:49, 1:48, 1:47, 1:46, 1:45, 1:44, 1:43, 1:42, 1:41, 1:40, 1:39, 1:38, 1:37, 1:36, 1:35, 1:34, 1:33, 1:32, 1:31, 1:30, 1:29, 1:28, 1:27, 1:26, 1:25, 1:24, 1:23, 1:22, 1:21, 1:20, 1:19, 1:18, 1:17, 1:16, 1:15, 1:14, 1:13, 1:12, 1:11, 1:10, 1:9, 1:8, 1:7, 1:6, 1:5, 1:4, 1:3, 1:2, 1:1, 1:0.9, 1:0.8, 1:0.7, 1:0.6, 1:0.5, 1:0.4, 1:0.3, 1:0.2, or 1:0.1.

[0174] Precision genome editing is a growing field with industrial, agricultural, and biomedical applications. One of the dominant genome-editing systems available today is clustered regularly interspaced short palindromic repeats (CRISPR)-CRISPR associated 9 (Cas9). Through the use of a guide RNA (gRNA) with a sequence homologous to that of a sequence of DNA in the target genome (known as the protospacer) adjacent to a specific protospacer-adjacent motif (PAM) comprising the sequence NGG (N is any standard base) in the DNA, Cas9 can be used to create a double-strand break (DSB) at the targeted sequence. Non-homologous end joining (NHEJ) at DSBs can be used to create indels and knock out genes at genetic loci; likewise, homology-directed repair (HDR) can be used, with an introduced template DNA, to insert genes or modify the targeted sequence. A variety of Cas9-based tools have been developed in recent years, including tools that methylate DNA, recognize broader sequence space, or create single-strand nicks. In 2016, Komor et al. described the use of CRISPR-Cas9 to convert a cytosine base to a thymine base without the introduction of a template DNA strand and without the need for DSBs (Komor A C, Kim Y B, Packer M S, et al. Programmable editing of a target base in genomic DNA without double-stranded DNA cleavage. Nature, 2016, 533: 420-4, incorporated herein by reference in its entirety). After the cytidine deaminase domain of rat APOBEC1 was fused to the N-terminus of catalytically-dead Cas9 (dCas9) using the linker XTEN (resulting in a fusion protein called base editor 1, or BE1), conversion of cytosine to uracil was observed between position 4 and position 8 within the 20-nt protospacer region of DNA (or, to express it a different way, 13 to 17 nucleotides upstream of the PAM). Of note, any cytosine base within this “window” was amenable to editing, resulting in varied outcomes depending on how many and which cytosines were edited. After DNA replication or repair, each uracil was replaced by a thymine, completing the C to T base editing.3 The next version of base editor (BE2) incorporated a uracil glycosylase inhibitor fused to the C-terminus of dCas9 to help inhibit base excision repair of the uracil bases resulting from the cytidine deaminase activity (which otherwise would act to restore the original cytosine bases); this improved the efficiency of C to T base editing. The final version, BE3, used a Cas9 nickase rather than dCas9; the nickase cut the unedited strand opposite the edited C to T bases, stimulating the removal of the opposing guanidine through eukaryotic mismatch repair. BE2 and BE3 base editing was observed in both human and murine cell lines. The specificity of base editing has been further improved through the addition of mutations to the Cas9 nickase; in similar fashion, Cas9 has been mutated to narrow the width of the editing window from approximately 5 nucleotides to as little as 1-2 nucleotides (Rees H A, Komor A C, Yeh W H, et al. Improving the DNA specificity and applicability of base editing through protein engineering and protein delivery. Nat Commun, 2017, 8: 15790, Kim Y B, Komor A C, Levy J M, et al. Increasing the genome-targeting scope and precision of base editing with engineered Cas9-cytidine deaminase fusions. Nat Biotechnol, 2017, 35: 371-6, each of which is incorporated herein by reference in its entirety).

[0175] An alternative cytosine base editing platform is by linking the activation-induced cytosine deaminase domain PmCDA1 to dCas9 (Target-AID), they were able to demonstrate targeted C to T base editing in yeast. Furthermore, an alternative C to T editing strategy was also demonstrated without fusing a deaminase domain to Cas9; instead, a SH3 (Src 3 homology) domain was added to the C-terminus of dCas9 while a SHL (SH3 interaction ligand) was added to PmCDA1.6 Optimization of efficiency was achieved through the use of a Cas9 nickase rather than dCas9. Further, an uracil DNA glycosylase inhibitor was added to enhance base editing in the mammalian CHO cell line. The resulting platform was able to consistently edit bases within 3 to 5 bases of the 18th nucleotide upstream of the PAM sequence (Nishida K, Arazoe T, Yachie N, et al. Targeted nucleotide editing using hybrid prokaryotic and vertebrate adaptive immune systems. Science, 2016, 353: aaf8729, incorporated herein by reference in its entirety).

[0176] A distinct cytosine base editing platform used Cpf1 (also known as Cas12a) instead of Cas9 as the RNA-guided endonuclease. Catalytically-inactive Cpf1 was fused to APOBEC1 (dLbCpf1-BE0), leading to C to T conversion in a human cell line. While the Cas9 base editor variants BE3 and Target-AID recognize the PAM sequence NGG, dLbCpf1-BE0 recognizes the T-rich PAM sequence TTTV. Although base editing was observed between positions 8 and 13 of the protospacer sequence with dLbCpf1-BE0, the introduction of additional mutations into Cpf1 was able to reduce the window to positions 10 to 12. However, narrowing of the base editing window correlated with a decrease in editing efficiency (Li X, Wang Y, Liu Y, et al. Base editing with a Cpf1-cytidine deaminase fusion. Nat Biotechnol, 2018, 36: 324-7, incorporated herein by reference in its entirety).

[0177] Cytosine base editing is not wholly predictable; indels can occur at the target site, albeit at lower frequencies that those observed for C to T editing editors. Furthermore, cytosine base editors can occasionally cause C to A or C to G edits rather than the expected C to T edits. Adding linker lengths between Cas9 nickase and the rat APOBEC1 cytosine deaminase domain from 16 amino acids to 32 amino acids, the linker between the Cas9 nickase and the uracil glycosylase inhibitor from 4 amino acids to 9 amino acids, and using a second uracil glycosylase inhibitor was appended to the C-terminus of the new cytosine base editor using another 9 amino acid linker improved cytosine base editor termed “BE4” (Komor A C, Zhao K T, Packer M S, et al. Improved base excision repair inhibition and bacteriophage Mu Gam protein yields C:G-to-T:A base editors with higher efficiency and product purity. Sci Adv, 2017, 3: eaao4774. Incorporated herein by reference in its entirety).

[0178] By fusing Escherichia coli adenine tTNA deaminase TadA (ecTadA) to dCas9 and mutagenesis of the ecTadA domain in conjunction with selection for editing activity revealed that A106V and D108N mutations yielded a base editor capable of editing adenine to guanine in DNA, termed ABE7.10 (Gaudelli N M, Komor A C, Rees H A, et al. Programmable base editing of A•T to G•C in genomic DNA without DNA cleavage. Nature, 2017, 551: 464-71. Incorporated herein by reference in its entirety). Koblan et al. improved the efficiency of ABE7.10 through modification of nuclear localization signals and codon optimization, yielding a version called ABEmax; a similar approach improved the efficiency of the cytosine base editor BE4.10 Huang et al. performed further development of both adenine and cytosine base editors to use alternative PAMs and to expand their editing windows, thereby increasing their targeting range (Improving cytidine and adenine base editors by expression optimization and ancestral reconstruction. Nat Biotechnol, 2018, 36: 843-6, Incorporated herein by reference in its entirety).

[0179] The same has proven to be true of base editors, 12-14 although comparisons of Cas9, cytosine base editors, and adenine base editors using the same gRNAs have shown distinct off-target profiles.

[0180] A variety of studies have raised concern about gRNA-independent off-target base editing, caused by the deaminase domain acting in isolation (without the need for engagement of DNA by the Cas9-gRNA complex). Additional studies showed that the gRNA-independent off-target effects of base editors are not limited to DNA. RNA sequencing of cells treated with either cytosine base editors or adenine base editors revealed transcriptome-wide off-target editing of RNA, and that introduction of amino acid substitution in the deaminase domain of adenine base (e.g. R106W) editors reduced off-target editing of RNA without substantially reducing on-target DNA base-editing efficiency. Zuo E, Sun Y, Wei W, et al. Cytosine base editor generates substantial off-target single-nucleotide variants in mouse embryos. Science, 2019, 364: 289-92; Jin S, Zong Y, Gao Q, et al. Cytosine, but not adenine, base editors induce genome-wide off-target mutations in rice. Science, 2019, 364: 292-5; Grunewald J, Zhou R, Garcia S P, et al. Transcriptome-wide off-target RNA editing induced by CRISPR-guided DNA base editors. Nature, 2019, 569: 433-7; Grünewald J, Zhou R, Iyer S, et al. CRISPR DNA base editors with reduced RNA off-target and self-editing activities. Nat Biotechnol, 2019, 37: 1041-8; Zhou C, Sun Y, Yan R, et al. Off-target RNA mutation induced by DNA base editing and its elimination by mutagenesis. Nature, 2019, 571: 275-8; Rees H A, Wilson C, Doman J L, et al. Analysis and minimization of cellular RNA editing by DNA adenine base editors. Sci Adv, 2019, 5: eaax5717, each of which is incorporated herein by reference in its entirety).

[0181] Correction of disease-causing mutations via precision editing with standard Cas9 genome editing has largely required HDR. Since HDR is limited to cells in S or G2 phase of mitosis, precision editing of non-mitotic cells is difficult. However, base editors are not reliant on HDR; the editing of postmitotic cochlear cells in mice is feasible with cytosine base editor BE3. By injecting BE3 and a gRNA in the form of a preassembled ribonucleoprotein via cationic liposomes, serine-33 in beta-catenin was edited to phenylalanine (TCT codon edited to TTT), allowing for the transdifferentiation of supporting cells into hair cells. Base editing of cochlear tissue was confirmed via sequencing, showing an editing rate between 0.7% and 3.0% depending on the region of the cochlea. In contrast, standard Cas9 editing via HDR showed negligible signs of efficacy in cochlear cells. A variant of SaBE3, delivered into the liver via adeno-associated viral (AAV) vectors, was reported to directly correct a pathogenic T to C mutation in the Pah gene with an editing rate as high as 29% and thereby treat the disease phenylketonuria in adult mice. Adenine base editing has also been demonstrated to generate mutations in mice. Yeh W H, Chiang H, Rees H A, et al. In vivo base editing of post-mitotic sensory cells. Nat Commun, 2018, 9: 2184; Villiger L, Grisch-Chan H M, Lindsay H, et al. Treatment of a metabolic liver disease by in vivo genome base editing in adult mice. Nat Med, 2018, 24: 1519-25; Ryu S M, Koo T, Kim K, et al. Adenine base editing in mouse embryos and an adult mouse model of Duchenne muscular dystrophy. Nat Biotechnol, 2018, 36: 536-9; Song C Q, Jiang T, Richter M, et al. Adenine base editing in an adult mouse model of tyrosinaemia. Nat Biomed Eng, 2020, 4: 125-30; Pisciotta L, Favari E, Magnolo L, et al. Characterization of three kindreds with familial combined hypolipidemia caused by loss-of-function mutations of ANGPTL3. Circ Cardiovasc Genet, 2012, 5: 42-50. each of which is incorporated herein by reference in its entirety.

[0182] Provided herein are compositions of nucleobase editor systems that comprises nucleobase editor proteins, complexes, or compounds that is capable of making a modification or conversion to a nucleobase (e.g., A, T, C, G, or U) within a target nucleotide sequence.

[0183] A nucleobase editor or a base editor (BE) refers to an agent comprising a polypeptide that is capable of making a modification to a base (e.g., A, T, C, G, or U) within a nucleic acid sequence (e.g., DNA or RNA). In some embodiments, the base editor is capable of deaminating a base within a nucleic acid. In some embodiments, the base editor is capable of deaminating a base within a DNA molecule. In some embodiments, the base editor is capable of deaminating an adenine (A) in DNA.

[0184] In some embodiments, the base editor comprises a fusion protein comprising a programmable DNA binding protein fused to an adenosine deaminase. In some embodiments, the base editor comprises a fusion protein comprising a Cas9 protein and an adenosine deaminase. In some embodiments, the base editor is a Cas9 nickase (nCas9) fused to an adenosine deaminase. In some embodiments, the base editor is a nuclease-inactive Cas9 (dCas9) fused to an adenosine deaminase. In some embodiments, the base editor comprises a fusion protein comprising a programmable DNA binding protein fused to an cytidine deaminase. In some embodiments, the base editor comprises a fusion protein comprising a Cas9 protein and an cytidine deaminase. In some embodiments, the base editor is a Cas9 nickase (nCas9) fused to an cytidine deaminase. In some embodiments, the base editor is a nuclease-inactive Cas9 (dCas9) fused to an cytidine deaminase. In some embodiments, the base editor further comprises, an inhibitor of base excision repair, for example, a UGI domain. In some embodiments, the fusion protein comprises a Cas9 nickase fused to a deaminase and an inhibitor of base excision repair, such as a UGI or dISN domain. In some embodiments, the dCas9 domain of the fusion protein comprises a D10A and a H840A mutation as numbered in the wild type SpCas9 amino acid sequence. In some embodiments, the UGI comprises the following amino acid sequence:

>splP14739IUNGI_BPPB2 Uracil-DNA glycosylase
inhibitor
(SEQ ID NO: 16)
MTNLSDIIEKETGKQLVIQESILMLPEEVEEVIGNKPESDILVH
TAYDESTDENVMLLTS D APE YKPW ALVIQDS NGENKIKML

[0185] In some embodiments, a base editor system provided herein comprises a base editor fusion protein. For example, a base editor fusion protein may comprise a programmable DNA binding protein and a deaminase, e.g. an adenosine deaminase. In some embodiments, any of the fusion proteins provided herein are base editors. In some embodiments, the programmable DNA binding protein is a Cas9 domain, a Cpf1 domain, a CasX domain, a CasY domain, a Cas12b domain, a C2c2 domain, aC2c3 domain, or an Argonaute domain. In some embodiments, the programmable DNA binding protein is a Cas9 domain. The Cas9 domain may be any of the Cas9 domains or Cas9 proteins (e.g., nuclease inactive Cas9 or Cas9 nickase, or a Cas9 variant from any species) provided herein. In some embodiments, any of the Cas9 domains or Cas9 proteins provided herein may be fused with any of the deaminases provided herein. In some embodiments, the base editor comprises a deaminase, e.g., an adenosine deaminase and a programmable DNA binding protein, e.g., a Cas9 domain joined via a linker. In some embodiments, the base editor comprises a fusion protein comprising a deaminase, e.g., an adenosine deaminase and a programmable DNA binding protein, e.g., a Cas9 domain joined via a linker. In some embodiments, the linker is a peptide linker. In some embodiments, a linker is present between the deaminase domain and the Cas9 domain. In some embodiments, an deaminase and a programmable DNA binding domain are fused via any of the peptide linkers provided herein. For example, an adenosine deaminase and a Cas9 domain may be fused via a linker that comprises between 1 and 200 amino acids. In some embodiments, the adenosine deaminase and the programmable DNA binding protein are fused via a linker that comprises from 1 to 5, 1 to 10, 1 to 20, 1 to 30, 1 to 40, 1 to 50, 1 to 60, 1 to 80, 1 to 100, 1 to 150, 1 to 200, 5 to 10, 5 to 20, 5 to 30, 5 to 40, 5 to 60, 5 to 80, 5 to 100, 5 to 150, 5 to 200, 10 to 20, 10 to 30, 10 to 40, 10 to 50, 10 to 60, 10 to 80, 10 to 100, 10 to 150, 10 to 200, 20 to 30, 20 to 40, 20 to 50, 20 to 60, 20 to 80, 20 to 100, 20 to 150, 20 to 200, 30 to 40, 30 to 50, 30 to 60, 30 to 80, 30 to 100, 30 to 150, 30 to 200, 40 to 50, 40 to 60, 40 to 80, 40 to 100, 40 to 150, 40 to 200, 50 to 60 50 to 80, 50 to 100, 50 to 150, 50 to 200, 60 to 80, 60 to 100, 60 to 150, 60 to 200, 80 to 100, 80 to 150, 80 to 200, 100 to 150, 100 to 200, or 150 to 200 amino acids in length. In some embodiments, the adenosine deaminase and the programmable DNA binding protein are fused via a linker that comprises 4, 16, 32, or 104 amino acids in length. In some embodiments, the adenosine deaminase and the programmable DNA binding protein are fused via a linker that comprises the amino acid sequence of SGSETPGTSESATPES (SEQ ID NO: 17), SGGS (SEQ ID NO: 18), SGGSSGSETPGTSESATPESSGGS (SEQ ID NO: 19), SGGSSGGSSGSETPGTSESATPESSGGSSGGS (SEQ ID NO: 20), or GGSGGSPGSPAGSPTSTEEGTSESATPESGPGTSTEPSEGSAPGSPAGSPTSTEEGTSTE PSEGSAPGTSTEPSEGSAPGTSESATPESGPGSEPATSGGSGGS (SEQ ID NO: 21). In some embodiments, the adenosine deaminase and the programmable DNA binding protein are fused via a linker comprising the amino acid sequence SGSETPGTSESATPES (SEQ ID NO: 17), which may also be referred to as the XTEN linker. In some embodiments, the linker is 24 amino acids in length. In some embodiments, the linker comprises the amino acid sequence SGGSSGGSSGSETPGTSESATPES (SEQ ID NO: 23). In some embodiments, the linker is 40 amino acids in length. In some embodiments, the linker comprises the amino acid sequence SGGSSGGSSGSETPGTSESATPESSGGSSGGSSGGSSGGS (SEQ ID NO: 24). In some embodiments, the linker is 64 amino acids in length. In some embodiments, the linker comprises the amino acid sequence SGGSSGGSSGSETPGTSESATPESSGGSSGGSSGGSSGGSSGSETPGTSESATPESSGGS SGGS (SEQ ID NO: 25). In some embodiments, the linker is 92 amino acids in length. In some embodiments, the linker comprises the amino acid sequence

(SEQ ID NO: 26)
PGSPAGSPTSTEEGTSESATPESGPGTSTEPSEGSAPGSPAGSPTSTEEG
TSTEPSEGSAPGTSTEPSEGSAPGTSESATPESGPGSEPATS.

[0186] In some embodiments, a base editor system provided herein comprises a base editor comprising a fusion protein comprising an inhibitor of base repair. In some embodiments, a base editor comprises a fusion protein comprising a cytidine deaminase and a programmable DNA binding domain, e.g. a Cas9 domain. In some embodiments, a base editor comprises a fusion protein comprising an adenosine deaminase and a programmable DNA binding domain, e.g. a Cas9 domain. In some embodiments, the base editor or the fusion protein further comprises an inhibitor of base repair (IBR). In some embodiments, the IBR comprises an inhibitor of inosine base repair. In some embodiments, the IBR is an inhibitor of inosine base excision repair. In some embodiments, the inhibitor of inosine base excision repair is a catalytically inactive inosine specific nuclease (dISN). In some embodiments, a dISN may inhibit (e.g., by steric hindrance) inosine removing enzymes from excising the inosine residue from DNA. For example, catalytically dead inosine glycosylases (e.g., alkyl adenine glycosylase [AAG]) will bind inosine but will not create an abasic site or remove the inosine, thereby sterically blocking the newly-formed inosine moiety from potential DNA damage/repair mechanisms. Thus, this disclosure contemplates a fusion protein comprising a programmable DNA binding protein and an adenosine deaminase further fused to a dISN. This disclosure contemplates a fusion protein comprising any Cas9 domain, for example, a Cas9 nickase (nCas9) domain, a catalytically inactive Cas9 (dCas9) domain, a high fidelity Cas9 domain, or a Cas9 domain with reduced PAM exclusivity. It should be understood that the use of a dISN may increase the editing efficiency of a adenosine deaminase that is capable of catalyzing a A to I change. For example, fusion proteins comprising a dISN domain may be more efficient in deaminating A residues.

[0187] In some embodiments, the base editors provided herein comprise fusion proteins that further comprise one or more nuclear targeting sequences, for example, a nuclear localization sequence (NLS). In some embodiments, the fusion protein comprises multiple NLSs. In some embodiments, the fusion protein comprises a NLS at the N-terminus and the C-terminus of the fusion protein. In some embodiments, a NLS comprises an amino acid sequence that facilitates the importation of a protein, that comprises an NLS, into the cell nucleus. In some embodiments, the NLS is fused to the N-terminus of the fusion protein. In some embodiments, the NLS is fused to the C-terminus of the fusion protein. In some embodiments, the NLS is fused to the N-terminus of the programmable DNA binding protein, e.g. the Cas9. In some embodiments, the NLS is fused to the C-terminus of the programmable DNA binding protein. In some embodiments, the NLS is fused to the N-terminus of the adenosine deaminase. In some embodiments, the NLS is fused to the C-terminus of the adenosine deaminase. In some embodiments, the NLS is fused to the fusion protein via one or more linkers. In some embodiments, the NLS is fused to the fusion protein without a linker. In some embodiments, the NLS comprises an amino acid sequence of any one of the NLS sequences provided or referenced herein. In some embodiments, a NLS comprises the amino acid sequence PKKKRKV (SEQ ID NO: 27) or MDSLLMNRRKFLYQFKNVRWAKGRRETYLC (SEQ ID NO: 28). Additional nuclear localization sequences are known in the art and would be apparent to the skilled artisan. For example, NLS sequences are described in Plank et ah, PCT/EP2000/011690, the contents of which are incorporated herein by reference for their disclosure of exemplary nuclear localization sequences.

[0188] In some embodiments, the fusion proteins provided herein do not comprise a linker. In some embodiments, a linker is present between one or more of the domains or proteins (e.g., adenosine deaminase, napDNAbp, NLS, and/or IBR). In some embodiments, the “-” used in the general architecture above indicates the presence of an optional linker.

[0189] Some aspects of the disclosure provide base editors or fusion proteins that comprise a programmable DNA binding protein and at least two adenosine deaminase domains. Without wishing to be bound by any particular theory, dimerization of adenosine deaminases (e.g., in cis or in trans) may improve the ability (e.g., efficiency) of the fusion protein to modify a nucleic acid base, for example to deaminate adenine. In some embodiments, any of the fusion proteins may comprise 2, 3, 4 or 5 adenosine deaminase domains. In some embodiments, any of the fusion proteins provided herein comprise two adenosine deaminases. In some embodiments, any of the fusion proteins provided herein contain only two adenosine deaminases. In some embodiments, the adenosine deaminases are the same. In some embodiments, the adenosine deaminases are any of the adenosine deaminases provided herein. In some embodiments, the adenosine deaminases are different. In some embodiments, the first adenosine deaminase is any of the adenosine deaminases provided herein, and the second adenosine is any of the adenosine deaminases provided herein, but is not identical to the first adenosine deaminase. In some embodiments, the first adenosine deaminase comprises any one of the mutations provided herein as numbered in SEQ ID NO: 1. In some embodiments, the second adenosine deaminase comprises any one of the mutations provided herein as numbered in SEQ ID NO: 1. In some embodiments, the first adenosine deaminase comprises any one of the mutations provided herein as numbered in SEQ ID NO: 1, and the second adenosine deaminase comprises a wild type adenosine deaminase sequence. In some embodiments, the second adenosine deaminase comprises any one of the mutations provided herein as numbered in SEQ ID NO: 1, and the first adenosine deaminase comprises a wild type adenosine deaminase sequence. As one example, the fusion protein may comprise a first adenosine deaminase and a second adenosine deaminase that both comprise a A106V, D108N, D147Y, and E155V mutation from ecTadA (SEQ ID NO: 1). As another example, the fusion protein may comprise a first adenosine deaminase domain that comprises a A106V, D108N, D147Y, and E155V mutation from ecTadA (SEQ ID NO: 1), and a second adenosine deaminase that comprises a L84F, A106V, D108N, H123Y, D147Y, E155V, and 1156F mutation from ecTadA (SEQ ID NO: 1).

[0190] In some embodiments, the adenosine deaminase comprises the amino acid sequence:

(SEQ ID NO: 1)
MSEVEFSHEYWMRHALTLAKRAWDEREVPVGAVLVHNNRVIGEGWNRPIG
RHDPTAHAEIMALRQGGLVMQNYRLIDATLYVTLEPCVMCAGAMIHSRIG
RVVFGARDAKTGAAGSLMDVLHHPGMNHRVEITEGILADECAALLSDFFR
MRRQEIKAQKKAQSSTD

[0191] In some embodiments, the fusion protein comprises two adenosine deaminases (e.g., a first adenosine deaminase and a second adenosine deaminase). In some embodiments, the first adenosine deaminase is N-terminal to the second adenosine deaminase in the fusion protein. In some embodiments, the first adenosine deaminase is C-terminal to the second adenosine deaminase in the fusion protein. In some embodiments, the first adenosine deaminase and the second deaminase are fused directly or via a linker. In some embodiments, the linker is any of the linkers provided herein, for example, any of the linkers described in the “Linkers” section. In some embodiments, the first adenosine deaminase is the same as the second adenosine deaminase. In some embodiments, the first adenosine deaminase and the second adenosine deaminase are any of the adenosine deaminases described herein. In some embodiments, the first adenosine deaminase and the second adenosine deaminase are different. In some embodiments, the first adenosine deaminase is any of the adenosine deaminases provided herein. In some embodiments, the second adenosine deaminase is any of the adenosine deaminases provided herein but is not identical to the first adenosine deaminase. In some embodiments, the first adenosine deaminase is an ecTadA adenosine deaminase. In some embodiments, the first adenosine deaminase comprises an amino acid sequence that is at least 60%, at least 65%, at least 70%, at least 75%, at least 80%, at least 85%, at least 90%, at least 95%, at least 96%, at least 97%, at least 98%, at least 99%, or at least 99.5% identical to the amino acid sequence set forth SEQ ID NO: 1 or to any of the adenosine deaminases provided herein. In some embodiments, the second adenosine deaminase comprises an amino acid sequence that is at least 60%, at least 65%, at least 70%, at least 75%, at least 80%, at least 85%, at least 90%, at least 95%, at least 96%, at least 97%, at least 98%, at least 99%, or at least 99.5% identical to the amino acid sequence set forth SEQ ID NO: 1 or to any of the adenosine deaminases provided herein. In some embodiments, the second adenosine deaminase comprises the amino acid sequence of SEQ ID NO: 1.

[0192] In some embodiments, the fusion proteins provided herein do not comprise a linker. In some embodiments, a linker is present between one or more of the domains or proteins (e.g., first adenosine deaminase, second adenosine deaminase, programmable DNA binding protein, and/or NLS).

[0193] It should be appreciated that the fusion proteins of the present disclosure may comprise one or more additional features. For example, in some embodiments, the fusion protein may comprise cytoplasmic localization sequences, export sequences, such as nuclear export sequences, or other localization sequences, as well as sequence tags that are useful for solubilization, purification, or detection of the fusion proteins. Suitable protein tags provided herein include, but are not limited to, biotin carboxylase carrier protein (BCCP) tags, myc-tags, calmodulin-tags, FLAG-tags, hemagglutinin (HA)-tags, polyhistidine tags, also referred to as histidine tags or His-tags, maltose binding protein (MBP)-tags, nus-tags, glutathione-S-transferase (GST)-tags, green fluorescent protein (GFP)-tags, thioredoxin-tags, S-tags, Softags (e.g., Softag 1, Softag 3), strep-tags, biotin ligase tags, FlAsH tags, V5 tags, and SBP-tags. Additional suitable sequences will be apparent to those of skill in the art. In some embodiments, the fusion protein comprises one or more His tags.

[0194] In some embodiments, the fusion protein comprises an amino acid sequence that is at least 60%, at least 65%, at least 70%, at least 75%, at least 80%, at least 85%, at least 90%, at least 95%, at least 96%, at least 97%, at least 98%, at least 99%, at least 99.5%, at least 99.7%, or at least 99.9% identical to any one of the amino acid sequences listed in Table 23. In some embodiments, the fusion protein comprises any one of the amino acid sequences listed in Table 23. In some embodiments, the sequence of the fusion protein is any one of the amino acid sequences listed in Table 23. In some embodiments, the fusion protein comprises an amino acid sequence that is at least 60%, at least 65%, at least 70%, at least 75%, at least 80%, at least 85%, at least 90%, at least 95%, at least 96%, at least 97%, at least 98%, at least 99%, at least 99.5%, at least 99.7%, or at least 99.9% identical to any one of the amino acid sequences of SEQ ID NOs: 2137, 2149, 2154, 2158, 2188, 2140, 40, 2146, 2152, 2156, and 2160. In some embodiments, the fusion protein comprises any one of the amino acid sequences of SEQ ID NOs: 2137, 2149, 2154, 2158, 2188, 2140, 40, 2146, 2152, 2156, and 2160. In some embodiments, the sequence of the fusion protein is any one of the amino acid sequences of SEQ ID NOs: 2137, 2149, 2154, 2158, and 2188.

[0195] In some embodiments, the fusion protein is encoded by the polynucleotide sequence that is at least 60%, at least 65%, at least 70%, at least 75%, at least 80%, at least 85%, at least 90%, at least 95%, at least 96%, at least 97%, at least 98%, at least 99%, at least 99.5%, at least 99.7%, or at least 99.9% identical to any one of the polynucleotide sequences listed in Table 23. In some embodiments, the fusion protein is encoded by any one of the polynucleotide sequences listed in Table 23. In some embodiments, the fusion protein is expressed by the polynucleotide sequence that is at least 60%, at least 65%, at least 70%, at least 75%, at least 80%, at least 85%, at least 90%, at least 95%, at least 96%, at least 97%, at least 98%, at least 99%, at least 99.5%, at least 99.7%, or at least 99.9% identical to any one of the polynucleotide sequences listed in Table 23. In some embodiments, the fusion protein is expressed by any one of the polynucleotide sequences listed in Table 23. In some embodiments, the fusion protein is encoded by the polynucleotide sequence that comprises at least 60%, at least 65%, at least 70%, at least 75%, at least 80%, at least 85%, at least 90%, at least 95%, at least 96%, at least 97%, at least 98%, at least 99%, at least 99.5%, at least 99.7%, or at least 99.9% identical to any one of the polynucleotide sequences of SEQ ID NOs: 2192, 2148, 2153, 2157, 2161, 2168, 2174, 2180, 2186, 2189, 2139, 2142, 2145, 2151, 2155, 2159, 2162, 2164, 2167, 2169, 2171, 2173, 2175, 2177, 2179, 2181, 2183, 2185, 2187, and 2190. In some embodiments, the fusion protein is encoded by the polynucleotide sequence that comprises any one of the polynucleotide sequences of SEQ ID NOs: 2192, 2148, 2153, 2157, 2161, 2168, 2174, 2180, 2186, 2189, 2139, 2142, 2145, 2151, 2155, 2159, 2162, 2164, 2167, 2169, 2171, 2173, 2175, 2177, 2179, 2181, 2183, 2185, 2187, and 2190. In some embodiments, the fusion protein is encoded by any one of the polynucleotide sequences of SEQ ID NOs: 2192, 2148, 2153, 2157, 2161, 2168, 2174, 2180, 2186, and 2189. In some embodiments, the fusion protein is expressed by the polynucleotide sequence that comprises at least 60%, at least 65%, at least 70%, at least 75%, at least 80%, at least 85%, at least 90%, at least 95%, at least 96%, at least 97%, at least 98%, at least 99%, at least 99.5%, at least 99.7%, or at least 99.9% identical to any one of the polynucleotide sequences of SEQ ID NOs: 2192, 2148, 2153, 2157, 2161, 2168, 2174, 2180, 2186, 2189, 2139, 2142, 2145, 2151, 2155, 2159, 2162, 2164, 2167, 2169, 2171, 2173, 2175, 2177, 2179, 2181, 2183, 2185, 2187, 2190, 2138, 2147, 2158, or a combination thereof: In some embodiments, the fusion protein is encoded by the polynucleotide sequence that comprises any one of the polynucleotide sequences of SEQ ID NOs: 2192, 2148, 2153, 2157, 2161, 2168, 2174, 2180, 2186, 2189, 2139, 2142, 2145, 2151, 2155, 2159, 2162, 2164, 2167, 2169, 2171, 2173, 2175, 2177, 2179, 2181, 2183, 2185, 2187, 2190, 2138, 2147, 2158, or a combination thereof. In some embodiments, the fusion protein is expressed by any one of the polynucleotide sequences of SEQ ID NOs: 2192, 2148, 2153, 2157, 2161, 2168, 2174, 2180, 2186, and 2189. In some embodiments, the polynucleotide sequence further comprises at least 60%, at least 65%, at least 70%, at least 75%, at least 80%, at least 85%, at least 90%, at least 95%, at least 96%, at least 97%, at least 98%, at least 99%, at least 99.5%, at least 99.7%, or at least 99.9% identical to any one of the polynucleotide sequences of SEQ ID NOs: 2138, 2147, 2158, or a combination thereof. In some embodiments, the polynucleotide sequence further comprises any one of the polynucleotide sequences of SEQ ID NOs: 2138, 2147, 2158, or a combination thereof.

[0196] In some embodiments, the nucleobase editor ABE8.8 comprises a fusion protein comprising the sequence as provided below:

(SEQ ID NO: 3)
MSEVEFSHEYWMRHALTLAKRARDEREVPVGAVLVLNNRVIGEGWNRAIG
LHDPTAHAEIMALRQGGLVMQNYRLIDATLYVTFEPCVMCAGAMIHSRIG
RVVFGVRNAKTGAAGSLMDVLHHPGMNHRVEITEGILADECAALLCRFFR
MPRRVFNAQKKAQSSTDSGGSSGGSSGSETPGTSESATPESSGGSSGGSD
KKYSIGLAIGTNSVGWAVITDEYKVPSKKFKVLGNTDRHSIKKNLIGALL
FDSGETAEATRLKRTARRRYTRRKNRICYLQEIFSNEMAKVDDSFFHRLE
ESFLVEEDKKHERHPIFGNIVDEVAYHEKYPTIYHLRKKLVDSTDKADLR
LIYLALAHMIKFRGHFLIEGDLNPDNSDVDKLFIQLVQTYNQLFEENPIN
ASGVDAKAILSARLSKSRRLENLIAQLPGEKKNGLFGNLIALSLGLTPNF
KSNFDLAEDAKLQLSKDTYDDDLDNLLAQIGDQYADLFLAAKNLSDAILL
SDILRVNTEITKAPLSASMIKRYDEHHQDLTLLKALVRQQLPEKYKEIFF
DQSKNGYAGYIDGGASQEEFYKFIKPILEKMDGTEELLVKLNREDLLRKQ
RTFDNGSIPHQIHLGELHAILRRQEDFYPFLKDNREKIEKILTFRIPYYV
GPLARGNSRFAWMTRKSEETITPWNFEEVVDKGASAQSFIERMTNFDKNL
PNEKVLPKHSLLYEYFTVYNELTKVKYVTEGMRKPAFLSGEQKKAIVDLL
FKTNRKVTVKQLKEDYFKKIECFDSVEISGVEDRFNASLGTYHDLLKIIK
DKDFLDNEENEDILEDIVLTLTLFEDREMIEERLKTYAHLFDDKVMKQLK
RRRYTGWGRLSRKLINGIRDKQSGKTILDFLKSDGFANRNFMQLIHDDSL
TFKEDIQKAQVSGQGDSLHEHIANLAGSPAIKKGILQTVKVVDELVKVMG
RHKPENIVIEMARENQTTQKGQKNSRERMKRIEEGIKELGSQILKEHPVE
NTQLQNEKLYLYYLQNGRDMYVDQELDINRLSDYDVDHIVPQSFLKDDSI
DNKVLTRSDKNRGKSDNVPSEEVVKKMKNYWRQLLNAKLITQRKFDNLTK
AERGGLSELDKAGFIKRQLVETRQITKHVAQILDSRMNTKYDENDKLIRE
VKVITLKSKLVSDFRKDFQFYKVREINNYHHAHDAYLNAVVGTALIKKYP
KLESEFVYGDYKVYDVRKMIAKSEQEIGKATAKYFFYSNIMNFFKTEITL
ANGEIRKRPLIETNGETGEIVWDKGRDFATVRKVLSMPQVNIVKKTEVQT
GGFSKESILPKRNSDKLIARKKDWDPKKYGGFDSPTVAYSVLVVAKVEKG
KSKKLKSVKELLGITIMERSSFEKNPIDFLEAKGYKEVKKDLIIKLPKYS
LFELENGRKRMLASAGELQKGNELALPSKYVNFLYLASHYEKLKGSPEDN
EQKQLFVEQHKHYLDEIIEQISEFSKRVILADANLDKVLSAYNKHRDKPI
REQAENIIHLFTLTNLGAPAAFKYFDTTIDRKRYTSTKEVLDATLIHQSI
TGLYETRIDLSQLGGD

[0197] In some embodiments, the nucleobase editor comprises a fusion protein comprising a polypeptide encoded by the polynucleotide (herein also referenced as MA002) sequence as provided below:

(SEQ ID NO: 4)
ATGAGCGAGGTCGAGTTCTCTCACGAATATTGGATGAGACACGCTCTCAC
CCTGGCTAAGAGAGCCAGGGACGAAAGAGAGGTGCCAGTTGGCGCTGTCC
TGGTGTTGAACAATCGCGTCATCGGAGAAGGATGGAATCGCGCCATTGGC
CTGCACGATCCAACCGCACATGCCGAAATTATGGCTCTGCGGCAAGGCGG
CCTCGTGATGCAAAATTACAGACTGATCGATGCTACCCTCTACGTCACCT
TCGAGCCCTGTGTCATGTGTGCTGGGGCAATGATTCACTCCCGGATTGGC
CGCGTGGTGTTTGGAGTGCGGAATGCCAAGACTGGCGCCGCTGGATCTCT
GATGGACGTCCTGCACcatCCTGGGATGAACCACCGGGTCGAGATCACAG
AGGGAATTCTGGCTGACGAGTGCGCTGCCCTGCTGTGCaggTTCTTTAGA
ATGCCtAGAaggGTGTTCAACGCCCAGAAAAAAGCTCAGAGCAGCACCGA
TTCCGGCGGAAGCAGCGGAGGATCTTCTGGAAGCGAAACCCCAGGCACCA
GCGAGTCTGCCACACCAGAATCATCTGGCGGTAGCTCCGGCGGCAGCGAC
AAGAAGTATTCTATCGGACTGGCCATCGGCACCAACTCTGTTGGATGGGC
CGTGATCACCGACGAGTACAAGGTGCCCAGCAAGAAATTCAAGGTGCTGG
GCAACACCGACAGGCACAGCATCAAGAAGAACCTGATCGGCGCACTGCTG
TTCGACTCTGGCGAAACAGCCGAGGCCACCAGACTGAAGAGAACAGCCCG
CAGACGGTACACCAGAAGAAAGAACCGGATCTGCTACCTCCAAGAGATCT
TCAGCAACGAGATGGCCAAGGTGGACGACAGCTTCTTCCACAGACTGGAA
GAGTCCTTCCTGGTGGAAGAGGACAAGAAGCACGAGAGACACCCCATCTT
CGGCAACATCGTGGACGAGGTGGCCTACCACGAGAAGTACCCCACCATCT
ACCACCTGAGAAAGAAACTGGTGGACAGCACCGACAAGGCCGACCTGAGA
CTGATCTATCTGGCCCTGGCTCACATGATCAAGTTCCGGGGCCACTTCCT
GATCGAGGGCGACCTGAATCCTGACAACAGCGACGTGGACAAGCTGTTCA
TCCAGCTGGTGCAGACCTACAACCAGCTGTTCGAGGAAAACCCCATCAAC
GCCAGCGGAGTGGATGCCAAGGCCATCCTGTCTGCCAGACTGAGCAAGAG
CAGACGGCTGGAAAATCTGATCGCCCAGCTGCCTGGCGAGAAGAAGAATG
GCCTGTTCGGCAACCTGATTGCCCTGAGCCTGGGCCTGACACCTAACTTC
AAGAGCAACTTCGACCTGGCCGAGGACGCCAAACTGCAGCTGAGCAAGGA
CACCTACGACGACGACCTGGACAATCTGCTGGCCCAGATCGGCGATCAGT
ACGCCGACTTGTTTCTGGCCGCCAAGAATCTGAGCGACGCCATCCTGCTG
TCCGACATCCTGAGAGTGAACACCGAGATCACCAAGGCACCTCTGAGCGC
CTCTATGATCAAGAGATACGACGAGCACCACCAGGATCTGACCCTGCTGA
AGGCCCTCGTTAGACAGCAGCTGCCAGAGAAGTACAAAGAGATTTTCTTC
GACCAGAGCAAGAACGGCTACGCCGGCTACATTGATGGCGGAGCCAGCCA
AGAGGAATTCTACAAGTTCATCAAGCCCATCCTCGAGAAGATGGACGGCA
CCGAGGAACTGCTGGTCAAGCTGAACAGAGAGGACCTGCTGAGAAAGCAG
AGAACCTTCGACAACGGCAGCATCCCTCACCAGATCCACCTGGGAGAACT
GCACGCCATTCTGCGGAGACAAGAGGACTTTTACCCATTCCTGAAGGACA
ACCGGGAAAAGATCGAGAAAATCCTGACCTTCAGGATCCCCTACTACGTG
GGACCACTGGCCAGAGGCAATAGCAGATTCGCCTGGATGACCAGAAAGAG
CGAGGAAACCATCACTCCCTGGAACTTCGAGGAAGTGGTGGACAAGGGCG
CCAGCGCTCAGTCCTTCATCGAGCGGATGACCAACTTCGATAAGAACCTG
CCTAACGAGAAGGTGCTGCCCAAGCACAGCCTGCTGTACGAGTACTTCAC
CGTGTACAACGAGCTGACCAAAGTGAAATACGTGACCGAGGGAATGAGAA
AGCCCGCCTTTCTGAGCGGCGAGCAGAAAAAGGCCATCGTGGATCTGCTG
TTCAAGACCAACCGGAAAGTGACCGTGAAGCAGCTGAAAGAGGACTACTT
CAAGAAAATCGAGTGCTTCGACAGCGTCGAGATCTCCGGCGTGGAAGATC
GGTTCAATGCCAGCCTGGGCACATACCACGATCTGCTGAAAATTATCAAG
GACAAGGACTTCCTGGACAACGAAGAGAACGAGGACATCCTTGAGGACAT
CGTGCTGACACTGACCCTGTTTGAGGACAGAGAGATGATCGAGGAACGGC
TGAAAACATACGCCCACCTGTTCGACGACAAAGTGATGAAGCAACTGAAG
CGGCGGAGATACACCGGCTGGGGCAGACTGTCTCGGAAGCTGATCAACGG
CATCCGGGATAAGCAGTCCGGCAAGACCATCCTGGACTTTCTGAAGTCCG
ACGGCTTCGCCAACAGAAACTTCATGCAGCTGATTCACGACGACAGCCTC
ACCTTCAAAGAGGATATCCAGAAAGCCCAGGTGTCCGGCCAGGGCGATTC
TCTGCATGAGCACATTGCCAACCTGGCCGGCTCTCCCGCCATTAAGAAAG
GCATCCTGCAGACAGTGAAGGTGGTGGACGAGCTTGTGAAAGTGATGGGC
AGACACAAGCCCGAGAACATCGTGATCGAAATGGCCAGAGAGAACCAGAC
CACACAGAAGGGACAGAAGAACAGCCGCGAGAGAATGAAGCGGATCGAAG
AGGGCATCAAAGAGCTGGGCAGCCAGATCCTGAAAGAACACCCCGTGGAA
AACACCCAGCTGCAGAACGAGAAGCTGTACCTGTACTACCTGCAGAATGG
ACGGGATATGTACGTGGACCAAGAGCTGGACATCAACAGACTGTCCGACT
ACGATGTGGACCATATCGTGCCCCAGTCTTTTCTGAAGGACGACTCCATC
GACAACAAGGTCCTGACCAGATCCGACAAGAATCGGGGCAAGAGCGACAA
CGTGCCCTCCGAAGAGGTGGTCAAGAAGATGAAGAACTACTGGCGACAGC
TGCTGAACGCCAAGCTGATTACCCAGCGGAAGTTCGACAATCTGACCAAG
GCCGAAAGAGGCGGCCTGAGCGAACTGGATAAGGCCGGCTTCATCAAGAG
ACAGCTGGTGGAAACCCGGCAGATCACAAAGCACGTGGCACAGATTCTGG
ACTCTCGGATGAACACTAAGTACGACGAGAACGACAAACTGATCCGCGAA
GTGAAAGTCATCACCCTGAAGTCCAAGCTGGTGTCCGATTTCCGGAAGGA
TTTCCAGTTCTACAAAGTGCGCGAGATCAACAACTACCATCACGCCCACG
ACGCCTACCTGAATGCCGTTGTTGGAACAGCCCTGATCAAAAAGTACCCT
AAGCTGGAAAGCGAGTTCGTGTACGGCGACTACAAGGTGTACGACGTGCG
GAAGATGATCGCCAAGAGCGAGCAAGAGATTGGCAAGGCAACCGCCAAGT
ACTTCTTCTACAGCAACATCATGAACTTTTTCAAGACAGAGATCACCCTC
GCCAACGGCGAGATCAGAAAGCGGCCTCTGATCGAGACAAACGGCGAAAC
CGGCGAGATTGTGTGGGATAAGGGCAGAGACTTTGCCACAGTGCGGAAAG
TGCTGAGCATGCCCCAAGTGAATATCGTGAAGAAAACCGAGGTGCAGACA
GGCGGCTTCAGCAAAGAGTCTATCCTGCCTAAGCGGAACTCCGACAAGCT
GATCGCCAGAAAGAAGGACTGGGACCCCAAGAAGTACGGCGGCTTCGATT
CTCCTACCGTGGCCTATAGCGTGCTGGTGGTGGCCAAAGTGGAAAAGGGC
AAGTCCAAGAAACTCAAGAGCGTGAAAGAGCTGCTGGGGATCACCATCAT
GGAAAGAAGCAGCTTCGAGAAGAATCCGATCGATTTCCTCGAGGCCAAGG
GCTACAAAGAAGTGAAAAAGGACCTGATCATCAAGCTCCCCAAGTACTCC
CTGTTCGAGCTGGAAAACGGCCGGAAGAGAATGCTGGCCTCTGCTGGCGA
ACTGCAGAAGGGAAACGAACTGGCCCTGCCTAGCAAATATGTGAACTTCC
TGTACCTGGCCAGCCACTATGAGAAGCTGAAGGGCAGCCCCGAGGACAAT
GAGCAAAAGCAGCTGTTTGTGGAACAGCACAAGCACTACCTGGACGAGAT
CATCGAGCAGATCAGCGAGTTTAGCAAGAGAGTGATTCTGGCCGACGCCA
ATCTGGACAAAGTGCTGTCCGCCTACAACAAGCACCGGGACAAGCCTATC
AGAGAGCAGGCCGAGAATATCATCCACCTGTTTACCCTGACCAACCTGGG
AGCCCCTGCCGCCTTCAAGTACTTTGACACCACCATCGACCGGAAGCGGT
ACACCTCCACCAAAGAGGTGCTGGACGCCACTCTGATCCACCAGTCTATC
ACCGGCCTGTACGAGACACGGATCGACCTGTCTCAACTCGGAGGCGACGA
AGGCGCCGATAAGAGAACCGCCGATGGCTCTGAGTTCGAGAGCCCCAAGA
AAAAGCGCAAAGTG

[0198] In an aspect, a nucleobase editor system provided herein comprises a guide polynucleotide. In some embodiments, the guide polynucleotide binds and forms a complex with the base editor fusion protein. In some embodiments, the guide polynucleotide directs the base editor fusion protein to effect a modification at a target sequence. The guide polynucleotide may comprise a single nucleic acid sequence or two separate nucleic acid sequences. In some embodiments, the guide polynucleotide is a single guide, e.g. a single guide RNA. In some embodiments, the single guide RNA comprises a spacer sequence that is capable of hybridizing with a target sequence. In some embodiments, the single guide RNA comprises a tracrRNA sequence that binds the programmable DNA binding protein, e.g. the Cas9 protein of the base editor fusion protein. In some embodiments, the single guide RNA comprises a stem loop structure, a tracrRNA sequence, a crRNA sequence, a direct repeat, and/or an anti-repeat. In some embodiments, the single guide RNA comprises a chemical modification. In some embodiments, the guide polynucleotide is any one of the guide polynucleotides provided herein, as described in the “Guide polynucleotide” section.

### Deaminase Domains

[0199] Disclosed herein are base editor systems for editing, modifying or altering a target nucleotide sequence of a polynucleotide.

[0200] A base editor system provided herein may comprise a programmable DNA binding protein and a deaminase. As used herein, a deaminase may refer to an enzyme that catalyzes the removal of an amine group from a molecule, or deamination, for example through hydrolysis. In some embodiments, the deaminase is a cytidine deaminase, catalyzing the deamination of cytidine (C) to uridine (U), deoxycytidine (dC) to deoxyuridine (dU), or 5-methyl-cytidine to thymidine (T, 5-methyl-U), respectively. Subsequent DNA repair mechanisms ensure that a dU is replaced by T, as described in Komor et al, Nature, Programmable editing of a target base in genomic DNA without double-stranded DNA cleavage, 533, 420-424 (2016), which is incorporated herein by reference in its entirety. In some embodiments, the deaminase is a cytosine deaminase, catalyzing and promoting the conversion of cytosine to uracil (e.g., in RNA) or thymine (e.g., in DNA). In some embodiments, the deaminase is an adenosine deaminase, catalyzing and promoting the conversion of adenine to guanine. In some embodiments, the deaminase is a naturally-occurring deaminase from an organism, such as a human, chimpanzee, gorilla, monkey, cow, dog, rat, or mouse. In some embodiments, the deaminase is a variant of a naturally-occurring deaminase from an organism, and the variants do not occur in nature. For example, in some embodiments, the deaminase or deaminase domain is at least 50%, at least 55%, at least 60%, at least 65%, at least 70%, at least 75% at least 80%, at least 85%, at least 90%, at least 95%, at least 96%, at least 97%, at least 98%, at least 99%, or at least 99.5% identical to a naturally-occurring deaminase from an organism

[0201] A cytidine deaminase (or cytosine deaminase) comprises an enzyme that catalyzes the chemical reaction “cytosine+H20->uracil+NH3” or “5-methyl-cytosine+H20->thymine+NH3.” In the context of a gene, such nucleotide change, or mutation, may in turn lead to an amino acid change in the protein, which may affect the protein's function, e.g., loss-of-function or gain-of-function. Subsequent DNA repair mechanisms ensure that uracil bases in DNA are replaced by T, as described in Komor et al. (Nature, Programmable editing of a target base in genomic DNA without double-stranded DNA cleavage, 533, 420-424 (2016), which is incorporated herein by reference in its entirety).

[0202] One exemplary suitable class of cytosine deaminases is the apolipoprotein B mRNA-editing complex (APOBEC) family of cytosine deaminases encompassing eleven proteins that serve to initiate mutagenesis in a controlled and beneficial manner. The apolipoprotein B editing complex 3 (APOBEC3) enzyme provides protection to human cells against a certain HIV-1 strain via the deamination of cytosines in reverse-transcribed viral ssDNA. These cytosine deaminases all require a Zn-coordinating motif (His-X-Glu-X23_26-Pro-Cys-X2_4-Cys (SEQ ID NO: 29)) and bound water molecule for catalytic activity. The glutamic acid residue acts to activate the water molecule to a zinc hydroxide for nucleophilic attack in the deamination reaction. Each family member preferentially deaminates at its own particular “hotspot,” for example, WRC (W is A or T, R is A or G) for hAID, or TTC for hAPOBEC3F. A recent crystal structure of the catalytic domain of APOBEC3G revealed a secondary structure comprising a five-stranded R-sheet core flanked by six α-helices, which is believed to be conserved across the entire family. The active center loops have been shown to be responsible for both ssDNA binding and in determining “hotspot” identity. Overexpression of these enzymes has been linked to genomic instability and cancer, thus highlighting the importance of sequence-specific targeting. Another suitable cytosine deaminase is the activation-induced cytidine deaminase (AID), which is responsible for the maturation of antibodies by converting cytosines in ssDNA to uracils in a transcription-dependent, strand-biased fashion.

[0203] An adenosine deaminase (or adenine deaminase) comprises an enzyme that catalyzes the hydrolytic deamination of adenosine or deoxy adenosine to inosine or deoxyinosine, respectively. In some embodiments, the adenosine deaminase catalyzes the hydrolytic deamination of adenine or adenosine in deoxyribonucleic acid (DNA). The adenosine deaminases (e.g. engineered adenosine deaminases, evolved adenosine deaminases) provided herein may be from any organism, such as a bacterium. In some embodiments, the deaminase or deaminase domain is a variant of a naturally-occurring deaminase from an organism. In some embodiments, the deaminase or deaminase domain does not occur in nature. For example, in some embodiments, the deaminase or deaminase domain is at least 50%, at least 55%, at least 60%, at least 65%, at least 70%, at least 75% at least 80%, at least 85%, at least 90%, at least 95%, at least 96%, at least 97%, at least 98%, at least 99%, or at least 99.5% identical to a naturally-occurring deaminase. In some embodiments, the adenosine deaminase is from a bacterium, such as, E. coli, S. aureus, S. typhi, S. putrefaciens, H. influenzae, or C. crescentus. In some embodiments, the adenosine deaminase is a TadA deaminase. In some embodiments, the TadA deaminase is an E. coli TadA deaminase. In some embodiments, the TadA deaminase is a truncated E. coli TadA deaminase. For example, the truncated ecTadA may be missing one or more N-terminal amino acids relative to a full-length ecTadA. In some embodiments, the truncated ecTadA may be missing 1, 2, 3, 4, 5, 6, 7, 8, 9, 10, 11, 12, 13, 14, 15, 6, 17, 18, 19, or 20 N-terminal amino acid residues relative to the full length ecTadA. In some embodiments, the truncated ecTadA may be missing 1, 2, 3, 4, 5, 6, 7, 8, 9, 10, 11, 12, 13, 14, 15, 6, 17, 18, 19, or 20 C-terminal amino acid residues relative to the full length ecTadA. In some embodiments, the ecTadA deaminase does not comprise an N-terminal methionine.

[0204] In some embodiments, the adenosine deaminase comprises an amino acid sequence that is at least 60%, at least 65%, at least 70%, at least 75%, at least 80%, at least 85%, at least 90%, at least 95%, at least 96%, at least 97%, at least 98%, at least 99%, or at least 99.5% identical to the amino acid sequence set forth in SEQ ID NO:1 or to any of the adenosine deaminases provided herein. It should be appreciated that adenosine deaminases provided herein may include one or more mutations (e.g., any of the mutations provided herein). The disclosure provides any deaminase domains with a certain percent identity plus any of the mutations or combinations thereof described herein. In some embodiments, the adenosine deaminase comprises an amino acid sequence that has 1, 2, 3, 4, 5, 6, 7, 8, 9, 10, 11, 12, 13, 14, 15, 16, 17, 18, 19, 20, 21, 22, 21, 24, 25, 26, 27, 28, 29, 30, 31, 32, 33, 34, 35, 36, 37, 38, 39, 40, 41, 42, 43, 44, 45, 46, 47, 48, 49, 50, or more mutations compared to the amino acid sequence set forth in SEQ ID NO:1 or any of the adenosine deaminases provided herein. In some embodiments, the adenosine deaminase comprises an amino acid sequence that has at least 5, at least 10, at least 15, at least 20, at least 25, at least 30, at least 35, at least 40, at least 45, at least 50, at least 60, at least 70, at least 80, at least 90, at least 100, at least 110, at least 120, at least 130, at least 140, at least 150, at least 160, or at least 170 identical contiguous amino acid residues as compared to any one of the amino acid sequences set forth in SEQ ID NO:1 or any of the adenosine deaminases provided herein.

[0205] In some embodiments, the adenosine deaminase comprises a D108X mutation in ecTadA SEQ ID NO: 1, or a corresponding mutation in another adenosine deaminase, where X indicates any amino acid other than the corresponding amino acid in the wild-type adenosine deaminase. In some embodiments, the adenosine deaminase comprises a D108G, D108N, D108V, D108A, or D108Y mutation in SEQ ID NO: 1, or a corresponding mutation in another adenosine deaminase. It should be appreciated, however, that additional deaminases may similarly be aligned to identify homologous amino acid residues that can be mutated as provided herein.

[0206] In some embodiments, the adenosine deaminase comprises an A106X mutation in ecTadA SEQ ID NO: 1, or a corresponding mutation in another adenosine deaminase, where X indicates any amino acid other than the corresponding amino acid in the wild-type adenosine deaminase. In some embodiments, the adenosine deaminase comprises an A106V mutation in SEQ ID NO: 1, or a corresponding mutation in another adenosine deaminase.

[0207] In some embodiments, the adenosine deaminase comprises a E155X mutation in SEQ ID NO: 1, or a corresponding mutation in another adenosine deaminase, where the presence of X indicates any amino acid other than the corresponding amino acid in the wild-type adenosine deaminase. In some embodiments, the adenosine deaminase comprises a E155D, E155G, or E155V mutation in SEQ ID NO: 1, or a corresponding mutation in another adenosine deaminase.

[0208] In some embodiments, the adenosine deaminase comprises a D147X mutation in SEQ ID NO: 1, or a corresponding mutation in another adenosine deaminase, where the presence of X indicates any amino acid other than the corresponding amino acid in the wild-type adenosine deaminase. In some embodiments, the adenosine deaminase comprises a D147Y, mutation in SEQ ID NO: 1, or a corresponding mutation in another adenosine deaminase.

[0209] It should be appreciated that any of the mutations provided herein (e.g., based on the ecTadA amino acid sequence of SEQ ID NO: 1) may be introduced into other adenosine deaminases, such as S. aureus TadA (saTadA), or other adenosine deaminases (e.g., bacterial adenosine deaminases). It would be apparent to the skilled artisan how to are homologous to the mutated residues in ecTadA. Thus, any of the mutations identified in ecTadA may be made in other adenosine deaminases that have homologous amino acid residues. It should also be appreciated that any of the mutations provided herein may be made individually or in any combination in ecTadA or another adenosine deaminase. For example, an adenosine deaminase may contain a D108N, a A106V, a E155V, and/or a D147Y mutation in ecTadA SEQ ID NO: 1, or a corresponding mutation in another adenosine deaminase. In some embodiments, an adenosine deaminase comprises the following group of mutations (groups of mutations are separated by a “;”) in ecTadA SEQ ID NO: 1, or corresponding mutations in another adenosine deaminase: D108N and A106V; D108N and E155V; D108N and D147Y; A106V and E155V; A106V and D147Y; E155V and D147Y; D108N, A106V, and E55V; D108N, A106V, and D147Y; D108N, E55V, and D147Y; A106V, E55V, and D 147Y; and D108N, A106V, E55V, and D147Y. It should be appreciated, however, that any combination of corresponding mutations provided herein may be made in an adenosine deaminase (e.g., ecTadA)

[0210] In some embodiments, the adenosine deaminase comprises one or more of a H8X, T17X, L18X, W23X, L34X, W45X, R51X, A56X, E59X, E85X, M94X, I95X, V102X, F104X, A106X, R107X, D108X, K110X, M118X, N127X, A138X, F149X, M151X, R153X, Q154X, I156X, and/or K157X mutation in SEQ ID NO: 1, or one or more corresponding mutations in another adenosine deaminase, where the presence of X indicates any amino acid other than the corresponding amino acid in the wild-type adenosine deaminase. In some embodiments, the adenosine deaminase comprises one or more of H8Y, T17S, L18E, W23L, L34S, W45L, R51H, A56E, or A56S, E59G, E85K, or E85G, M94L, 1951, V102A, F104L, A106V, R107C, or R107H, or R107P, D108G, or D108N, or D108V, or D108A, or D108Y, K1101, M118K, N127S, A138V, F149Y, M151V, R153C, Q154L, 1156D, and/or K157R mutation in SEQ ID NO: 1, or one or more corresponding mutations in another adenosine deaminase. In some embodiments, the adenosine deaminase comprises one or more of the mutations corresponding to SEQ ID NO: 1, or one or more corresponding mutations in another adenosine deaminase. In some embodiments, the adenosine deaminase comprises the mutation or mutations of in any constructs shown in Table 23 corresponding to SEQ ID NO: 1, or a corresponding mutation or mutations in another adenosine deaminase. In some embodiments, the adenosine deaminase comprises one or more of a H8X, D108X, and/or N127X mutation in SEQ ID NO: 1, or one or more corresponding mutations in another adenosine deaminase, where X indicates the presence of any amino acid. In some embodiments, the adenosine deaminase comprises one or more of a H8Y, D108N, and/or N127S mutation in SEQ ID NO: 1, or one or more corresponding mutations in another adenosine deaminase.

[0211] In some embodiments, the adenosine deaminase comprises one or more of H8X, R26X, M61X, L68X, M70X, A106X, D108X, A109X, N127X, D147X, R152X, Q154X, E155X, K161X, Q163X, and/or T166X mutation in SEQ ID NO: 1, or one or more corresponding mutations in another adenosine deaminase, where X indicates the presence of any amino acid other than the corresponding amino acid in the wild-type adenosine deaminase. In some embodiments, the adenosine deaminase comprises one or more of H8Y, R26W, M61I, L68Q, M70V, A106T, D108N, A109T, N127S, D147Y, R152C, Q154H or Q154R, E155G or E155V or E155D, K161Q, Q163H, and/or T166P mutation in SEQ ID NO: 1, or one or more corresponding mutations in another adenosine deaminase.

[0212] In some embodiments, the adenosine deaminase comprises one, two, three, four, five, or six mutations selected from the group consisting of H8X, D108X, N127X, D147X, R152X, and Q154X in SEQ ID NO: 1, or a corresponding mutation or mutations in another adenosine deaminase, where X indicates the presence of any amino acid other than the corresponding amino acid in the wild-type adenosine deaminase. In some embodiments, the adenosine deaminase comprises one, two, three, four, five, six, seven, or eight mutations selected from the group consisting of H8X, M61X, M70X, D108X, N127X, Q154X, E155X, and Q163X in SEQ ID NO: 1, or a corresponding mutation or mutations in another adenosine deaminase, where X indicates the presence of any amino acid other than the corresponding amino acid in the wild-type adenosine deaminase. In some embodiments, the adenosine deaminase comprises one, two, three, four, or five mutations selected from the group consisting of H8X, D108X, N127X, E155X, and T166X in SEQ ID NO: 1, or a corresponding mutation or mutations in another adenosine deaminase, where X indicates the presence of any amino acid other than the corresponding amino acid in the wild-type adenosine deaminase. In some embodiments, the adenosine deaminase comprises one, two, three, four, five, or six mutations selected from the group consisting of H8X, A106X, D108X, mutation or mutations in another adenosine deaminase, where X indicates the presence of any amino acid other than the corresponding amino acid in the wild-type adenosine deaminase. In some embodiments, the adenosine deaminase comprises one, two, three, four, five, six, seven, or eight mutations selected from the group consisting of H8X, R126X, L68X, D108X, N127X, D147X, and E155X in SEQ ID NO: 1, or a corresponding mutation or mutations in another adenosine deaminase, where X indicates the presence of any amino acid other than the corresponding amino acid in the wild-type adenosine deaminase. In some embodiments, the adenosine deaminase comprises one, two, three, four, or five mutations selected from the group consisting of H8X, D108X, A109X, N127X, and E155X in SEQ ID NO: 1, or a corresponding mutation or mutations in another adenosine deaminase, where X indicates the presence of any amino acid other than the corresponding amino acid in the wild-type adenosine deaminase.

[0213] In some embodiments, the adenosine deaminase comprises one, two, three, four, five, or six mutations selected from the group consisting of H8Y, D108N, N127S, D147Y, R152C, and Q154H in SEQ ID NO: 1, or a corresponding mutation or mutations in another adenosine deaminase. In some embodiments, the adenosine deaminase comprises one, two, three, four, five, six, seven, or eight mutations selected from the group consisting of H8Y, M61I, M70V, D108N, N127S, Q154R, E155G and Q163H in SEQ ID NO: 1, or a corresponding mutation or mutations in another adenosine deaminase. In some embodiments, the adenosine deaminase comprises one, two, three, four, or five mutations selected from the group consisting of H8Y, D108N, N127S, E155V, and T166P in SEQ ID NO: 1, or a corresponding mutation or mutations in another adenosine deaminase. In some embodiments, the adenosine deaminase comprises one, two, three, four, five, or six mutations selected from the group consisting of H8Y, A106T, D108N, N127S, E155D, and K161Q in SEQ ID NO: 1, or a corresponding mutation or mutations in another adenosine deaminase. In some embodiments, the adenosine deaminase comprises one, two, three, four, five, six, seven, or eight mutations selected from the group consisting of H8Y, R126W, L68Q, D108N, N127S, D147Y, and E155V in SEQ ID NO: 1, or a corresponding mutation or mutations in another adenosine deaminase. In some embodiments, the adenosine deaminase comprises one, two, three, four, or five mutations selected from the group consisting of H8Y, D108N, A109T, N127S, and E155G in SEQ ID NO: 1, or a corresponding mutation or mutations in another adenosine deaminase.

[0214] In some embodiments, the adenosine deaminase comprises a D108N, D108G, or D108V mutation in SEQ ID NO: 1, or corresponding mutations in another adenosine deaminase. In some embodiments, the adenosine deaminase comprises a A106V and D108N mutation in SEQ ID NO: 1, or corresponding mutations in another adenosine deaminase. In some embodiments, the adenosine deaminase comprises R107C and D108N mutations in SEQ ID NO: 1, or corresponding mutations in another adenosine deaminase. In some embodiments, the adenosine deaminase comprises a H8Y, D108N, N127S, D147Y, and Q154H mutation in SEQ ID NO: 1, or corresponding mutations in another adenosine deaminase. In some embodiments, the adenosine deaminase comprises a H8Y, R24W, D108N, N127S, D147Y, and E155V mutation in SEQ ID NO: 1, or corresponding mutations in another adenosine deaminase. In some embodiments, the adenosine deaminase comprises a D108N, D147Y, and E155V mutation in SEQ ID NO: 1, or corresponding mutations in another adenosine deaminase. In some embodiments, the adenosine deaminase comprises a H8Y, D108N, and S 127S mutation in SEQ ID NO: 1, or corresponding mutations in another adenosine deaminase. In some embodiments, the adenosine deaminase comprises a A106V, D108N, D147Y and E155V mutation in SEQ ID NO: 1, or corresponding mutations in another adenosine deaminase.

[0215] In some embodiments, the adenosine deaminase comprises one or more of a S2X, H8X, I49X, L84X, H123X, N127X, I156X and/or K160X mutation in SEQ ID NO: 1, or one or more corresponding mutations in another adenosine deaminase, where the presence of X indicates any amino acid other than the corresponding amino acid in the wild-type adenosine deaminase. In some embodiments, the adenosine deaminase comprises one or more of S2A, H8Y, I49F, L84F, H123Y, N127S, I156F and/or K160S mutation in SEQ ID NO: 1, or one or more corresponding mutations in another adenosine deaminase. In some embodiments, the adenosine deaminase comprises one or more of the mutations in SEQ ID NO: 1, or one or more corresponding mutations in another adenosine deaminase. In some embodiments, the adenosine deaminase comprises the mutation or mutations of any one of clones corresponding to SEQ ID NO: 1, or a corresponding mutation or mutations in another adenosine deaminase.

[0216] In some embodiments, the adenosine deaminase comprises an L84X mutation adenosine deaminase, where X indicates any amino acid other than the corresponding amino acid in the wild-type adenosine deaminase. In some embodiments, the adenosine deaminase comprises an L84F mutation in SEQ ID NO: 1, or a corresponding mutation in another adenosine deaminase.

[0217] In some embodiments, the adenosine deaminase comprises an H123X mutation in ecTadA SEQ ID NO: 1, or a corresponding mutation in another adenosine deaminase, where X indicates any amino acid other than the corresponding amino acid in the wild-type adenosine deaminase. In some embodiments, the adenosine deaminase comprises an H123Y mutation in SEQ ID NO: 1, or a corresponding mutation in another adenosine deaminase.

[0218] In some embodiments, the adenosine deaminase comprises an I157X mutation in ecTadA SEQ ID NO: 1, or a corresponding mutation in another adenosine deaminase, where X indicates any amino acid other than the corresponding amino acid in the wild-type adenosine deaminase. In some embodiments, the adenosine deaminase comprises an I157F mutation in SEQ ID NO: 1, or a corresponding mutation in another adenosine deaminase.

[0219] In some embodiments, the adenosine deaminase comprises one, two, three, four, five, six, or seven mutations selected from the group consisting of L84X, A106X, D108X, H123X, D147X, E155X, and I156X in SEQ ID NO: 1, or a corresponding mutation or mutations in another adenosine deaminase, where X indicates the presence of any amino acid other than the corresponding amino acid in the wild-type adenosine deaminase. In some embodiments, the adenosine deaminase comprises one, two, three, four, five, or six mutations selected from the group consisting of S2X, I49X, A106X, D108X, D147X, and E155X in SEQ ID NO: 1, or a corresponding mutation or mutations in another adenosine deaminase, where X indicates the presence of any amino acid other than the corresponding amino acid in the wild-type adenosine deaminase. In some embodiments, the adenosine deaminase comprises one, two, three, four, or five mutations selected from the group consisting of H8X, A106X, D108X, N127X, and K160X in SEQ ID NO: 1, or a corresponding mutation or mutations in another adenosine deaminase, where X indicates the presence of any amino acid other than the corresponding amino acid in the wild-type adenosine deaminase.

[0220] In some embodiments, the adenosine deaminase comprises one, two, three, four, five, six, or seven mutations selected from the group consisting of L84F, A106V, D108N, H123Y, D147Y, E155V, and I156F in SEQ ID NO: 1, or a corresponding mutation or mutations in another adenosine deaminase. In some embodiments, the adenosine deaminase comprises one, two, three, four, five, or six mutations selected from the group consisting of S2A, I49F, A106V, D108N, D147Y, and E155V in SEQ ID NO: 1, or a corresponding amino acid in another adenosine deaminase. In some embodiments, the adenosine deaminase comprises one, two, three, four, or five mutations selected from the group consisting of H8Y, A106T, D108N, N127S, and K160S in SEQ ID NO: 1, or a corresponding mutation or mutations in another adenosine deaminase. In some embodiments, the adenosine deaminase comprises one or more of a E25X, R26X, R107X, A142X, and/or A143X mutation in SEQ ID NO: 1, or one or more corresponding mutations in another adenosine deaminase, where the presence of X indicates any amino acid other than the corresponding amino acid in the wild-type adenosine deaminase. In some embodiments, the adenosine deaminase comprises one or more of E25M, E25D, E25A, E25R, E25V, E25S, E25Y, R26G, R26N, R26Q, R26C, R26L, R26K, R107P, R07K, R107A, R107N, R107W, R107H, R107S, A142N, A142D, A142G, A143D, A143G, A143E, A143L, A143W, A143M, A143S, A143Q and/or A143R mutation in SEQ ID NO: 1, or one or more corresponding mutations in another adenosine deaminase. In some embodiments, the adenosine deaminase comprises one or more of the mutations provided in Table 23 corresponding to SEQ ID NO: 1, or one or more corresponding mutations in another adenosine deaminase. In some embodiments, the adenosine deaminase comprises the mutation or mutations of any one shown in Table 23 corresponding to SEQ ID NO: 1, or a corresponding mutation or mutations in another adenosine deaminase.

[0221] In some embodiments, the adenosine deaminase comprises an E25X mutation in ecTadA SEQ ID NO: 1, or a corresponding mutation in another adenosine deaminase, where X indicates any amino acid other than the corresponding amino acid in the wild-type adenosine deaminase. In some embodiments, the adenosine deaminase comprises an E25M, E25D, E25A, E25R, E25V, E25S, or E25Y mutation in SEQ ID NO: 1, or a corresponding mutation in another adenosine deaminase.

[0222] In some embodiments, the adenosine deaminase comprises an R26X mutation in ecTadA SEQ ID NO: 1, or a corresponding mutation in another adenosine deaminase, where X indicates any amino acid other than the corresponding amino acid in the wild-type adenosine deaminase. In some embodiments, the adenosine deaminase comprises an, R26G, R26N, R26Q, R26C, R26L, or R26K mutation in SEQ ID NO: 1, or a corresponding mutation in another adenosine deaminase.

[0223] In some embodiments, the adenosine deaminase comprises an R107X mutation in ecTadA SEQ ID NO: 1, or a corresponding mutation in another adenosine deaminase, where X indicates any amino acid other than the corresponding amino acid in the wild-type adenosine deaminase. In some embodiments, the adenosine deaminase comprises an R107P, R07K, R107A, R107N, R107W, R107H, or R107S mutation in SEQ ID NO: 1, or a corresponding mutation in another adenosine deaminase.

[0224] In some embodiments, the adenosine deaminase comprises an A142X mutation in ecTadA SEQ ID NO: 1, or a corresponding mutation in another adenosine deaminase, where X indicates any amino acid other than the corresponding amino acid in the wild-type adenosine deaminase. In some embodiments, the adenosine deaminase comprises an A142N, A142D, A142G, mutation in SEQ ID NO: 1, or a corresponding mutation in another adenosine deaminase.

[0225] In some embodiments, the adenosine deaminase comprises an A143X mutation in ecTadA SEQ ID NO: 1, or a corresponding mutation in another adenosine deaminase, where X indicates any amino acid other than the corresponding amino acid in the wild-type adenosine deaminase. In some embodiments, the adenosine deaminase comprises an A143D, A143G, A143E, A143L, A143W, A143M, A143S, A143Q and/or A143R mutation in SEQ ID NO: 1, or a corresponding mutation in another adenosine deaminase.

[0226] In some embodiments, the adenosine deaminase comprises one or more of a H36X, N37X, P48X, I49X, R51X, M70X, N72X, D77X, E134X, S 146X, Q154X, K157X, and/or K161X mutation in SEQ ID NO: 1, or one or more corresponding mutations in another adenosine deaminase, where the presence of X indicates any amino acid other than the corresponding amino acid in the wild-type adenosine deaminase. In some embodiments, the adenosine deaminase comprises one or more of H36L, N37T, N37S, P48T, P48L, I49V, R51H, R51L, M70L, N72S, D77G, E134G, S 146R, S 146C, Q154H, K157N, and/or K161T mutation in SEQ ID NO: 1, or one or more corresponding mutations in another adenosine deaminase.

[0227] In some embodiments, the adenosine deaminase comprises an H36X mutation in ecTadA SEQ ID NO: 1, or a corresponding mutation in another adenosine deaminase, where X indicates any amino acid other than the corresponding amino acid in the wild-type adenosine deaminase. In some embodiments, the adenosine deaminase comprises an H36L mutation in SEQ ID NO: 1, or a corresponding mutation in another adenosine deaminase. In some embodiments, the adenosine deaminase comprises an N37X mutation in ecTadA SEQ ID NO: 1, or a corresponding mutation in another adenosine deaminase, where X indicates any amino acid other than the corresponding amino acid in the wild-type adenosine deaminase. In some embodiments, the adenosine deaminase comprises an N37T, or N37S mutation in SEQ ID NO: 1, or a corresponding mutation in another adenosine deaminase.

[0228] In some embodiments, the adenosine deaminase comprises an P48X mutation in ecTadA SEQ ID NO: 1, or a corresponding mutation in another adenosine deaminase, where X indicates any amino acid other than the corresponding amino acid in the wild-type adenosine deaminase. In some embodiments, the adenosine deaminase comprises an P48T, or P48L mutation in SEQ ID NO: 1, or a corresponding mutation in another adenosine deaminase.

[0229] In some embodiments, the adenosine deaminase comprises an R51X mutation in ecTadA SEQ ID NO: 1, or a corresponding mutation in another adenosine deaminase, where X indicates any amino acid other than the corresponding amino acid in the wild-type adenosine deaminase. In some embodiments, the adenosine deaminase comprises an R51H, or R51L mutation in SEQ ID NO: 1, or a corresponding mutation in another adenosine deaminase.

[0230] In some embodiments, the adenosine deaminase comprises an S 146X mutation in ecTadA SEQ ID NO: 1, or a corresponding mutation in another adenosine deaminase, where X indicates any amino acid other than the corresponding amino acid in the wild-type adenosine deaminase. In some embodiments, the adenosine deaminase comprises an S 146R, or S 146C mutation in SEQ ID NO: 1, or a corresponding mutation in another adenosine deaminase.

[0231] In some embodiments, the adenosine deaminase comprises an K157X mutation in ecTadA SEQ ID NO: 1, or a corresponding mutation in another adenosine deaminase, where X indicates any amino acid other than the corresponding amino acid in the wild-type adenosine deaminase. In some embodiments, the adenosine deaminase comprises a K157N mutation in SEQ ID NO: 1, or a corresponding mutation in another adenosine deaminase.

[0232] In some embodiments, the adenosine deaminase comprises an P48X mutation in ecTadA SEQ ID NO: 1, or a corresponding mutation in another adenosine deaminase, where X indicates any amino acid other than the corresponding amino acid in the wild-type adenosine deaminase. In some embodiments, the adenosine deaminase comprises a P48S, P48T, or P48A mutation in SEQ ID NO: 1, or a corresponding mutation in another adenosine deaminase.

[0233] In some embodiments, the adenosine deaminase comprises an A142X mutation in ecTadA SEQ ID NO: 1, or a corresponding mutation in another adenosine deaminase, where X indicates any amino acid other than the corresponding amino acid in the wild-type adenosine deaminase. In some embodiments, the adenosine deaminase comprises a A142N mutation in SEQ ID NO: 1, or a corresponding mutation in another adenosine deaminase.

[0234] In some embodiments, the adenosine deaminase comprises an W23X mutation in ecTadA SEQ ID NO: 1, or a corresponding mutation in another adenosine deaminase, where X indicates any amino acid other than the corresponding amino acid in the wild-type adenosine deaminase. In some embodiments, the adenosine deaminase comprises a W23R, or W23L mutation in SEQ ID NO: 1, or a corresponding mutation in another adenosine deaminase.

[0235] In some embodiments, the adenosine deaminase comprises an R152X mutation in ecTadA SEQ ID NO: 1, or a corresponding mutation in another adenosine deaminase, where X indicates any amino acid other than the corresponding amino acid in the wild-type adenosine deaminase. In some embodiments, the adenosine deaminase comprises a R152P, or R52H mutation in SEQ ID NO: 1, or a corresponding mutation in another adenosine deaminase.

[0236] Additional adenosine deaminase mutations and variants are described in Patent Application WO2018119354, which is incorporated herein by reference in its entirety.

[0237] Additional adenosine deaminases useful in the present application would be apparent to the skilled artisan and are within the scope of this disclosure. For example, the adenosine deaminase may be a homolog of an AD AT. Exemplary AD AT homologs include, without limitation:

Staphylococcus aureus TadA:
(SEQ ID NO: 30)
MGSHMTNDIYFMTLAIEEAKKAAQLGEVPIGAIITKDDEVIARAHNLRET
LQQPTAHAEHIAIERAAKVLGSWRLEGCTLYVTLEPCVMCAGTIVMSRIP
RVVYGADDPKGGCS GS LMNLLQQS NFNHRAIVDKG VLKE AC S
TLLTTFFKNLRANKKS TN
Bacillus subtilis TadA:
(SEQ ID NO: 31)
MTQDELYMKEAIKEAKKAEEKGEVPIGAVLVINGEIIARAHNLRETEQRS
IAHAEML VIDE AC KALGT WRLEG ATLY VTLEPCPMC AG A
V VLS R VEK V VFG AFDPKGGC S GTLMN LLQEERFNHQ AE
V VS G VLEEEC GGMLS AFFRELRKKKK A ARKNLS E
Salmonella typhimurium (S. typhimurium) TadA:
(SEQ ID NO: 32)
MPPAFITGVTSLSDVELDHEYWMRHALTLAKRAWDEREVPVGAVLVHNHR
VIGEGWNRPIGRHDPTAHAEIMALRQGGLVLQNYRLLDTTLYVTLEPCVM
CAGAMVHSRIGRVVFGARDAKTGAAGSLIDVLHHPGMNHRVEIIEGVLRD
ECATLLSDFFRMRRQEIKALKKADRAEGAGPAV
Shewanella putrefaciens (S. putrefaciens) TadA:
(SEQ ID NO: 33)
MDEYWMQVAMQMAEKAEAAGEVPVGAVLVKDGQQIATGYNLSISQHDPTA
HAEILCLRSAGKKLENYRLLDATLYITLEPCAMCAGAMVHSRIARVVYGA
RDEKTGAAGTVVNLLQHPAFNHQVEVTSGVLAEACSAQLSRFFKRRRDEK
KALKLAQRAQQGIE
Haemophilus influenzae F3031 (H. influenzae) TadA:
(SEQ ID NO: 34)
MDAAKVRSEFDEKMMRYALELADKAEALGEIPVGAVLVDDARNIIGEGWN
LSIVQSDPTAHAEIIALRNGAKNIQNYRLLNSTLYVTLEPCTMCAGAILH
SRIKRLVFGASDYKTGAIGSRFHFFDDYKMNHTLEITSGVLAEECSQKLS
TFFQKRREEKKIEKALLKSLSDK
Caulobacter crescentus (C. crescentus) TadA:
(SEQ ID NO: 35)
MRTDESEDQDHRMMRLALDAARAAAEAGETPVGAVILDPSTGEVIATAGN
GPIAAHDPTAHAEIAAMRAAAAKLGNYRLTDLTLVVTLEPCAMCAGAISH
ARIGRVVFGADDPKGGAVVHGPKFFAQPTCHWRPEVTGGVLADESADLLR
GFFRARRKAKI
Geobacter sulfurreducens (G. sulfurreducens) TadA:
(SEQ ID NO: 36)
MSSLKKTPIRDDAYWMGKAIREAAKAAARDEVPIGAVIVRDGAVIGRGHN
LREGSNDPSAHAEMIAIRQAARRSANWRLTGATLYVTLEPCLMCMGAIIL
ARLERVVFGCYDPKGGAAGSLYDLSADPRLNHQVRLSPGVCQEECGTMLS
DFFRDLRRRKKAKATPALFIDERKVPPEP

[0238] In some embodiments, the adenosine deaminase comprises an amino acid sequence that is at least 60%, at least 65%, at least 70%, at least 75%, at least 80%, at least 85%, at least 90%, at least 95%, at least 96%, at least 97%, at least 98%, at least 99%, at least 99.5%, at least 99.7%, or at least 99.9% identical to any one of the amino acid sequences listed in Table 23. In some embodiments, the adenosine deaminase comprises any one of the amino acid sequences listed in Table 23. In some embodiments, the sequence of the adenosine deaminase is any one of the amino acid sequences listed in Table 23. In some embodiments, the adenosine deaminase comprises an amino acid sequence that is at least 60%, at least 65%, at least 70%, at least 75%, at least 80%, at least 85%, at least 90%, at least 95%, at least 96%, at least 97%, at least 98%, at least 99%, at least 99.5%, at least 99.7%, or at least 99.9% identical to any one of the amino acid sequences of SEQ ID NOs: SEQ ID NOs: 2137, 2149, 2154, 2158, 2188, 2140, 40, 2146, 2152, 2156, and 2160. In some embodiments, the adenosine deaminase comprises any one of the amino acid sequences of SEQ ID NOs: 2137, 2149, 2154, 2158, 2188, 2140, 40, 2146, 2152, 2156, and 2160. In some embodiments, the sequence of the adenosine deaminase is any one of the amino acid sequences of SEQ ID NOs: 2137, 2149, 2154, 2158, and 2188.

[0239] In some embodiments, the adenosine deaminase is encoded by the polynucleotide sequence that is at least 60%, at least 65%, at least 70%, at least 75%, at least 80%, at least 85%, at least 90%, at least 95%, at least 96%, at least 97%, at least 98%, at least 99%, at least 99.5%, at least 99.7%, or at least 99.9% identical to any one of the polynucleotide sequences listed in Table 23. In some embodiments, the adenosine deaminase is encoded by any one of the polynucleotide sequences listed in Table 23. In some embodiments, the adenosine deaminase is expressed by the polynucleotide sequence that is at least 60%, at least 65%, at least 70%, at least 75%, at least 80%, at least 85%, at least 90%, at least 95%, at least 96%, at least 97%, at least 98%, at least 99%, at least 99.5%, at least 99.7%, or at least 99.9% identical to any one of the polynucleotide sequences listed in Table 23. In some embodiments, the adenosine deaminase is expressed by any one of the polynucleotide sequences listed in Table 23. In some embodiments, the adenosine deaminase is encoded by the polynucleotide sequence that comprises at least 60%, at least 65%, at least 70%, at least 75%, at least 80%, at least 85%, at least 90%, at least 95%, at least 96%, at least 97%, at least 98%, at least 99%, at least 99.5%, at least 99.7%, or at least 99.9% identical to any one of the polynucleotide sequences of SEQ ID NOs: 2192, 2148, 2153, 2157, 2161, 2168, 2174, 2180, 2186, 2189, 2139, 2142, 2145, 2151, 2155, 2159, 2162, 2164, 2167, 2169, 2171, 2173, 2175, 2177, 2179, 2181, 2183, 2185, 2187, and 2190. In some embodiments, the adenosine deaminase is encoded by the polynucleotide sequence that comprises any one of the polynucleotide sequences of SEQ ID NOs: 2192, 2148, 2153, 2157, 2161, 2168, 2174, 2180, 2186, 2189, 2139, 2142, 2145, 2151, 2155, 2159, 2162, 2164, 2167, 2169, 2171, 2173, 2175, 2177, 2179, 2181, 2183, 2185, 2187, and 2190. In some embodiments, the adenosine deaminase is encoded by any one of the polynucleotide sequences of SEQ ID NOs: 2192, 2148, 2153, 2157, 2161, 2168, 2174, 2180, 2186, and 2189. In some embodiments, the adenosine deaminase is expressed by the polynucleotide sequence that comprises at least 60%, at least 65%, at least 70%, at least 75%, at least 80%, at least 85%, at least 90%, at least 95%, at least 96%, at least 97%, at least 98%, at least 99%, at least 99.5%, at least 99.7%, or at least 99.9% identical to any one of the polynucleotide sequences of SEQ ID NOs: 2192, 2148, 2153, 2157, 2161, 2168, 2174, 2180, 2186, 2189, 2139, 2142, 2145, 2151, 2155, 2159, 2162, 2164, 2167, 2169, 2171, 2173, 2175, 2177, 2179, 2181, 2183, 2185, 2187, 2190, 2138, 2147, 2158, or a combination thereof: In some embodiments, the adenosine deaminase is encoded by the polynucleotide sequence that comprises any one of the polynucleotide sequences of SEQ ID NOs: 2192, 2148, 2153, 2157, 2161, 2168, 2174, 2180, 2186, 2189, 2139, 2142, 2145, 2151, 2155, 2159, 2162, 2164, 2167, 2169, 2171, 2173, 2175, 2177, 2179, 2181, 2183, 2185, 2187, 2190, 2138, 2147, 2158, or a combination thereof. In some embodiments, the adenosine deaminase is expressed by any one of the polynucleotide sequences of SEQ ID NOs: 2192, 2148, 2153, 2157, 2161, 2168, 2174, 2180, 2186, and 2189. In some embodiments, the polynucleotide sequence further comprises at least 60%, at least 65%, at least 70%, at least 75%, at least 80%, at least 85%, at least 90%, at least 95%, at least 96%, at least 97%, at least 98%, at least 99%, at least 99.5%, at least 99.7%, or at least 99.9% identical to any one of the polynucleotide sequences of SEQ ID NOs: 2138, 2147, 2158, or a combination thereof. In some embodiments, the polynucleotide sequence further comprises any one of the polynucleotide sequences of SEQ ID NOs: 2138, 2147, 2158, or a combination thereof.

### Programmable DNA Binding Proteins

[0240] Provided herein are programmable DNA-binding proteins that can be programmed to target to bind DNA sequences in any desired nucleotide sequence within a genome. To program the DNA-binding protein to bind a desired nucleotide sequence, the DNA binding protein may be modified to change its binding specificity, e.g., zinc finger DNA-binding domain, zinc finger nuclease (ZFN), a CRISPR-Cas9 protein, or a transcription activator-like effector proteins (TALE). ZFNs are artificial restriction enzymes generated by fusing a zinc finger DNA-binding domain to a DNA-cleavage domain. Zinc finger domains can be engineered to target specific desired DNA sequences and this enables zinc-fingers to bind unique sequences within complex genomes. Transcription activator-like effector nucleases (TALEN) are engineered restriction enzymes that can be engineered to cut specific sequences of DNA. They are made by fusing a TAL effector DNA-binding domain to a nuclease domain (e.g. Fokl). Transcription activator-like effectors (TALEs) can be engineered to bind practically any desired DNA sequence. Methods for programming ZFNs and TALEs are familiar to one skilled in the art. For example, such methods are described in Maeder, et al, Mol. Cell 31 (2): 294-301, 2008; Carroll et al, Genetics Society of America, 188 (4): 773-782, 2011; Miller et al., Nature Biotechnology 25 (7): 778-785, 2007; Christian et al, Genetics 186 (2): 757-61, 2008; Li et al, Nucleic Acids Res. 39 (1): 359-372, 2010; and Moscou et al, Science 326 (5959): 1501, 2009, each of which are incorporated herein by reference.

[0241] A CRISPR/Cas system or a Cas protein in a base editor system provided herein may comprise Class 1 or Class 2 system components, including ribonucleic acid protein complexes. The Class 2 Cas nuclease families of proteins are enzymes with DNA endonuclease activity, and they can be directed to cleave a desired nucleic acid target by designing an appropriate guide RNA, as described further herein. A Class 2 CRISPR/Cas system component may be from a Type II, Type IIA, Type IIB, Type IIC, Type V, or Type VI system. Class 2 Cas nucleases include, for example, Cas9 (also known as Csn1 or Csx12), Csn2, Cas4, Cas12a (Cpf1), Cas12b (C2c1), Cas12c (C2c3), Cas13a (C2c2), Cas13b, Cas13c, and Cas13d proteins. In some embodiments, the Cas protein is from a Type II CRISPR/Cas system, i.e., a Cas9 protein from a CRISPR/Cas9 system, or a Type V CRISPR/Cas system, e.g., a Cas12a protein. In some embodiments, the Cas protein is from a Class 2 CRISPR/Cas system, i.e., a single-protein Cas nuclease such as a Cas9 protein or a Cas12a protein.

[0242] Other non-limiting examples of Cas proteins can include Cas1, Cas1B, Cas2, Cas3, Cas4, Cas5, Cas6, Cas7, Cas8, Cas10, Csy1, Csy2, Csy3, Cse1, Cse2, Csc1, Csc2, Csa5, Csn2, Csm2, Csm3, Csm4, Csm5, Csm6, Cmr1, Cmr3, Cmr4, Cmr5, Cmr6, Csb1, Csb2, Csb3, Csx17, Csx14, Csx10, Csx16, CsaX, Csx3, Csx1, Csx1S, Csf1, Csf2, CsO, Csf4, Cpf1, Cas9HiFi, homologues thereof, or modified versions thereof.

[0243] In some embodiments, provided herein are guide nucleotide sequence-programmable DNA-binding protein or RNA guided programmable DNA binding proteins that are able to bind DNA, and the binding to its target DNA sequence is mediated by a guide nucleotide sequence. Thus, it is appreciated that the guide nucleotide sequence-programmable DNA-binding protein binds to a guide nucleotide sequence. The guide nucleotide may be an RNA or DNA molecule (e.g., a single-stranded DNA or ssDNA molecule) that is complementary to the target sequence and can guide the DNA binding protein to the target sequence. As such, a guide nucleotide sequence-programmable DNA-binding protein may be a RNA-programmable DNA-binding protein (e.g., a Cas9 protein), or an ssDNA-programmable DNA-binding protein (e.g., an Argonaute protein). “Programmable” means the DNA-binding protein may be programmed to bind any DNA sequence that the guide nucleotide targets. Exemplary guide nucleotide sequence-programmable DNA-binding proteins include, but are not limited to, Cas9 (e.g., dCas9 and nCas9), saCas9 (e.g., saCas9d, saCas9d, saKKH Cas9) CasX, CasY, Cpf1, C2c1, C2c2, C2c3, Argonaute, and any other suitable protein described herein, or variants thereof.

[0244] In some embodiments, the guide nucleotide sequence exists as a single nucleotide molecule and comprises two domains: (1) a domain that shares homology to a target nucleic acid (e.g., and directs binding of a guide nucleotide sequence-programmable DNA-binding protein to the target); and (2) a domain that binds a guide nucleotide sequence-programmable DNA-binding protein. In some embodiments, domain (1) comprises a spacer sequence. In some embodiments, domain (2) is referred to as a tracrRNA sequence. In some embodiments, domain (2) corresponds to a sequence known as a tracrRNA, and comprises a stem-loop structure. For example, in some embodiments, domain (2) is identical or homologous to a tracrRNA as provided in Jinek et al., Science 337:816-821(2012), which is incorporated herein by reference. Other examples of gRNAs (e.g., those including domain 2) can be found in U.S. Patent Application Publication US20160208288 and U.S. Patent Application Publication US20160200779 each of which is herein incorporated by reference in their entirety.

[0245] Methods of using guide nucleotide sequence-programmable DNA-binding protein, such as Cas9, for site-specific cleavage (e.g., to modify a genome) are known in the art (see e.g., Cong, L. et al. Multiplex genome engineering using CRISPR/Cas systems. Science 339, 819-823 (2013); Mali, P. et al. RNA-guided human genome engineering via Cas9. Science 339, 823-826 (2013); Hwang, W. Y. et al. Efficient genome editing in zebrafish using a CRISPR-Cas system. Nature biotechnology 31, 227-229 (2013); Jinek, M. et al. RNA-programmed genome editing in human cells. eLife 2, e00471 (2013); Dicarlo, J. E. et al. Genome engineering in Saccharomyces cerevisiae using CRISPR-Cas systems. Nucleic acids research (2013); Jiang, W. et al. RNA-guided editing of bacterial genomes using CRISPR-Cas systems. Nature biotechnology 31, 233-239 (2013); each of which are incorporated herein by reference).

[0246] CRISPR is an adaptive immune system that provides protection against mobile genetic elements (viruses, transposable elements and conjugative plasmids). CRISPR clusters contain spacers, sequences complementary to antecedent mobile elements, and target invading nucleic acids. A CRISPR/Cas system comprises a non-coding RNA molecule (e.g., guide RNA) that binds to DNA (e.g., target DNA sequence) and Cas proteins (e.g., Cas9) with nuclease functionality (e.g., two nuclease domains). See, e.g., Sander, et al., Nature Biotechnology, 32:347-355 (2014); see also e.g., Hsu, et al., Cell 157(6):1262-1278 (2014). The general mechanism and recent advances of CRISPR system is discussed in Cong, et al., Science, 339(6121): 819-823 (2013); Fu, et al., Nature Biotechnology, 31, 822-826 (2013); Chu, et al., Nature Biotechnology 33, 543-548 (2015); Shmakov, et al., Molecular Cell, 60, 1-13 (2015); Makarova, et al., Nature Reviews Microbiology, 13, 1-15 (2015). CRISPR/Cas systems can be used to introduce site-specific cleavage of a target DNA. The locations for site-specific cleavage are determined by both 1) base-pairing complementarity between the guide RNA (gRNA) and the target DNA (a protospacer) and 2) a short motif in the target DNA referred to as the protospacer adjacent motif (PAM). CRISPR/Cas systems (e.g., Type II CRISPR/Cas system) can be used to generate, e.g., an engineered cell in which a target gene is disrupted or mutated. A Cas enzyme (e.g., Cas9) can be used to catalyze DNA cleavage. A Cas9 protein (e.g., a Streptococcus pyogenes Cas9 or any closely related Cas9) can derive an enzymatic action to generate double stranded breaks at target site sequences which hybridize to about 20 nucleotides of a guide sequence (e.g., gRNA) and that have a protospacer-adjacent motif (PAM) following the target sequence.

[0247] CRISPR/Cas system comprises Class 1 or Class 2 system components, including ribonucleic acid protein complexes. The Class 2 Cas nuclease families of proteins are enzymes with DNA endonuclease activity, and they can be directed to cleave a desired nucleic acid target by designing an appropriate guide RNA, as described further herein. A Class 2 CRISPR/Cas system component may be from a Type II, Type IIA, Type IIB, Type IIC, Type V, or Type VI system. Class 2 Cas nucleases include, for example, Cas9 (also known as Csn1 or Csx12), Csn2, Cas4, Cas12a (Cpf1), Cas12b (C2c1), Cas12c (C2c3), Cas13a (C2c2), Cas13b, Cas13c, and Cas13d proteins. In some embodiments, the Cas protein is from a Type II CRISPR/Cas system, i.e., a Cas9 protein from a CRISPR/Cas9 system, or a Type V CRISPR/Cas system, e.g., a Cas12a protein. In some embodiments, the Cas protein is from a Class 2 CRISPR/Cas system, i.e., a single-protein Cas nuclease such as a Cas9 protein or a Cas12a protein.

[0248] Other non-limiting examples of Cas proteins can include Cas1, Cas1B, Cas2, Cas3, Cas4, Cas5, Cas6, Cas7, Cas8, Cas10, Csy1, Csy2, Csy3, Cse1, Cse2, Csc1, Csc2, Csa5, Csn2, Csm2, Csm3, Csm4, Csm5, Csm6, Cmr1, Cmr3, Cmr4, Cmr5, Cmr6, Csb1, Csb2, Csb3, Csx17, Csx14, Csx10, Csx16, CsaX, Csx3, Csx1, Csx1S, Csf1, Csf2, CsO, Csf4, Cpf1, Cas9HiFi, homologues thereof, or modified versions thereof.

[0249] A base editor system provided herein may comprise a Cas9 or a Cas9 nuclease. A Cas9 protein or a Cas9 nuclease refers to an RNA-guided nuclease comprising a Cas9 protein, a fragment, or a variant thereof. A Cas9 nuclease is also referred to sometimes as a casn1 nuclease or a CRISPR (clustered regularly interspaced short palindromic repeat)—associated nuclease. CRISPR is an adaptive immune system that provides protection against mobile genetic elements (viruses, transposable elements and conjugative plasmids). CRISPR clusters contain spacers, sequences complementary to antecedent mobile elements, and target invading nucleic acids. CRISPR clusters are transcribed and processed into CRISPR RNA (crRNA). In type II CRISPR systems correct processing of pre-crRNA requires a trans-encoded small RNA (tracrRNA), endogenous ribonuclease 3 (rnc) and a Cas9 protein. The tracrRNA serves as a guide for ribonuclease 3-aided processing of pre-crRNA. Subsequently, Cas9/crRNA/tracrRNA endonucleolytically cleaves linear or circular dsDNA target complementary to the spacer. The target strand not complementary to crRNA is first cut endonucleolytically, then trimmed 3′-5′ exonucleolytically. In nature, DNA-binding and cleavage typically requires protein and both RNAs. However, single guide RNAs (“sgRNA”, or simply “gRNA”) can be engineered so as to incorporate aspects of both the crRNA and tracrRNA into a single RNA species. See, e.g., Jinek et al., Science 337:816-821(2012), which is incorporated herein by reference in its entirety.

[0250] The term “Cas9” refers to an RNA guided nuclease comprising a Cas9 protein, or a fragment thereof (e.g., a protein comprising an active, inactive, or partially active DNA cleavage domain of Cas9, and/or the gRNA binding domain of Cas9). A Cas9 nuclease is also referred to as a Casn1 nuclease or a CRISPR (clustered regularly interspaced short palindromic repeat) associated nuclease. Cas9 can refer to a polypeptide with at least or at least about 50%, 60%, 70%, 80%, 90%, 100% sequence identity and/or sequence similarity to a wild type exemplary Cas9 polypeptide (e.g., Cas9 from S. pyogenes). Cas9 can refer to a polypeptide with at most or at most about 50%, 60%, 70%, 80%, 90%, 100% sequence identity and/or sequence similarity to a wild type exemplary Cas9 polypeptide (e.g., from S. pyogenes). Cas9 can refer to the wild type or a modified form of the Cas9 protein that can comprise an amino acid change such as a deletion, insertion, substitution, variant, mutation, fusion, chimera, or any combination thereof.

[0251] Cas9 nuclease sequences and structures of variant Cas9 orthologs have been described in various species. Exemplary species that the Cas9 protein or other components can be from include, but are not limited to, Streptococcus pyogenes, Streptococcus thermophilus, Streptococcus sp., Staphylococcus aureus, Listeria innocua, Lactobacillus gasseri, Francisella novicida, Wolinella succinogenes, Sutterella wadsworthensis, Gamma proteobacterium, Neisseria meningitidis, Campylobacter jejuni, Pasteurella multocida, Fibrobacter succinogene, Rhodospirillum rubrum, Nocardiopsis dassonvillei, Streptomyces pristinaespiralis, Streptomyces viridochromogenes, Streptomyces viridochromogenes, Streptosporangium roseum, Alicyclobacillus acidocaldarius, Bacillus pseudomycoides, Bacillus selenitireducens, Exiguobacterium sibiricum, Lactobacillus delbrueckii, Lactobacillus salivarius, Lactobacillus buchneri, Treponema denticola, Microscilla marina, Burkholderiales bacterium, Polar omonas naphthalenivorans, Polar omonas sp., Crocosphaera watsonii, Cyanothece sp., Microcystis aeruginosa, Synechococcus sp., Acetohalobium arabaticum, Ammonifex degensii, Caldicelulosiruptor becscii, Candidatus Desulforudis, Clostridium botulinum, Clostridium difficile, Finegoldia magna, Natranaerobius thermophilus, Pelotomaculum thermopropionium, Acidithiobacillus caldus, Acidithiobacillus ferrooxidans, Allochromatium vinosum, Marinobacter sp., Nitrosococcus halophilus, Nitrosococcus watsoni, Pseudoalteromonas haloplanktis, Ktedonobacter racemifer, Methanohalobium evestigatum, Anabaena variabilis, Nodularia spumigena, Nostoc sp., Arthrospira maxima, Arthrospira platensis, Arthrospira sp., Lyngbya sp., Microcoleus chthonoplastes, Oscillator ia sp., Petrotoga mobilis, Thermosipho africanus, Streptococcus pasteurianus, Neisseria cinerea, Campylobacter lari, Parvibaculum lavamentivorans, Coryne bacterium diphtheria, or Acaryochloris marina. In some embodiments, the Cas9 protein is from Streptococcus pyogenes. In some embodiments, the Cas9 protein may be from Streptococcus thermophilus. In some embodiments, the Cas9 protein is from Staphylococcus aureus.

[0252] Additional suitable Cas9 nucleases and sequences will be apparent to those of skill in the art based on this disclosure, and such Cas9 nucleases and sequences include Cas9 sequences from the organisms and loci disclosed in Chylinski et al., (2013) RNA Biology 10:5, 726-737; which are incorporated herein by reference.

[0253] In some embodiments, wild-type Cas9 corresponds to Cas9 from Streptococcus pyogenes (NCBI Reference Sequence: NC_002737.2 (nucleotide sequence as follows); and Uniprot Reference Sequence: Q99ZW2 (amino acid sequence as follows)

(SEQ ID NO: 37)
ATGGATAAGAAATACTCAATAGGCTTAGATATCGGCACAAATAGCGTCGGATGG
GCGGTGATCACTGATGAATATAAGGTTCCGTCTAAAAAGTTCAAGGTTCTGGGAA
ATACAGACCGCCACAGTATCAAAAAAAATCTTATAGGGGCTCTTTTATTTGACAG
TGGAGAGACAGCGGAAGCGACTCGTCTCAAACGGACAGCTCGTAGAAGGTATAC
ACGTCGGAAGAATCGTATTTGTTATCTACAGGAGATTTTTTCAAATGAGATGGCG
AAAGTAGATGATAGTTTCTTTCATCGACTTGAAGAGTCTTTTTTGGTGGAAGAAG
ACAAGAAGCATGAACGTCATCCTATTTTTGGAAATATAGTAGATGAAGTTGCTTA
TCATGAGAAATATCCAACTATCTATCATCTGCGAAAAAAATTGGTAGATTCTACT
GATAAAGCGGATTTGCGCTTAATCTATTTGGCCTTAGCGCATATGATTAAGTTTC
GTGGTCATTTTTTGATTGAGGGAGATTTAAATCCTGATAATAGTGATGTGGACAA
ACTATTTATCCAGTTGGTACAAACCTACAATCAATTATTTGAAGAAAACCCTATT
AACGCAAGTGGAGTAGATGCTAAAGCGATTCTTTCTGCACGATTGAGTAAATCA
AGACGATTAGAAAATCTCATTGCTCAGCTCCCCGGTGAGAAGAAAAATGGCTTA
TTTGGGAATCTCATTGCTTTGTCATTGGGTTTGACCCCTAATTTTAAATCAAATTT
TGATTTGGCAGAAGATGCTAAATTACAGCTTTCAAAAGATACTTACGATGATGAT
TTAGATAATTTATTGGCGCAAATTGGAGATCAATATGCTGATTTGTTTTTGGCAG
CTAAGAATTTATCAGATGCTATTTTACTTTCAGATATCCTAAGAGTAAATACTGA
AATAACTAAGGCTCCCCTATCAGCTTCAATGATTAAACGCTACGATGAACATCAT
CAAGACTTGACTCTTTTAAAAGCTTTAGTTCGACAACAACTTCCAGAAAAGTATA
AAGAAATCTTTTTTGATCAATCAAAAAACGGATATGCAGGTTATATTGATGGGGG
AGCTAGCCAAGAAGAATTTTATAAATTTATCAAACCAATTTTAGAAAAAATGGAT
GGTACTGAGGAATTATTGGTGAAACTAAATCGTGAAGATTTGCTGCGCAAGCAA
CGGACCTTTGACAACGGCTCTATTCCCCATCAAATTCACTTGGGTGAGCTGCATG
CTATTTTGAGAAGACAAGAAGACTTTTATCCATTTTTAAAAGACAATCGTGAGAA
GATTGAAAAAATCTTGACTTTTCGAATTCCTTATTATGTTGGTCCATTGGCGCGTG
GCAATAGTCGTTTTGCATGGATGACTCGGAAGTCTGAAGAAACAATTACCCCATG
GAATTTTGAAGAAGTTGTCGATAAAGGTGCTTCAGCTCAATCATTTATTGAACGC
ATGACAAACTTTGATAAAAATCTTCCAAATGAAAAAGTACTACCAAAACATAGT
TTGCTTTATGAGTATTTTACGGTTTATAACGAATTGACAAAGGTCAAATATGTTA
CTGAAGGAATGCGAAAACCAGCATTTCTTTCAGGTGAACAGAAGAAAGCCATTG
TTGATTTACTCTTCAAAACAAATCGAAAAGTAACCGTTAAGCAATTAAAAGAAG
ATTATTTCAAAAAAATAGAATGTTTTGATAGTGTTGAAATTTCAGGAGTTGAAGA
TAGATTTAATGCTTCATTAGGTACCTACCATGATTTGCTAAAAATTATTAAAGAT
AAAGATTTTTTGGATAATGAAGAAAATGAAGATATCTTAGAGGATATTGTTTTAA
CATTGACCTTATTTGAAGATAGGGAGATGATTGAGGAAAGACTTAAAACATATG
CTCACCTCTTTGATGATAAGGTGATGAAACAGCTTAAACGTCGCCGTTATACTGG
TTGGGGACGTTTGTCTCGAAAATTGATTAATGGTATTAGGGATAAGCAATCTGGC
AAAACAATATTAGATTTTTTGAAATCAGATGGTTTTGCCAATCGCAATTTTATGC
AGCTGATCCATGATGATAGTTTGACATTTAAAGAAGACATTCAAAAAGCACAAG
TGTCTGGACAAGGCGATAGTTTACATGAACATATTGCAAATTTAGCTGGTAGCCC
TGCTATTAAAAAAGGTATTTTACAGACTGTAAAAGTTGTTGATGAATTGGTCAAA
GTAATGGGGCGGCATAAGCCAGAAAATATCGTTATTGAAATGGCACGTGAAAAT
CAGACAACTCAAAAGGGCCAGAAAAATTCGCGAGAGCGTATGAAACGAATCGA
AGAAGGTATCAAAGAATTAGGAAGTCAGATTCTTAAAGAGCATCCTGTTGAAAA
TACTCAATTGCAAAATGAAAAGCTCTATCTCTATTATCTCCAAAATGGAAGAGAC
ATGTATGTGGACCAAGAATTAGATATTAATCGTTTAAGTGATTATGATGTCGATC
ACATTGTTCCACAAAGTTTCCTTAAAGACGATTCAATAGACAATAAGGTCTTAAC
GCGTTCTGATAAAAATCGTGGTAAATCGGATAACGTTCCAAGTGAAGAAGTAGT
CAAAAAGATGAAAAACTATTGGAGACAACTTCTAAACGCCAAGTTAATCACTCA
ACGTAAGTTTGATAATTTAACGAAAGCTGAACGTGGAGGTTTGAGTGAACTTGAT
AAAGCTGGTTTTATCAAACGCCAATTGGTTGAAACTCGCCAAATCACTAAGCATG
TGGCACAAATTTTGGATAGTCGCATGAATACTAAATACGATGAAAATGATAAAC
TTATTCGAGAGGTTAAAGTGATTACCTTAAAATCTAAATTAGTTTCTGACTTCCG
AAAAGATTTCCAATTCTATAAAGTACGTGAGATTAACAATTACCATCATGCCCAT
GATGCGTATCTAAATGCCGTCGTTGGAACTGCTTTGATTAAGAAATATCCAAAAC
TTGAATCGGAGTTTGTCTATGGTGATTATAAAGTTTATGATGTTCGTAAAATGATT
GCTAAGTCTGAGCAAGAAATAGGCAAAGCAACCGCAAAATATTTCTTTTACTCTA
ATATCATGAACTTCTTCAAAACAGAAATTACACTTGCAAATGGAGAGATTCGCA
AACGCCCTCTAATCGAAACTAATGGGGAAACTGGAGAAATTGTCTGGGATAAAG
GGCGAGATTTTGCCACAGTGCGCAAAGTATTGTCCATGCCCCAAGTCAATATTGT
CAAGAAAACAGAAGTACAGACAGGCGGATTCTCCAAGGAGTCAATTTTACCAAA
AAGAAATTCGGACAAGCTTATTGCTCGTAAAAAAGACTGGGATCCAAAAAAATA
TGGTGGTTTTGATAGTCCAACGGTAGCTTATTCAGTCCTAGTGGTTGCTAAGGTG
GAAAAAGGGAAATCGAAGAAGTTAAAATCCGTTAAAGAGTTACTAGGGATCACA
ATTATGGAAAGAAGTTCCTTTGAAAAAAATCCGATTGACTTTTTAGAAGCTAAAG
GATATAAGGAAGTTAAAAAAGACTTAATCATTAAACTACCTAAATATAGTCTTTT
TGAGTTAGAAAACGGTCGTAAACGGATGCTGGCTAGTGCCGGAGAATTACAAAA
AGGAAATGAGCTGGCTCTGCCAAGCAAATATGTGAATTTTTTATATTTAGCTAGT
CATTATGAAAAGTTGAAGGGTAGTCCAGAAGATAACGAACAAAAACAATTGTTT
GTGGAGCAGCATAAGCATTATTTAGATGAGATTATTGAGCAAATCAGTGAATTTT
CTAAGCGTGTTATTTTAGCAGATGCCAATTTAGATAAAGTTCTTAGTGCATATAA
CAAACATAGAGACAAACCAATACGTGAACAAGCAGAAAATATTATTCATTTATT
TACGTTGACGAATCTTGGAGCTCCCGCTGCTTTTAAATATTTTGATACAACAATTG
ATCGTAAACGATATACGTCTACAAAAGAAGTTTTAGATGCCACTCTTATCCATCA
ATCCATCACTGGTCTTTATGAAACACGCATTGATTTGAGTCAGCTAGGAGGTGAC
TGA
(SEQ ID NO: 38)
[sequence omitted]

[0254] In some embodiments, Cas9 is a Cas9 protein from species Corynebacterium ulcerans (NCBI Refs: NC_015683.1, NC_017317.1); Corynebacterium diphtheria (NCBI Refs. NC 016782.1, NC_016786.1); Spiroplasma syrphidicola (NCBI Ref: NC_021284.1); Prevotella intermedia (NCBI Ref: NC_017861.1); Spiroplasma taiwanense (NCBI Ref: NC_021846.1); Streptococcus iniae (NCBI Ref: NC_021314.1); Belliella baltica (NCBI Ref: NC_018010.1); Psychroflexus torquisl (NCBI Ref: NC_018721.1); Listeria innocua (NCBI Ref: NP_472073.1), Campylobacter jejuni (NCBI Ref: YP_002344900.1) or Neisseria, meningitidis (NCBI Ref: YP_002342100.1).

[0255] In some embodiments, a base editor provided herein comprises a programmable DNA binding protein, e.g. a Cas nuclease, with reduced or abolished nuclease activity. For example a Ca9 protein may be nuclease inactive or may be a Cas9 nickase. Methods for generating a Cas9 protein (or a fragment thereof) having an inactive DNA cleavage domain are known (See, e.g., Jinek et al., Science. 337:816-821(2012); Qi et al, (2013) Cell. 28; 152(5): 1173-83, each of which are incorporated herein by reference in its entirety. For example, the DNA cleavage domain of Cas9 is known to include two subdomains, the HNH nuclease subdomain and the RuvC1 subdomain. The HNH subdomain cleaves the strand complementary to the gRNA, whereas the RuvC1 subdomain cleaves the non-complementary strand. Mutations within these subdomains can silence the nuclease activity of Cas9. For example, the mutations D10A and H840A completely inactivate the nuclease activity of S. pyogenes Cas9 (Jinek et al., Science. 337:816-821(2012); Qi et al, Cell. 28; 152(5): 1173-83 (2013)). The Cas9 nickase suitable for use in accordance with the present disclosure has an active HNH domain and an inactive RuvC domain and is able to cleave only the strand of the target DNA that is bound by the sgRNA (which is the opposite strand of the strand that is being edited via cytidine deamination). The Cas9 nickase of the present disclosure may comprise mutations that inactivate the RuvC domain, e.g., a D10A mutation. It is to be understood that any mutation that inactivates the RuvC domain may be included in a Cas9 nickase, e.g., insertion, deletion, or single or multiple amino acid substitution in the RuvC domain. In a Cas9 nickase described herein, while the RuvC domain is inactivated, the HNH domain remains activate. Thus, while the Cas9 nickase may comprise mutations other than those that inactivate the RuvC domain (e.g., D10A), those mutations do not affect the activity of the HNH domain. In a non-limiting Cas9 nickase example, the histidine at position 840 remains unchanged.

[0256] In some embodiments, a nuclease inactive Cas9 comprises the amino acid sequence of dCas9 (D10A and H840A) provided below:

(SEQ ID NO: 39)
MDKKYSIGLAIGTNSVGWAVITDEYKVPSKKFKVLGNTDRHSIKKNLIGA
LLFDSGETAEATRLKRTARRRYTRRKNRICYLQEIFSNEMAKVDDSFFHR
LEESFLVEEDKKHERHPIFGNIVDEVAYHEKYPTIYHLRKKLVDSTDKAD
LRLIYLALAHMIKFRGHFLIEGDLNPDNSDVDKLFIQLVQTYNQLFEENP
INASGVDAKAILSARLSKSRRLENLIAQLPGEKKNGLFGNLIALSLGLTP
NFKSNFDLAEDAKLQLSKDTYDDDLDNLLAQIGDQYADLFLAAKNLSDAI
LLSDILRVNTEITKAPLSASMIKRYDEHHQDLTLLKALVRQQLPEKYKEI
FFDQSKNGYAGYIDGGASQEEFYKFIKPILEKMDGTEELLVKLNREDLLR
KQRTFDNGSIPHQIHLGELHAILRRQEDFYPFLKDNREKIEKILTFRIPY
YVGPLARGNSRFAWMTRKSEETITPWNFEEVVDKGASAQSFIERMTNFDK
NLPNEKVLPKHSLLYEYFTVYNELTKVKYVTEGMRKPAFLSGEQKKAIVD
LLFKTNRKVTVKQLKEDYFKKIECFDSVEISGVEDRFNASLGTYHDLLKI
IKDKDFLDNEENEDILEDIVLTLTLFEDREMIEERLKTYAHLFDDKVMKQ
LKRRRYTGWGRLSRKLINGIRDKQSGKTILDFLKSDGFANRNFMQLIHDD
SLTFKEDIQKAQVSGQGDSLHEHIANLAGSPAIKKGILQTVKVVDELVKV
MGRHKPENIVIEMARENQTTQKGQKNSRERMKRIEEGIKELGSQILKEHP
VENTQLQNEKLYLYYLQNGRDMYVDQELDINRLSDYDVDAIVPQSFLKDD
SIDNKVLTRSDKNRGKSDNVPSEEVVKKMKNYWRQLLNAKLITQRKFDNL
TKAERGGLSELDKAGFIKRQLVETRQITKHVAQILDSRMNTKYDENDKLI
REVKVITLKSKLVSDFRKDFQFYKVREINNYHHAHDAYLNAVVGTALIKK
YPKLESEFVYGDYKVYDVRKMIAKSEQEIGKATAKYFFYSNIMNFFKTEI
TLANGEIRKRPLIETNGETGEIVWDKGRDFATVRKVLSMPQVNIVKKTEV
QTGGFSKESILPKRNSDKLIARKKDWDPKKYGGFDSPTVAYSVLVVAKVE
KGKSKKLKSVKELLGITIMERSSFEKNPIDFLEAKGYKEVKKDLIIKLPK
YSLFELENGRKRMLASAGELQKGNELALPSKYVNFLYLASHYEKLKGSPE
DNEQKQLFVEQHKHYLDEIIEQISEFSKRVILADANLDKVLSAYNKHRDK
PIREQAENIIHLFTLTNLGAPAAFKYFDTTIDRKRYTSTKEVLDATLIHQ
SITGLYETRIDLSQLGGD

[0257] In some embodiments, a Cas9 nickase comprises the amino acid sequence of an exemplary catalytically Cas9 nickase (nCas9) is as follows:

(SEQ ID NO: 40)
DKKYSIGLAIGTNSVGWAVITDEYKVPSKKFKVLGNTDRHSIKKNLIGAL
LFDSGETAEATRLKRTARRRYTRRKNRICYLQEIFSNEMAKVDDSFFHRL
EESFLVEEDKKHERHPIFGNIVDEVAYHEKYPTIYHLRKKLVDSTDKADL
RLIYLALAHMIKFRGHFLIEGDLNPDNSDVDKLFIQLVQTYNQLFEENPI
NASGVDAKAILSARLSKSRRLENLIAQLPGEKKNGLFGNLIALSLGLTPN
FKSNFDLAEDAKLQLSKDTYDDDLDNLLAQIGDQYADLFLAAKNLSDAIL
LSDILRVNTEITKAPLSASMIKRYDEHHQDLTLLKALVRQQLPEKYKEIF
FDQSKNGYAGYIDGGASQEEFYKFIKPILEKMDGTEELLVKLNREDLLRK
QRTFDNGSIPHQIHLGELHAILRRQEDFYPFLKDNREKIEKILTFRIPYY
VGPLARGNSRFAWMTRKSEETITPWNFEEVVDKGASAQSFIERMTNFDKN
LPNEKVLPKHSLLYEYFTVYNELTKVKYVTEGMRKPAFLSGEQKKAIVDL
LFKTNRKVTVKQLKEDYFKKIECFDSVEISGVEDRFNASLGTYHDLLKII
KDKDFLDNEENEDILEDIVLTLTLFEDREMIEERLKTYAHLFDDKVMKQL
KRRRYTGWGRLSRKLINGIRDKQSGKTILDFLKSDGFANRNFMQLIHDDS
LTFKEDIQKAQVSGQGDSLHEHIANLAGSPAIKKGILQTVKVVDELVKVM
GRHKPENIVIEMARENQTTQKGQKNSRERMKRIEEGIKELGSQILKEHPV
ENTQLQNEKLYLYYLQNGRDMYVDQELDINRLSDYDVDHIVPQSFLKDDS
IDNKVLTRSDKNRGKSDNVPSEEVVKKMKNYWRQLLNAKLITQRKFDNLT
KAERGGLSELDKAGFIKRQLVETRQITKHVAQILDSRMNTKYDENDKLIR
EVKVITLKSKLVSDFRKDFQFYKVREINNYHHAHDAYLNAVVGTALIKKY
PKLESEFVYGDYKVYDVRKMIAKSEQEIGKATAKYFFYSNIMNFFKTEIT
LANGEIRKRPLIETNGETGEIVWDKGRDFATVRKVLSMPQVNIVKKTEVQ
TGGFSKESILPKRNSDKLIARKKDWDPKKYGGFDSPTVAYSVLVVAKVEK
GKSKKLKSVKELLGITIMERSSFEKNPIDFLEAKGYKEVKKDLIIKLPKY
SLFELENGRKRMLASAGELQKGNELALPSKYVNFLYLASHYEKLKGSPED
NEQKQLFVEQHKHYLDEIIEQISEFSKRVILADANLDKVLSAYNKHRDKP
IREQAENIIHLFTLTNLGAPAAFKYFDTTIDRKRYTSTKEVLDATLIHQS
ITGLYETRIDLSQLGGD

[0258] Additional suitable mutations that inactivate Cas9 will be apparent to those of skill in the art based on this disclosure and knowledge in the field, and are within the scope of this disclosure. Such additional exemplary suitable nuclease-inactive Cas9 domains include, but are not limited to, D839A and/or N863A (See, e.g., Prashant et al, Nature Biotechnology. 2013; 31(9): 833-838, which are incorporated herein by reference), or), or K603R {See, e.g., Chavez et al., Nature Methods 12, 326-328, 2015, which is incorporated herein by reference). Cas9, dCas9, or Cas9 variant also encompasses Cas9, dCas9, or Cas9 variants from any organism. Also appreciated is that dCas9, Cas9 nickase, or other appropriate Cas9 variants from any organisms may be used in accordance with the present disclosure.

[0259] In some embodiments, Cas9 refers to a Cas9 from archaea (e.g. nanoarchaea), which constitute a domain and kingdom of single-celled prokaryotic microbes.

[0260] In some embodiments, the programmable DNA binding protein comprises a CasX or CasY, or a variant thereof, which have been described in, for example, Burstein et al., “New CRISPR-Cas systems from uncultivated microbes.” Cell Res. 2017 Feb. 21. doi: 10.1038/cr.2017.21, the entire contents of which is hereby incorporated by reference. Using genome-resolved metagenomics, a number of CRISPR-Cas systems were identified, including the first reported Cas9 in the archaeal domain of life. This divergent Cas9 protein was found in little-studied nanoarchaea as part of an active CRISPR-Cas system. In bacteria, two previously unknown systems were discovered, CRISPR-CasX and CRISPR-CasY, which are among the most compact systems yet discovered.

[0261] Some aspects of the disclosure provide high fidelity Cas9 domains of the nucleobase editors provided herein. In some embodiments, high fidelity Cas9 domains are engineered Cas9 domains comprising one or more mutations that decrease electrostatic interactions between the Cas9 domain and the sugar-phosphate backbone of DNA, as compared to a corresponding wild-type Cas9 domain. Without wishing to be bound by any particular theory, high fidelity Cas9 domains that have decreased electrostatic interactions with the sugar-phosphate backbone of DNA may have less off-target effects. In some embodiments, the Cas9 domain comprises one or more mutations that decreases the association between the Cas9 domain and the sugar-phosphate backbone of DNA. In some embodiments, a Cas9 domain comprises one or more mutations that decreases the association between the Cas9 domain and the sugar-phosphate backbone of DNA by at least 1%, at least 2%, at least 3%, at least 4%, at least 5%, at least 10%, at least 15%, at least 20%, at least 25%, at least 30%, at least 35%, at least 40%, at least 45%, at least 50%, at least 55%, at least 60%, at least 65%, at least 70%, or more. In some embodiments, any of the Cas9 fusion proteins provided herein comprise one or more of N497X, R661X, Q695X, and/or Q926X mutation as numbered in the wild type Cas9 amino acid sequence or a corresponding amino acid in another Cas9, wherein X is any amino acid. In some embodiments, any of the Cas9 or Cas9 fusion proteins provided herein comprise one or more of N497A, R661A, Q695A, and/or Q926A mutation of the amino acid sequence provided in the wild type Cas9 sequence, or a corresponding mutation as numbered in the wild type Cas9 amino acid sequence or a corresponding amino acid in another Cas9. Cas9 domains with high fidelity have been described in Kleinstiver, B. P., et al. “High-fidelity CRISPR-Cas9 nucleases with no detectable genome-wide off-target effects.” Nature 529, 490-495 (2016); and Slaymaker, I. M., et al. “Rationally engineered Cas9 nucleases with improved specificity.” Science 351, 84-88 (2015); the entire contents of each are incorporated herein by reference.

[0262] It should be appreciated that any of the base editors provided herein, for example, any of the adenosine deaminase base editors provided herein, may be converted into high fidelity base editors by modifying the Cas9 domain as described herein to generate high fidelity base editors, for example, a high fidelity adenosine base editor. In some embodiments, the high fidelity Cas9 domain is a nuclease inactive Cas9 domain. In some embodiments, the high fidelity Cas9 domain is a Cas9 nickase domain.

[0263] In some embodiments, a Cas protein comprises a CasX or CasY, or a variant thereof, which have been described in, for example, Burstein et al., “New CRISPR-Cas systems from uncultivated microbes.” Cell Res. 2017 Feb. 21. doi: 10.1038/cr.2017.21, the entire contents of which is hereby incorporated by reference. Using genome-resolved metagenomics, a number of CRISPR-Cas systems were identified, including the first reported Cas9 in the archaeal domain of life. This divergent Cas9 protein was found in little-studied nanoarchaea as part of an active CRISPR-Cas system. In bacteria, two previously unknown systems were discovered, CRISPR-CasX and CRISPR-CasY, which are among the most compact systems yet discovered.

[0264] Alternatives to S. pyogenes Cas9 may include RNA-guided endonucleases from the Cpf1 family that exhibit cleavage activity in mammalian cells. Cpf1-mediated DNA cleavage is a double-strand break with a short 3′ overhang, which is different from Cas9-mediated DNA cleavage. The staggered cleavage pattern of Cpf1 may open up the possibility of directional gene transfer, analogous to traditional restriction enzyme cloning, which may increase the efficiency of gene editing. Like the Cas9 variants and orthologues described above, Cpf1 may also expand the number of sites that can be targeted by CRISPR to AT-rich regions or AT-rich genomes that lack the NGG PAM sites favored by SpCas9.

[0265] In some embodiments, the Cas9 protein comprises an amino acid sequence that is at least 60%, at least 65%, at least 70%, at least 75%, at least 80%, at least 85%, at least 90%, at least 95%, at least 96%, at least 97%, at least 98%, at least 99%, at least 99.5%, at least 99.7%, or at least 99.9% identical to any one of the amino acid sequences listed in Table 23. In some embodiments, the Cas9 protein comprises any one of the amino acid sequences listed in Table 23. In some embodiments, the sequence of the Cas9 protein is any one of the amino acid sequences listed in Table 23. In some embodiments, the Cas9 protein comprises an amino acid sequence that is at least 60%, at least 65%, at least 70%, at least 75%, at least 80%, at least 85%, at least 90%, at least 95%, at least 96%, at least 97%, at least 98%, at least 99%, at least 99.5%, at least 99.7%, or at least 99.9% identical to any one of the amino acid sequences of SEQ ID NOs: 2137, 2149, 2154, 2158, 2188, 2140, 40, 2146, 2152, 2156, and 2160. In some embodiments, the Cas9 protein comprises any one of the amino acid sequences of SEQ ID NOs: 2137, 2149, 2154, 2158, 2188, 2140, 40, 2146, 2152, 2156, and 2160. In some embodiments, the sequence of the Cas9 protein is any one of the amino acid sequences of SEQ ID NOs: 2137, 2149, 2154, 2158, and 2188.

[0266] In some embodiments, the Cas9 protein is encoded by the polynucleotide sequence that is at least 60%, at least 65%, at least 70%, at least 75%, at least 80%, at least 85%, at least 90%, at least 95%, at least 96%, at least 97%, at least 98%, at least 99%, at least 99.5%, at least 99.7%, or at least 99.9% identical to any one of the polynucleotide sequences listed in Table 23. In some embodiments, the Cas9 protein is encoded by any one of the polynucleotide sequences listed in Table 23. In some embodiments, the Cas9 protein is expressed by the polynucleotide sequence that is at least 60%, at least 65%, at least 70%, at least 75%, at least 80%, at least 85%, at least 90%, at least 95%, at least 96%, at least 97%, at least 98%, at least 99%, at least 99.5%, at least 99.7%, or at least 99.9% identical to any one of the polynucleotide sequences listed in Table 23. In some embodiments, the Cas9 protein is expressed by any one of the polynucleotide sequences listed in Table 23. In some embodiments, the Cas9 protein is encoded by the polynucleotide sequence that is at In some embodiments, the Cas9 protein is encoded by the polynucleotide sequence that comprises at least 60%, at least 65%, at least 70%, at least 75%, at least 80%, at least 85%, at least 90%, at least 95%, at least 96%, at least 97%, at least 98%, at least 99%, at least 99.5%, at least 99.7%, or at least 99.9% identical to any one of the polynucleotide sequences of SEQ ID NOs: 2192, 2148, 2153, 2157, 2161, 2168, 2174, 2180, 2186, 2189, 2139, 2142, 2145, 2151, 2155, 2159, 2162, 2164, 2167, 2169, 2171, 2173, 2175, 2177, 2179, 2181, 2183, 2185, 2187, and 2190. In some embodiments, the Cas9 protein is encoded by the polynucleotide sequence that comprises any one of the polynucleotide sequences of SEQ ID NOs: 2192, 2148, 2153, 2157, 2161, 2168, 2174, 2180, 2186, 2189, 2139, 2142, 2145, 2151, 2155, 2159, 2162, 2164, 2167, 2169, 2171, 2173, 2175, 2177, 2179, 2181, 2183, 2185, 2187, and 2190. In some embodiments, the Cas9 protein is encoded by any one of the polynucleotide sequences of SEQ ID NOs: 2192, 2148, 2153, 2157, 2161, 2168, 2174, 2180, 2186, and 2189. In some embodiments, the Cas9 protein is expressed by the polynucleotide sequence that comprises at least 60%, at least 65%, at least 70%, at least 75%, at least 80%, at least 85%, at least 90%, at least 95%, at least 96%, at least 97%, at least 98%, at least 99%, at least 99.5%, at least 99.7%, or at least 99.9% identical to any one of the polynucleotide sequences of SEQ ID NOs: 2192, 2148, 2153, 2157, 2161, 2168, 2174, 2180, 2186, 2189, 2139, 2142, 2145, 2151, 2155, 2159, 2162, 2164, 2167, 2169, 2171, 2173, 2175, 2177, 2179, 2181, 2183, 2185, 2187, 2190, 2138, 2147, 2158, or a combination thereof: In some embodiments, the Cas9 protein is encoded by the polynucleotide sequence that comprises any one of the polynucleotide sequences of SEQ ID NOs: 2192, 2148, 2153, 2157, 2161, 2168, 2174, 2180, 2186, 2189, 2139, 2142, 2145, 2151, 2155, 2159, 2162, 2164, 2167, 2169, 2171, 2173, 2175, 2177, 2179, 2181, 2183, 2185, 2187, 2190, 2138, 2147, 2158, or a combination thereof. In some embodiments, the Cas9 protein is expressed by any one of the polynucleotide sequences of SEQ ID NOs: 2192, 2148, 2153, 2157, 2161, 2168, 2174, 2180, 2186, and 2189. In some embodiments, the polynucleotide sequence further comprises at least 60%, at least 65%, at least 70%, at least 75%, at least 80%, at least 85%, at least 90%, at least 95%, at least 96%, at least 97%, at least 98%, at least 99%, at least 99.5%, at least 99.7%, or at least 99.9% identical to any one of the polynucleotide sequences of SEQ ID NOs: 2138, 2147, 2158, or a combination thereof. In some embodiments, the polynucleotide sequence further comprises any one of the polynucleotide sequences of SEQ ID NOs: 2138, 2147, 2158, or a combination thereof.

### Linkers

[0267] Base editors provided herein may comprises linkers that connect one or more components of the base editors. In certain embodiments, linkers may be used to link any of the protein or protein domains described herein. The linker may be as simple as a covalent bond, or it may be a polymeric linker many atoms in length. In certain embodiments, the linker is a polypeptide or based on amino acids. In other embodiments, the linker is not peptide-like. In some embodiments, the linker is carbon bond, disulfide bond, carbon-heteroatom bond, etc. In certain embodiments, the linker is a carbon-nitrogen bond of an amide linkage. In certain embodiments, the linker is a cyclic or acyclic, substituted or unsubstituted, branched or unbranched aliphatic or heteroaliphatic linker. In certain embodiments, the linker is polymeric (e.g., polyethylene, polyethylene glycol, polyamide, polyester, etc.). In certain embodiments, the linker comprises a monomer, dimer, or polymer of aminoalkanoic acid. In certain embodiments, the linker comprises an aminoalkanoic acid (e.g., glycine, ethanoic acid, alanine, beta-alanine, 3-aminopropanoic acid, 4-aminobutanoic acid, 5-pentanoic acid, etc.). In certain embodiments, the linker comprises a monomer, dimer, or polymer of aminohexanoic acid (Ahx). In certain embodiments, the linker is based on a carbocyclic moiety (e.g., cyclopentane, cyclohexane). In other embodiments, the linker comprises a polyethylene glycol moiety (PEG). In other embodiments, the linker comprises amino acids. In certain embodiments, the linker comprises a peptide. In certain embodiments, the linker comprises an aryl or heteroaryl moiety. In certain embodiments, the linker is based on a phenyl ring. The linker may include functionalized moieties to facilitate attachment of a nucleophile (e.g., thiol, amino) from the peptide to the linker. Any electrophile may be used as part of the linker. Exemplary electrophiles include, but are not limited to, activated esters, activated amides, alkyl halides, aryl halides, acyl halides, and isothiocyanates.

[0268] In some embodiments, the linker is an amino acid or a plurality of amino acids (e.g., a peptide or protein). In some embodiments, the linker is a bond (e.g., a covalent bond), an organic molecule, group, polymer, or chemical moiety. In some embodiments, the linker is 5-100 amino acids in length, for example, 5, 6, 7, 8, 9, 10, 11, 12, 13, 14, 15, 16, 17, 18, 19, 20, 21, 22, 23, 24, 25, 26, 27, 28, 29, 30, 30-35, 35-40, 40-45, 45-50, 50-60, 60-70, 70-80, 80-90, 90-100, 100-110, 110-120, 120-130, 130-140, 140-150, or 150-200 amino acids in length. Longer or shorter linkers are also contemplated. In some embodiments, a linker comprises the amino acid sequence SGSETPGTSESATPES (SEQ ID NO: 17), which may also be referred to as the XTEN linker. In some embodiments, a linker comprises the amino acid sequence SGGS. In some embodiments, a linker comprises (SGGS)n (SEQ ID NO: 41), (GGGS)n (SEQ ID NO: 42), (GGGGS)n (SEQ ID NO: 43), (G)n (SEQ ID NO: 44), (EAAAK)n (SEQ ID NO: 45), (GGS)n (SEQ ID NO: 46), SGSETPGTSESATPES (SEQ ID NO: 17), or (XP)n (SEQ ID NO: 47) motif, or a combination of any of these, wherein n is independently an integer between 1 and 30, and wherein X is any amino acid. In some embodiments, n is 1, 2, 3, 4, 5, 6, 7, 8, 9, 10, 11, 12, 13, 14, or 15. In some embodiments, a linker comprises SGSETPGTSESATPES (SEQ ID NO: 17), SGGSSGSETPGTSESATPESSGGS (SEQ ID NO: 19). In some embodiments, a linker comprises SGGSSGGSSGSETPGTSESATPESSGGSSGGS (SEQ ID NO: 20). In some embodiments, a linker comprises GGSGGSPGSPAGSPTSTEEGTSESATPESGPGTSTEPSEGSAPGSPAGSPTSTEEGTSTE PSEGSAPGTSTEPSEGSAPGTSESATPESGPGSEPATSGGSGGS (SEQ ID NO: 21). In some embodiments, the linker is 24 amino acids in length. In some embodiments, the linker comprises the amino acid sequence SGGSSGGSSGSETPGTSESATPES (SEQ ID NO: 23). In some embodiments, the linker is 40 amino acids in length. In some embodiments, the linker comprises the amino acid sequence SGGSSGGSSGSETPGTSESATPESSGGSSGGSSGGSSGGS (SEQ ID NO: 24). In some embodiments, the linker is 64 amino acids in length. In some embodiments, the linker comprises the amino acid sequence SGGSSGGSSGSETPGTSESATPESSGGSSGGSSGGSSGGSSGSETPGTSESATPESSGGS SGGS (SEQ ID NO: 25). In some embodiments, the linker is 92 amino acids in length. In some embodiments, the linker comprises the amino acid sequence PGSPAGSPTSTEEGTSESATPESGPGTSTEPSEGSAPGSPAGSPTSTEEGTSTEPSEGSAP GTSTEPSEGSAPGTSESATPESGPGSEPATS (SEQ ID NO: 26). It should be appreciated that any of the linkers provided herein may be used to link a first adenosine deaminase and a second adenosine deaminase; a deaminase (e.g., a first or a second adenosine deaminase) and a RNA guided programmable DNA binding protein; a RNA guided programmable DNA binding protein and an NLS; or a deaminase (e.g., a first or a second adenosine deaminase) and an NLS.

[0269] Various linker lengths and flexibilities between a deaminase (e.g., an engineered ecTadA) and a RNA guided programmable DNA binding protein (e.g., a Cas9 domain), and/or between a first adenosine deaminase and a second adenosine deaminase can be employed (e.g., ranging from very flexible linkers of the form (GGGGS)n (SEQ ID NO: 22), (GGGGS)n (SEQ ID NO: 22), and (G)n to more rigid linkers of the form (EAAAK)n (SEQ ID NO: 48), (SGGS)n (SEQ ID NO: 49), and (XP)n) in order to achieve the optimal length for deaminase activity for the specific application. In some embodiments, n is any integer between 3 and 30. In some embodiments, n is 1, 2, 3, 4, 5, 6, 7, 8, 9, 10, 11, 12, 13, 14, or 15. In some embodiments, the linker comprises a (GGS)n (SEQ ID NO: 51) motif, wherein n is 1, 3, or 7.

### Protospacer Adjacent Motifs

[0270] CRISPR clusters contain spacers, sequences complementary to antecedent mobile elements, and target invading nucleic acids. CRISPR clusters are transcribed and processed into CRISPR RNA (crRNA). For example, in type II CRISPR systems correct processing of pre-crRNA requires a trans-encoded small RNA (tracrRNA), endogenous ribonuclease 3 (rnc) and a Cas9 protein. The tracrRNA serves as a guide for ribonuclease 3-aided processing of pre-crRNA. Cas9 recognizes a short motif in the CRISPR repeat sequences (the PAM or protospacer adjacent motif) (see, e.g., “Complete genome sequence of an Ml strain of Streptococcus pyogenes.” Ferretti et ah, J. J., McShan W. M., Ajdic D. J., Savic D. J., Savic G., Lyon K., Primeaux C, Sezate S., Suvorov A. N., Kenton S., Lai H. S., Lin S. P., Qian Y., Jia H. G., Najar F. Z., Ren Q., Zhu H., Song L., Natl. Acad. Sci. U.S.A. 98:4658-4663(2001); “CRISPR RNA maturation by trans-encoded small RNA and host factor RNase III.” Deltcheva E., Chylinski K., Sharma C M., Gonzales K., Chao Y., Pirzada Z. A., Eckert M. R., Vogel J., Charpentier E., Nature 471:602-607(2011); and “A programmable dual-RNA-guided DNA endonuclease in adaptive bacterial immunity.” Jinek M., Chylinski K., Fonfara I., Hauer M., Doudna J. A., Charpentier E. Science 337:816-821(2012), the entire contents of each of which are incorporated herein by reference). Cas9 orthologs have been described in various species, including, but not limited to, S. pyogenes and S. thermophilus.

[0271] Some aspects of the disclosure provide programmed DNA binding protein domains, e.g. Cas9 domains that have altered PAM specificities. In some embodiments, a Cas9 derived from S. pyogenes (spCas9) recognizes a canonical NGG PAM sequence where the “N” in “NGG” is adenine (A), thymine (T), guanine (G), or cytosine (C), and the G is guanine. In some embodiments, the base editing fusion proteins provided herein function by deaminating a target nucleobase within a 4 base region (e.g., a “deamination window”), which is approximately 15 bases upstream of the PAM. In some embodiments, the deamination window is 5, 6, 7, 8, 9, 10, 11, 12, 13, 14, 15, 16, 17, 18, 19, 20, 21, 22, 23, 24, or 25 bases upstream of the PAM. Accordingly, in some embodiments, any of the fusion proteins provided herein may contain a Cas9 domain that is capable of binding a nucleotide sequence that does not contain a canonical (e.g., NGG) PAM sequence. Cas9 domains that bind to non-canonical PAM sequences have been described in the art and would be apparent to the skilled artisan. For example, Cas9 domains that bind non-canonical PAM sequences have been described in Kleinstiver, B. P., et al., “Engineered CRISPR-Cas9 nucleases with altered PAM specificities” Nature 523, 481-485 (2015); and Kleinstiver, B. P., et ah, “Broadening the targeting range of Staphylococcus aureus CRISPR-Cas9 by modifying PAM recognition” Nature Biotechnology 33, 1293-1298 (2015); the entire contents of each are hereby incorporated by reference. In some embodiments, the Cas9 domain is a Cas9 domain from Staphylococcus aureus (SaCas9). In some embodiments, the SaCas9 domain is a nuclease active SaCas9, a nuclease inactive SaCas9 (SaCas9d), or a SaCas9 nickase (SaCas9n). A wild type SaCas9 amino acid sequence is provided below:

(SEQ ID NO: 52)
KRNYILGLDIGITSVGYGIIDYETRDVIDAGVRLFKEANVENNEGRRSKR
GARRLKRRRRHRIQRVKKLLFDYNLLTDHSELSGINPYEARVKGLSQKLS
EEEFSAALLHLAKRRGVHNVNEVEEDTGNELSTKEQISRNSKALEEKYVA
ELQLERLKKDGEVRGSINRFKTSDYVKEAKQLLKVQKAYHQLDQSFIDTY
IDLLETRRTYYEGPGEGSPFGWKDIKEWYEMLMGHCTYFPEELRSVKYAY
NADLYNALNDLNNLVITRDENEKLEYYEKFQIIENVFKQKKKPTLKQIAK
EILVNEEDIKGYRVTSTGKPEFTNLKVYHDIKDITARKEIIENAELLDQI
AKILTIYQSSEDIQEELTNLNSELTQEEIEQISNLKGYTGTHNLSLKAIN
LILDELWHTNDNQIAIFNRLKLVPKKVDLSQQKEIPTTLVDDFILSPVVK
RSFIQSIKVINAIIKKYGLPNDIIIELAREKNSKDAQKMINEMQKRNRQT
NERIEEIIRTTGKENAKYLIEKIKLHDMQEGKCLYSLEAIPLEDLLNNPF
NYEVDHIIPRSVSFDNSFNNKVLVKQEENSKKGNRTPFQYLSSSDSKISY
ETFKKHILNLAKGKGRISKTKKEYLLEERDINRFSVQKDFINRNLVDTRY
ATRGLMNLLRSYFRVNNLDVKVKSINGGFTSFLRRKWKFKKERNKGYKHH
AEDALIIANADFIFKEWKKLDKAKKVMENQMFEEKQAESMPEIETEQEYK
EIFITPHQIKHIKDFKDYKYSHRVDKKPNRELINDTLYSTRKDDKGNTLI
VNNLNGLYDKDNDKLKKLINKSPEKLLMYHHDPQTYQKLKLIMEQYGDEK
NPLYKYYEETGNYLTKYSKKDNGPVIKKIKYYGNKLNAHLDITDDYPNSR
NKVVKLSLKPYRFDVYLDNGVYKFVTVKNLDVIKKENYYEVNSKCYEEAK
KLKKISNQAEFIASFYNNDLIKINGELYRVIGVNNDLLNRIEVNMIDITY
REYLENMNDKRPPRIIKTIASKTQSIKKYSTDILGNLYEVKSKKHPQIIK
KG

[0272] In some embodiments, the SaCas9 comprises a N579X mutation, or a corresponding mutation in any of the amino acid sequences as numbered in the wild type SaCas9 sequence, wherein X is any amino acid except for N. In some embodiments, the SaCas9 comprises a N579A mutation as numbered in the wild type SaCas9 sequence or a corresponding mutation in another SaCas9 protein.

[0273] In some embodiments, the SaCas9 domain, the nuclease inactive SaCas9 domain, or the SaCas9 nickase domain can bind to a nucleic acid sequence having a non-canonical PAM. In some embodiments, the SaCas9 domain, the SaCas9d domain, or the SaCas9n domain can bind to a nucleic acid sequence having a NNGRRT PAM sequence, where N=A, T, C, or G, and R=A or G. In some embodiments, the SaCas9 domain comprises one or more of E781X, N967X, and R1014X as numbered in the wild type SaCas9 sequence or a corresponding mutation in another SaCas9 protein wherein X is any amino acid. In some embodiments, the SaCas9 domain comprises one or more of a E781K, a N967K, and a R1014H mutation as numbered in the wild type SaCas9 sequence or a corresponding mutation in another SaCas9 protein. In some embodiments, the SaCas9 domain comprises a E781K, a N967K, or a R1014H mutation as numbered in the wild type SaCas9 sequence or a corresponding mutation in another SaCas9 protein.

[0274] In some embodiments, the Cas9 domain is a Cas9 domain from Streptococcus pyogenes (SpCas9). In some embodiments, the SpCas9 domain is a nuclease active SpCas9, a nuclease inactive SpCas9 (SpCas9d), or a SpCas9 nickase (SpCas9n). In some embodiments, the SpCas9 comprises a D10X mutation as numbered in the wild type SpCas9 amino acid sequence or a corresponding mutation in another SapCas9 protein, wherein X is any amino acid except for D. In some embodiments, the SpCas9 comprises a D10A mutation as numbered in the wild type SpCas9 amino acid sequence or a corresponding mutation in another SpCas9 protein. In some embodiments, the SpCas9 domain, the nuclease in active SpCas9 domain, or the SpCas9 nickase domain can bind to a nucleic acid sequence having a non-NGG PAM. In some embodiments, the SpCas9 domain, the SpCas9 domain, the nuclease in active SpCas9 domain, or the SpCas9 nickase domain can bind to a nucleic acid sequence having a NGG, a NGA, or a NGCG PAM sequence. In some embodiments, the SpCas9 domain comprises one or more of a D1135X, a R1335X, and a T1337X mutation as numbered in the wild type SpCas9 amino acid sequence or a corresponding mutation in another SpCas9 protein, wherein X is any amino acid. In some embodiments, the SpCas9 domain comprises one or more of a D1135E, R1335Q, and T1337R mutation as numbered in the wild type SpCas9 amino acid sequence or a corresponding mutation in another SpCas9 protein. In some embodiments, the SpCas9 domain comprises one or more of a D1 134V, a R1334Q, and a T1336R mutation as numbered in the wild type Cas9 amino acid sequence, or a corresponding mutation thereof. In some embodiments, the SpCas9 domain comprises a D1135V, a R1335Q, and a T1337R mutation as numbered in the wild type SpCas9 amino acid sequence or a corresponding mutation in another SpCas9 protein. In some embodiments, the SpCas9 domain comprises one or more of a D1135X, a G1218X, a R1335X, and a T1337X mutation as numbered in the wild type SpCas9 amino acid sequence or a corresponding mutation in another SpCas9 protein, wherein X is any amino acid. In some embodiments, the SpCas9 domain comprises one or more of a D1135V, a G1218R, a R1335Q, and a T1337R mutation as numbered in the wild type SpCas9 amino acid sequence or a corresponding mutation in another SpCas9 protein. In some embodiments, the SpCas9 domain comprises a D1135V, a G1218R, a R1335Q, and a T1337R mutation as numbered in the wild type SpCas9 amino acid sequence or a corresponding mutation in another SpCas9 protein.

[0275] In some embodiments, the Cas9 domain of any of the fusion proteins provided herein comprises an amino acid sequence that is at least 60%, at least 65%, at least 70%, at least 75%, at least 80%, at least 85%, at least 90%, at least 95%, at least 96%, at least 97%, at least 98%, at least 99%, or at least 99.5% identical to any one of the Cas9 sequences provided herein.

[0276] In some embodiments, a base editor provided herein comprises a RNA guide programmable DNA binding protein that may be used to target and modify a specific nucleic acid (e.g., DNA or RNA) sequence. Nucleic acid programmable DNA binding proteins include, without limitation, Cas9 (e.g., nuclease inactive Cas9 and Cas9 nickase), CasX, CasY, Cas12a (Cpf1), Cas12b, C2c1, C2c2, C2C3, and Argonaute. One example of an nucleic acid programmable DNA-binding protein that has different PAM specificity than Cas9 is Clustered Regularly Interspaced Short Palindromic Repeats from Prevotella and Francisella 1 (Cpf1). Similar to Cas9, Cpf1 is also a class 2 CRISPR effector. It has been shown that Cpf1 mediates robust DNA interference with features distinct from Cas9. Cpf1 is a single RNA-guided endonuclease lacking tracrRNA, and it utilizes a T-rich protospacer-adjacent motif (TTN, TTTN, or YTN). Cpf1 proteins described in Yamano et ah, “Crystal structure of Cpf1 in complex with guide RNA and target DNA.” Cell (165) 2016, p. 949-962; the entire contents of which is hereby incorporated by reference.

[0277] In some embodiments, a base editor provided herein comprises a nuclease inactive Cpf1 protein or a variant thereof. The Cpf1 protein has a RuvC-like endonuclease domain that is similar to the RuvC domain of Cas9 but does not have a HNH endonuclease domain, and the N-terminal of Cpf1 does not have the alfa-helical recognition lobe of Cas9. In some embodiments, the Cpf1 nickase comprises one or more mutations corresponding to D917A, E1006A, or D1255A as numbered in the Francisella novicida Cpf1 protein.

[0278] Wild type Francisella novicida Cpf1 amino acid sequence is provided below:

(SEQ ID NO: 53)
MSIYQEFVNKYSLSKTLRFELIPQGKTLENIKARGLILDDEKRAKDYKKA
KQIIDKYHQFFIEEILSSVCISEDLLQNYSDVYFKLKKSDDDNLQKDFKS
AKDTIKKQISEYIKDSEKFKNLFNQNLIDAKKGQESDLILWLKQSKDNGI
ELFKANSDITDIDEALEIIKSFKGWTTYFKGFHENRKNVYSSNDIPTSII
YRIVDDNLPKFLENKAKYESLKDKAPEAINYEQIKKDLAEELTFDIDYKT
SEVNQRVFSLDEVFEIANFNNYLNQSGITKFNTIIGGKFVNGENTKRKGI
NEYINLYSQQINDKTLKKYKMSVLFKQILSDTESKSFVIDKLEDDSDVVT
TMQSFYEQIAAFKTVEEKSIKETLSLLFDDLKAQKLDLSKIYFKNDKSLT
DLSQQVFDDYSVIGTAVLEYITQQIAPKNLDNPSKKEQELIAKKTEKAKY
LSLETIKLALEEFNKHRDIDKQCRFEEILANFAAIPMIFDEIAQNKDNLA
QISIKYQNQGKKDLLQASAEDDVKAIKDLLDQTNNLLHKLKIFHISQSED
KANILDKDEHFYLVFEECYFELANIVPLYNKIRNYITQKPYSDEKFKLNF
ENSTLANGWDKNKEPDNTAILFIKDDKYYLGVMNKKNNKIFDDKAIKENK
GEGYKKIVYKLLPGANKMLPKVFFSAKSIKFYNPSEDILRIRNHSTHTKN
GSPQKGYEKFEFNIEDCRKFIDFYKQSISKHPEWKDFGFRFSDTQRYNSI
DEFYREVENQGYKLTFENISESYIDSVVNQGKLYLFQIYNKDFSAYSKGR
PNLHTLYWKALFDERNLQDVVYKLNGEAELFYRKQSIPKKITHPAKEAIA
NKNKDNPKKESVFEYDLIKDKRFTEDKFFFHCPITINFKSSGANKFNDEI
NLLLKEKANDVHILSIDRGERHLAYYTLVDGKGNIIKQDTFNIIGNDRMK
TNYHDKLAAIEKDRDSARKDWKKINNIKEMKEGYLSQVVHEIAKLVIEYN
AIVVFEDLNFGFKRGRFKVEKQVYQKLEKMLIEKLNYLVFKDNEFDKTGG
VLRAYQLTAPFETFKKMGKQTGIIYYVPAGFTSKICPVTGFVNQLYPKYE
SVSKSQEFFSKFDKICYNLDKGYFEFSFDYKNFGDKAAKGKWTIASFGSR
LINFRNSDKNHNWDTREVYPTKELEKLLKDYSIEYGHGECIKAAICGESD
KKFFAKLTSVLNTILQMRNSKTGTELDYLISPVADVNGNFFDSRQAPKNM
PQDADANGAYHIGLKGLMLLGRIKNNQEGKKLNLVIKNEEYFEFVQNRNN

[0279] In some embodiments, the base editor comprises a Cpf1 protein. In some embodiments, the Cpf1 protein is a Cpf1 nickase. In some embodiments, the Cpf1 protein is a nuclease inactive Cpf1. In some embodiments, the Cpf1 protein comprises an amino acid sequence that is at least 85%, at least 90%, at least 91%, at least 92%, at least 93%, at least 94%, at least 95%, at least 96%, at least 97%, at least 98%, at least 99%, or at ease 99.5% identical to the FnCpf1 sequence provided herein. In some embodiments, the Cpf1 protein comprises mutations corresponding to D917A, E1006A, D1255A, D917A/E1006A, D917A/D1255A, E1006A/D1255A, or D917A/E1006A/D1255A as numbered in the wild type FnCpf1 sequence provided herein. It should be appreciated that Cpf1 from other bacterial species may also be used in accordance with the present disclosure.

[0280] In some embodiments, the nucleic acid programmable DNA binding protein comprises a Cas12b (C2c1), C2c2, or C2c3 protein or a variant thereof. Additional features of Cas proteins in Class 2 CRISPR-Cas systems described in Shmakov et al., “Discovery and Functional Characterization of Diverse Class 2 CRISPR Cas Systems”, Mol. Cell, 2015 Nov. 5; 60(3): 385-397, the entire contents of which is hereby incorporated by reference. Effectors of two of the systems, C2c1 and C2c3, contain RuvC-like endonuclease domains related to Cpf1. A third system, C2c2 contains an effector with two predicated HEPN RNase domains. Production of mature CRISPR RNA is tracrRNA-independent, unlike production of CRISPR RNA by C2c1. C2c1 depends on both CRISPR RNA and tracrRNA for DNA cleavage. The crystal structure of Alicyclobaccillus acidoterrastris C2c1 (AacC2c1) in complex with a chimeric single-molecule guide RNA (sgRNA) is described in Liu et al., “C2c1-sgRNA Complex Structure Reveals RNA-Guided DNA Cleavage Mechanism”, Mol. Cell, 2017 Jan. 19; 65(2):310-322; Yang et al., “PAM-dependent Target DNA Recognition and Cleavage by C2C1 CRISPR-Cas, the entire contents of which are hereby incorporated by reference.

[0281] An exemplary Cas12b amino acid sequence (Bacillus hisashii Cas12b) is provided below:

BhCas12b (Bacillus hisashii) NCBI Reference
Sequence: WP_095142515
(SEQ ID NO: 54)
MAPKKKRKVGIHGVPAAATRSFILKIEPNEEVKKGLWKTHEVLNHGIAYY
MNILKLIRQEAIYEHHEQDPKNPKKVSKAEIQAELWDFVLKMQKCNSFTH
EVDKDEVFNILRELYEELVPSSVEKKGEANQLSNKFLYPLVDPNSQSGKG
TASSGRKPRWYNLKIAGDPSWEEEKKKWEEDKKKDPLAKILGKLAEYGLI
PLFIPYTDSNEPIVKEIKWMEKSRNQSVRRLDKDMFIQALERFLSWESWN
LKVKEEYEKVEKEYKTLEERIKEDIQALKALEQYEKERQEQLLRDTLNTN
EYRLSKRGLRGWREIIQKWLKMDENEPSEKYLEVFKDYQRKHPREAGDYS
VYEFLSKKENHFIWRNHPEYPYLYATFCEIDKKKKDAKQQATFTLADPIN
HPLWVRFEERSGSNLNKYRILTEQLHTEKLKKKLTVQLDRLIYPTESGGW
EEKGKVDIVLLPSRQFYNQIFLDIEEKGKHAFTYKDESIKFPLKGTLGGA
RVQFDRDHLRRYPHKVESGNVGRIYFNMTVNIEPTESPVSKSLKIHRDDF
PKVVNFKPKELTEWIKDSKGKKLKSGIESLEIGLRVMSIDLGQRQAAAAS
IFEVVDQKPDIEGKLFFPIKGTELYAVHRASFNIKLPGETLVKSREVLRK
AREDNLKLMNQKLNFLRNVLHFQQFEDITEREKRVTKWISRQENSDVPLV
YQDELIQIRELMYKPYKDWVAFLKQLHKRLEVEIGKEVKHWRKSLSDGRK
GLYGISLKNIDEIDRTRKFLLRWSLRPTEPGEVRRLEPGQRFAIDQLNHL
NALKEDRLKKMANTIIMHALGYCYDVRKKKWQAKNPACQIILFEDLSNYN
PYEERSRFENSKLMKWSRREIPRQVALQGEIYGLQVGEVGAQFSSRFHAK
TGSPGIRCSVVTKEKLQDNRFFKNLQREGRLTLDKIAVLKEGDLYPDKGG
EKFISLSKDRKCVTTHADINAAQNLQKRFWTRTHGFYKVYCKAYQVDGQT
VYIPESKDQKQKIIEEFGEGYFILKDGVYEWVNAGKLKIKKGSSKQSSSE
LVDSDILKDSFDLASELKGEKLMLYRDPSGNVFPSDKWMAAGVFFGKLER
ILISKLTNQYSISTIEDDSSKQSMKRPAATKKAGQAKKKK

[0282] In some embodiments, the programmable DNA binding protein comprises an argonaute protein. One example of such a nucleic acid programmable DNA binding protein is an Argonaute protein from Natronobacterium gregoryi (NgAgo). NgAgo is a ssDNA-guided endonuclease. NgAgo binds 5′ phosphorylated ssDNA of -24 nucleotides (gDNA) to guide it to its target site and will make DNA double-strand breaks at the gDNA site. In contrast to Cas9, the NgAgo-gDNA system does not require a protospacer-adjacent motif (PAM). Using a nuclease inactive NgAgo (dNgAgo) can greatly expand the bases that may be targeted. The characterization and use of NgAgo have been described in Gao et al., Nat Biotechnol., 2016 July; 34(7):768-73. PubMed PMID: 27136078; Swarts et al., Nature. 507(7491) (2014):258-61; and Swarts et al., Nucleic Acids Res. 43(10) (2015):5120-9, each of which is incorporated herein by reference.

[0283] In some embodiments, the protospacer sequence comprises a nucleotide sequence that is at least 60%, at least 65%, at least 70%, at least 75%, at least 80%, at least 85%, at least 90%, at least 95%, at least 96%, at least 97%, at least 98%, at least 99%, at least 99.5%, at least 99.7%, or at least 99.9% identical to any one of the protospacer sequences listed in Table 1 or Table 24. In some embodiments, the protospacer sequence comprises any one of the protospacer sequences listed in Table 1 or Table 24. In some embodiments, the protospacer sequence is any one of the protospacer sequences listed in Table 1 or Table 24. In some embodiments, the protospacer sequence comprises a nucleotide sequence that is at least 60%, at least 65%, at least 70%, at least 75%, at least 80%, at least 85%, at least 90%, at least 95%, at least 96%, at least 97%, at least 98%, at least 99%, at least 99.5%, at least 99.7%, or at least 99.9% identical to any one of the sequences of SEQ ID NOs: 13-15, 50, 66-69, 81-252, and 1594-1617. In some embodiments, the protospacer sequence comprises any one of the sequences of SEQ ID NOs: 13-15, 50, 66-69, 81-252, and 1594-1617. In some embodiments, the protospacer sequence is any one of the sequences of SEQ ID NOs: 13-15, 50, 66-69, 81-252, and 1594-1617.

### Guide Polynucleotides

[0284] Some aspects of this disclosure provide complexes comprising any of the fusion proteins provided herein, and a guide polynucleotide bound to a programmable DNA binding protein, e.g. a Cas9 domain of the base editor or fusion protein.

[0285] In some embodiments, a guide polynucleotide is a guide polynucleotide, a guide RNA (gRNA), or a nucleic acid encoding the same.

[0286] In some embodiments, the guide polynucleotide comprises a single nucleic acid sequence. In some embodiments, the guide polynucleotide comprises two nucleic acid sequences. In some embodiments, the guide nucleic acid (e.g., guide RNA) is from 15-100 nucleotides long and comprises a sequence of at least 10 contiguous nucleotides that is complementary to a target sequence. In some embodiments, the guide RNA is 15, 16, 17, 18, 19, 20, 21, 22, 23, 24, 25, 26, 27, 28, 29, 30, 31, 32, 33, 34, 35, 36, 37, 38, 39, 40, 41, 42, 43, 44, 45, 46, 47, 48, 49, or 50 nucleotides long. In some embodiments, the guide RNA comprises a sequence of 15, 16, 17, 18, 19, 20, 21, 22, 23, 24, 25, 26, 27, 28, 29, 30, 31, 32, 33, 34, 35, 36, 37, 38, 39, or 40 contiguous nucleotides that is complementary to a target sequence. In some embodiments, the target sequence is a DNA sequence. In some embodiments, the target sequence is a sequence in the genome of a mammal. In some embodiments, the target sequence is a sequence in the genome of a human. In some embodiments, the 3′ end of the target sequence is immediately adjacent to a canonical PAM sequence (NGG). In some embodiments, the guide nucleic acid (e.g., guide RNA) is complementary to a sequence associated with a disease or disorder. In some embodiments, the guide nucleic acid (e.g., guide RNA) is complementary to a sequence associated with a disease or disorder having a mutation in a PCSK9 gene, a ANGPTL3 gene, or a APOC3 gene.

[0287] Some aspects of this disclosure provide methods of using the fusion proteins, or complexes comprising a guide nucleic acid (e.g., gRNA) and a nucleobase editor provided herein. For example, some aspects of this disclosure provide methods comprising contacting a DNA, or RNA molecule with any of the fusion proteins provided herein, and with at least one guide nucleic acid (e.g., guide RNA), wherein the guide nucleic acid, (e.g., guide RNA) is about 15-100 nucleotides long and comprises a sequence of at least 10 contiguous nucleotides that is complementary to a target sequence. In some embodiments, the 3′ end of the target sequence is immediately adjacent to a canonical PAM sequence (NGG). In some embodiments, the 3′ end of the target sequence is not immediately adjacent to a canonical PAM sequence (NGG). In some embodiments, the 3′ end of the target sequence is immediately adjacent to an AGC, GAG, TTT, GTG, or CAA sequence.

[0288] In some embodiments, a guide polynucleotide is a DNA. In some embodiments, a guide polynucleotide is an RNA. In some embodiments, a guide polynucleotide is a modified, artificial polynucleotides. In some embodiments, a guide polynucleotide is a single or single molecule polynucleotide. In some embodiments, a guide polynucleotide comprises dual polynucleotides. In some embodiments, a guide polynucleotide is a dual polynucleotides connected by a linker. In some embodiments, a guide polynucleotide is a dual polynucleotides connected by a non-nucleic acid linker. In some embodiments, a guide polynucleotide is a dual polynucleotides connected by a peptide linker or a chemical linker. In some embodiments, the guide polynucleotide is a single guide RNA. The guide RNA (gRNA) may guide the programmable DNA binding protein, e.g., a Class 2 Cas nuclease, e.g. a Cas9 to a target sequence on a target nucleic acid molecule, where the gRNA hybridizes with and the programmable DNA binding protein and modifies the target sequence. In some embodiments, the gRNA and the base editor fusion protein may form a ribonucleoprotein (RNP), e.g., a CRISPR/Cas complex. In some embodiments, the CRISPR complex may be a Type II CRISPR/Cas9 complex. In some embodiments, the CRISPR/Cas complex may be a Type V CRISPR/Cas complex, such as a Cpf1/guide RNA complex.

[0289] A gRNA can comprise at least three regions: a first region at the 5′ end that can bind to the complementary strand of a target site in a chromosomal sequence (spacer region), a second internal region that can form a stem loop structure, and a third 3′ region that can be single-stranded. A first region of each guide RNA can also be different such that each gRNA guides a protein, e.g., Cas9, to a specific target site. Further, second and third regions of each gRNA can be identical in all gRNAs. A second region of a gRNA may form a secondary structure. In some embodiments, a secondary structure formed by a gRNA can comprise a stem (or hairpin) and a loop. A length of a loop and a stem can vary. In some embodiments, a loop can range from about 3 to about 10 nucleotides in length. In some embodiments, a stem can range from about 6 to about 20 nucleotides in length. A stem can comprise one or more bulges of 1 to 10 nucleotides or about 10 nucleotides. In some embodiments, the overall length of a second region can range from about 16 to 60 nucleotides in length. In some embodiments, a loop can be about 4 nucleotides in length. In some embodiments, a stem can be about 12 in length. A third region of gRNA at the 3′ end can be essentially single-stranded. In some embodiments, a third region is sometimes not complementary to any chromosomal sequence in a cell of interest and is sometimes not complementary to the rest of a gRNA. In addition, the length of a third region can vary. In some embodiments, a third region can be more than 3 or more than 4 nucleotides in length. For example, the length of a third region can range from about 5 to 60 nucleotides in length.

[0290] A gRNA for a base editor system can comprise a CRISPR RNA (crRNA) and a trans-activating crRNA (tracrRNA). In some embodiments, the crRNA may comprise a targeting sequence (or spacer sequence) that hybridizes with the complementary strand of the target sequence on the target nucleic acid molecule. The crRNA may also comprise a flagpole that is complementary to and hybridizes with a portion of the tracrRNA. In some embodiments, the crRNA may parallel the structure of a naturally occurring crRNA transcribed from a CRISPR locus of a bacteria, where the targeting sequence acts as the protospacer of the Cas9 in the base editor system. The gRNA may target any sequence of interest via the targeting sequence of the crRNA. In some embodiments, the degree of complementarity between the targeting sequence of the gRNA and the target sequence on the target nucleic acid molecule is at least about 60%, 65%, 70%, 75%, 80%, 85%, 90%, 95%, 97%, 98%, 99%, or 100%. In some embodiments, the targeting sequence of the gRNA and the target sequence on the target nucleic acid molecule may be 100% complementary. In other embodiments, the targeting sequence of the gRNA and the target sequence on the target nucleic acid molecule may contain at least one mismatch. For example, the targeting sequence of the gRNA and the target sequence on the target nucleic acid molecule may contain 1, 2, 3, 4, 5, 6, 7, 8, 9, or 10 mismatches.

[0291] In some embodiments, the length of the targeting sequence depends on the CRISPR/Cas component of the base editor system and components used. For example, different Cas proteins from different bacterial species have varying optimal targeting sequence lengths. Accordingly, the targeting sequence may comprise 5, 6, 7, 8, 9, 10, 11, 12, 13, 14, 15, 16, 17, 18, 19, 20, 21, 22, 23, 24, 25, 26, 27, 28, 29, 30, 31, 32, 33, 34, 35, 36, 37, 38, 39, 40, 41, 42, 43, 44, 45, 46, 47, 48, 49, 50, or more than 50 nucleotides in length. In some embodiments, the targeting sequence comprised 18-24 nucleotides in length. In some embodiments, the targeting sequence comprises 19-21 nucleotides in length. In some embodiments, the targeting sequence comprises 20 nucleotides in length.

[0292] In some embodiments, the guide RNA is a “dual guide RNA” or “dgRNA”. In some embodiments, the dgRNA comprises a first RNA molecule comprising a crRNA, and a second RNA molecule comprising a tracrRNA. The first and second RNA molecules may form a RNA duplex via the base pairing between the crRNA and the tracrRNA (e.g. the repeat and anti repeat). In some embodiments, the guide RNA is a “single guide RNA” or “sgRNA.” In some embodiments, the sgRNA may comprise a crRNA covalently linked to a tracrRNA. In some embodiments, the crRNA and the tracrRNA may be covalently linked via a linker. In some embodiments, the single-molecule guide RNA may comprise a stem-loop structure via the base pairing between the crRNA and the tracrRNA. In some embodiments, the sgRNA is a “Cas9 sgRNA” capable of directing a Cas9 protein. In certain embodiments, the guide RNA comprises a crRNA and tracrRNA sufficient for forming an active complex with a Cas9 protein and mediating RNA-guided DNA modification. The term “gRNA” and “sgRNA” are used interchangeably throughout this application. In some embodiments, more than one guide RNAs can be used; each guide RNA contains a different targeting sequence, such that the base editor system modifies more than one target sequence. In some embodiments, one or more guide RNAs may have the same or differing properties such as activity or stability within a base editor complex. Where more than one guide RNA is used, each guide RNA can be encoded on the same or on different expression cassettes. The promoters used to drive expression of the more than one guide RNA may be the same or different.

[0293] In some embodiments, the gRNA or mRNA encoding Cas protein is modified. The modifications can comprise chemical alterations, synthetic modifications, nucleotide additions, and/or nucleotide subtractions and modified nucleosides or nucleotides can be present in a gRNA. A gRNA or Cas protein-encoding mRNA comprising one or more modified nucleosides or nucleotides is called a “modified” RNA to describe the presence of one or more non-naturally and/or naturally occurring components or configurations that are used instead of or in addition to the canonical A, G, C, and U residues. In some embodiments, a modified RNA is synthesized with a non-canonical nucleoside or nucleotide. Modified nucleosides and nucleotides can include one or more of: (i) alteration, e.g., replacement, of one or both of the non-linking phosphate oxygens and/or of one or more of the linking phosphate oxygens in the phosphodiester backbone linkage (an exemplary backbone modification); (ii) alteration, e.g., replacement, of a constituent of the ribose sugar, e.g., of the 2′ hydroxyl on the ribose sugar (an exemplary sugar modification); (iii) wholesale replacement of the phosphate moiety with “dephospho” linkers (an exemplary backbone modification); (iv) modification or replacement of a naturally occurring nucleobase, including with a non-canonical nucleobase (an exemplary base modification); (v) replacement or modification of the ribose-phosphate backbone (an exemplary backbone modification); (vi) modification of the 3′ end or 5′ end of the oligonucleotide, e.g., removal, addition, modification, or replacement of a terminal phosphate group or conjugation of a moiety, cap, or linker (such 3′ or 5′ cap modifications may comprise a sugar and/or backbone modification); and (vii) modification or replacement of the sugar (an exemplary sugar modification). The modifications can enhance genome editing by CRISPR/Cas. A modification can alter chirality of a gRNA. In some cases, chirality may be uniform or stereopure after a modification. A guide RNA can also be truncated. Truncation can be used to reduce undesired off-target mutagenesis. The truncation can comprise any number of nucleotide deletions. For example, the truncation can comprise 1, 2, 3, 4, 5, 10, 15, 20, 25, 30, 40, 50 or more nucleotides. In some embodiments, the term “cap,” as used herein, may be used to refer to one or more specially altered or modified nucleotides, e.g., specially altered or modified nucleotides on the 5′ end of mRNA. In some embodiments, the cap comprises to a modified guanine (G) nucleotide. In some embodiments, the cap refers to the 5′ end modification of mRNAs by addition of 7-Methylguanosine (N7-methyl guanosine or m7G). In some embodiments, “capping” of the mRNA structure plays a crucial role in a variety of cellular processes which include translation initiation, splicing, intracellular transport, and turnover. In some embodiment, the 5′ cap enhances mRNA stability as well as translation efficiency. Exemplary cap analogs include, but are not limited to, standard cap analog m7G(5′)ppp(5′)G, anti-reverse cap analog (ARCA) m7,3′-OGpppG (or 3′-O-Me-m7G(5′) ppp(5′)G), unmethylated cap analog G (5′)ppp(5′)G, methylated cap analog for A+1 sites m7G(5′)ppp(5′)A, and unmethylated cap analog for A+1 sites G(5′)ppp(5′)A. Additional methods of obtaining mRNA cap analogs are described in Kowalska et al., RNA 2008 14(6): 1119-1131, which is incorporated herein in its entirety.

[0294] In some embodiments, the guide RNA sequence comprises a nucleotide sequence that is at least 60%, at least 65%, at least 70%, at least 75%, at least 80%, at least 85%, at least 90%, at least 95%, at least 96%, at least 97%, at least 98%, at least 99%, at least 99.5%, at least 99.7%, or at least 99.9% identical to any one of the guide sequences listed in Table 1 or Table 24. In some embodiments, the guide RNA sequence comprises any one of the guide RNA sequences listed in Table 1 or Table 24. In some embodiments, the guide RNA sequence is any one of the guide RNA sequences listed in Table 1 or Table 24. In some embodiments, the guide RNA sequence comprises a nucleotide sequence that is at least 60%, at least 65%, at least 70%, at least 75%, at least 80%, at least 85%, at least 90%, at least 95%, at least 96%, at least 97%, at least 98%, at least 99%, at least 99.5%, at least 99.7%, or at least 99.9% identical to any one of the sequences of SEQ ID NOs: 9-11, 55, 59, 253-452, 1618-1635, 1637-1800, 1802-2135, and 2191. In some embodiments, the guide RNA sequence comprises any one of the sequences of SEQ ID NOs: 9-11, 55, 59, 253-452, 1618-1635, 1637-1800, 1802-2135, and 2191. In some embodiments, the guide RNA sequence is any one of the sequences of SEQ ID NOs: 9-11, 55, 59, 253-452, 1618-1635, 1637-1800, 1802-2135, and 2191.

### Off-Target Effects

[0295] With standard CRISPR-Cas9 genome editing, off-target mutagenesis—i.e., edits at genomic sites other than the intended target site—can occur at sites that share a high degree of sequence similarity with the protospacer sequence encoded in the gRNA.

[0296] As used herein, off-target effect may be used refer to modifications, including indels, at genomic sites other than intended target site, for example, a protospacer sequence recognized by the guide RNA sequence. In the context of base editing, off-target editing may occur at genomic sites remote from an intended target site, or in close proximity to the intended target site. For example, one or more bases besides the target nucleobase in the base editing window may be edited (“bystander editing”). In certain embodiments, off-target base editing, e.g. bystander editing does not impact expression or function of the target gene.

[0297] Potential off-target sequence candidates in the genome may be predicted by bioinformatic analyses of the human genome using, e.g., the MIT Specificity Score (calculated by http://crispor.tefor.net/; minimum score of 50) or by in vitro biochemical assays, e.g., ONE-seq.

[0298] Off-target editing may be determined by sequencing analysis. In some embodiments, off-target editing is calculated using net nucleobase editing at potential off-target sites in the genome. For example, net nucleobase editing efficiency may be determined using no-base editor or no-guide RNA as a control, where net nucleobase editing efficiency is obtained by editing rate observed in cells contacted with a LNP enclosing a base editor mRNA and a guide RNA subjected by editing rate observed in control cells at predicted off-target sites. Additional methods for estimating and reducing off-target editing are described in Rees et al., Nat. Rev. Genet. 2018 19(12): 770-788, which is incorporated herein by reference in its entirety.

[0299] Methods for selecting, designing, and validating gRNAs and targeting sequences (or spacer sequences) are described herein and known to those skilled in the art. Software tools can be used to optimize the gRNAs corresponding to a target nucleic acid sequence, e.g., to minimize total off-target activity across the genome. For example, for each possible targeting domain choice using S. pyogenes Cas9, all off-target sequences (preceding selected PAMs, e.g., NAG or NGG) may be identified across the genome that contain up to certain number (e.g., 1, 2, 3, 4, 5, 6, 7, 8, 9, or 10) of mismatched base-pairs. First regions of gRNAs complementary to a target site can be identified, and all first regions (e.g., crRNAs) can be ranked according to its total predicted off-target score; the top-ranked targeting domains represent those that are likely to have the greatest on-target and the least off-target activity. In some embodiments, a DNA sequence searching algorithm can be used to identify a target sequence in crRNAs of a gRNA for use with Cas9. A custom gRNA design software based on the public tool cas-offinder, which scores guides after calculating their genome-wide off-target propensity, can be also used to design a gRNA (Bae, et al., Cas-OFFinder: A fast and versatile algorithm that searches for potential off-target sites of Cas9 RNA-guided endonucleases. Bioinformatics 30, 1473-1475 (2014)). In some embodiments, RepeatMasker program can be used to screen repeat elements and regions of low complexity in the input DNA sequences. In addition, the number of residues that could unintentionally be targeted (e.g., off-target residues that could potentially reside on ssDNA within the target nucleic acid locus) may be minimized to reduce the impact of potential substrate promiscuity of a deaminase domain in the nucleobase editor system. Candidate gRNAs can be functionally evaluated by using methods known in the art and/or as set forth herein.

[0300] In some embodiments, target sequences for a Cas9 protein in a base editor system can be selected based on the presence of target sequences of a gene of interest in one or more species. For example, a sequence may be selected as a target sequence if the sequence match target sequences in both human and cynomolgus monkey orthologs of a gene of interest. In some embodiments, target sequences for a Cas9 nuclease can be selected based on predicted off-target profiles, as judged by the MIT Specificity Score (calculated by http://crispor.tefor.net/). For example, a sequence may be selected as a target sequence if the sequence has a favorable predicted off-target profiles (e.g., minimum score of 50 when judged by the MIT Specificity Score). In some embodiments, target sequences for an adenine base editor (ABE) can be selected based on the ability of editing an adenine base within a splice donor site or a splice acceptor site in a target gene. In some embodiments, target sequences for an ABE can be selected based on the position of an adenine, e.g., if the adenine lies within the editing window of the ABE.

[0301] The gRNAs described herein can be synthesized chemically, enzymatically, or a combination thereof. For example, the gRNA can be synthesized using standard phosphoramidite-based solid-phase synthesis methods. Alternatively, the gRNA can be synthesized in vitro by operably linking DNA encoding the gRNA to a promoter control sequence that is recognized by a phage RNA polymerase. Examples of suitable phage promoter sequences include, but are not limited to, T7, T3, SP6 promoter sequences, or variations thereof. In some embodiments, gRNA comprises two separate molecules (e.g., crRNA and tracrRNA) and one molecule (e.g., crRNA) can be chemically synthesized and the other molecule (e.g., tracrRNA) can be enzymatically synthesized.

[0302] In some aspects, provided herein, is a composition for gene modification comprising a single guide RNA (sgRNA) described herein and the base editor fusion protein or a nucleic acid sequence encoding the base editor fusion protein. In some embodiments, the composition further comprises a vector that comprises the nucleic acid sequence encoding the base editor fusion protein. In some embodiments, base editor fusion protein comprises a Cas9 protein. In some embodiments, the Cas9 protein is a the Cas9 protein is a Streptococcus pyogenes Cas9. In some embodiments, the composition further comprises a pharmaceutically acceptable carrier. Non-limiting examples of pharmaceutically acceptable carriers are listed in “Pharmaceutical composition and methods of treatment” section of this application. In some embodiments, the composition described herein can be provided in a lipid nanoparticle.

Chemically Modified Guide RNAs (gRNAs)

[0303] The present disclosure, provided herein, relates to a chemically modified CRISPR guide RNA (gRNA) that may be used in association with any general CRISPR/Cas system, for example, a base editor system as described herein. gRNAs (e.g., sgRNAs, short-sgRNAs, crRNAs, tracrRNAs, or dgRNAs) may comprise modifications at various nucleotide positions. In some aspects, provided herein, is a guide RNA (gRNA) or a single guide RNA (sgRNA) that comprises (i) a chemical modification at a nucleotide and (ii) an unmodified nucleotide. In some embodiments, the gRNA or the sgRNA may comprise a modification at a specific nucleotide position. In some embodiments, the gRNA or the sgRNA may comprise one or more modifications at one or more specific positions.

[0304] In an aspect, chemically modified CRISPR guide RNAs provided herein comprise modifications based on crystal structures. Not intended to be bound by a particular theory, X-ray crystal structure based guide design may be used to optimize gRNA modification in complex with the Cas protein, e.g. Cas9. In some embodiments, a nucleotide where a 2′-OH is in close proximity with a Cas9 protein in the Cas9-gRNA complex is unmodified. In some embodiments, a nucleotide where a 2′-OH is in contact with a Cas9 protein in the Cas9-gRNA complex is unmodified. In some embodiments, a nucleotide where a 2′-OH is in contact with a Cas9 protein with a hydrogen bond in the Cas9-gRNA complex is unmodified. In some embodiments, the Cas9-gRNA complex is a pre-catalytic ternary complex. In some embodiments, a nucleotide where a 2′-OH is in close proximity with another part of the gRNA in the Cas9-gRNA complex is unmodified. In some embodiments, a nucleotide where a 2′-OH is in contact with another part of the gRNA in the Cas9-gRNA complex is unmodified. In some embodiments, a nucleotide where a 2′-OH is in contact with another part of the gRNA with a hydrogen bond in the Cas9-gRNA complex is unmodified. In some embodiments, the Cas9-gRNA complex is a pre-catalytic ternary complex. As a person of skill in the art would understand, the term “clash” as used herein refers to physically-unlikely overlapping atomic volumes in a structure. Incorporation of a 2′O-Me modification in these situations would potentially result in structural rearrangement(s) that could be detrimental to RNP function. As a person of skill in the art would understand, the term “contact” as used herein means a stable, non-covalent interaction between two functional groups, e.g. a hydrogen bond. In some embodiments, a nucleotide where a clash with another part of the gRNA is predicted if a 2′-OH is replaced with a 2′-OMe in the Cas9-gRNA complex is unmodified. In some embodiments, a nucleotide where a clash with another 2′-OH in the gRNA is predicted if a 2′-OH is replaced with a 2′-OMe in the Cas9-gRNA complex is unmodified. In some embodiments, the Cas9-gRNA complex is a pre-catalytic ternary complex. In some embodiments, a nucleotide that is solvent-exposed or otherwise distant from Cas protein residues in the Cas9-gRNA complex comprises a chemical modification. In some embodiments, a nucleotide that is solvent-exposed or otherwise distant from another nucleotide in the gRNA in the Cas9-gRNA complex comprises a chemical modification. In some embodiments, the chemical modification is a 2′-OMe modification. Additional description of Cas9-gRNA crystal structure is included in Jiang F, Taylor D W, Chen J S, Komfeld J E, Zhou K, Thompson A J, Nogales E, Doudna J A. Structures of a CRISPR-Cas9 R-loop complex primed for DNA cleavage. Science. 2016 Feb. 19; 351(6275):867-71, incorporated herein by reference in its entirety.

[0305] Modifications to guide RNA nucleotides can include, but are not limited to, 2′-O-methyl modifications, 2′-O-(2-methoxyethyl) modifications, 2′-fluoro modifications, phosphorothioate modifications, inverted abasic modifications, deoxyribonucleotides, bicylic ribose analog (e.g., locked nucleic acid (LNA), C-ethylene-bridged nucleic acid (ENA), bridged nucleic acid (BNA), unlocked nucleic acid (UNA)), base or nucleobase modifications, internucleoside linkage modifications, ribonebularine, 2′-O-methylnebularine, or 2′-deoxynebularine. Other examples of modifications include, but are not limited to, 5′adenylate, 5′ guanosine-triphosphate cap, 5′N7-Methylguanosine-triphosphate cap, 5′triphosphate cap, 3′phosphate, 3′thiophosphate, 5′phosphate, 5′thiophosphate, Cis-Syn thymidine dimer, trimers, C12 spacer, C3 spacer, C6 spacer, dSpacer, PC spacer, rSpacer, Spacer 18, Spacer 9,3′-3′ modifications, 5′-5′ modifications, abasic, acridine, azobenzene, biotin, biotin BB, biotin TEG, cholesteryl TEG, desthiobiotin TEG, DNP TEG, DNP-X, DOTA, dT-Biotin, dual biotin, PC biotin, psoralen C2, psoralen C6, TINA, 3′DABCYL, black hole quencher 1, black hole quencer 2, DABCYL SE, dT-DABCYL, IRDye QC-1, QSY-21, QSY-35, QSY-7, QSY-9, carboxyl linker, thiol linkers, 2′deoxyribonucleoside analog purine, 2′deoxyribonucleoside analog pyrimidine, ribonucleoside analog, 2′-O-methyl ribonucleoside analog, sugar modified analogs, wobble/universal bases, fluorescent dye label, 2′fluoro RNA, 2′O-methyl RNA, methylphosphonate, phosphodiester DNA, phosphodiester RNA, phosphothioate DNA, phosphorothioate RNA, UNA, pseudouridine-5′-triphosphate, 5-methylcytidine-5′-triphosphate, 2-O-methyl 3phosphorothioate or any combinations thereof.

[0306] In some embodiments, the ribose group (or sugar) may be modified. In some embodiments, modified ribose group may control oligonucleotide binding affinity for complementary strands, duplex formation, or interaction with nucleases. Examples of chemical modifications to the ribose group include, but are not limited to, 2′-O-methyl (2′-OMe), 2′-fluoro (2′-F), 2′-deoxy, 2′-O-(2-methoxyethyl) (2′-MOE), 2′-NH2, 2′-O-Allyl, 2′-O-Ethylamine, 2′-O-Cyanoethyl, 2′-O-Acetalester, or a bicyclic nucleotide such as locked nucleic acid (LNA), 2′-(5-constrained ethyl (S-cEt)), constrained MOE, or 2′-0,4′-C-aminomethylene bridged nucleic acid (2′,4′-BNANC). In some embodiments, 2′-O-methyl modification can increase binding affinity of oligonucleotides. In some embodiments, 2′-O-methyl modification can enhance nuclease stability of oligonucleotides. In some embodiments, 2′-fluoro modification can increase oligonucleotide binding affinity and nuclease stability. In this application, a ribonucleotide in lowercase in gRNA sequence depicts 2′-OMe modification (e.g., Table 1 or Table 24) (lowercase letter s indicates a phosphorothioate linkage).

[0307] In some embodiments, the phosphate group may be chemically modified. Examples of chemical modifications to the phosphate group includes, but are not limited to, a phosphorothioate (PS), phosphonoacetate (PACE), thiophosphonoacetate (thioPACE), amide, triazole, phosphonate, or phosphotriester modification. In some embodiments, PS linkage can refer to a bond where a sulfur is substituted for one nonbridging phosphate oxygen in a phosphodiester linkage, e.g., between nucleotides. An “s” may be used to depict a PS modification in gRNA sequences in this application (e.g., Table 1 or Table 24). In some embodiments, a gRNA or an sgRNA may comprise a phosphorothioate (PS) linkage at a 5′ end or at a 3′ end. In some embodiments, a gRNA or an sgRNA may comprise a phosphorothioate (PS) linkage at a 5′ end. In some embodiments, a gRNA or an sgRNA may comprise a phosphorothioate (PS) linkage at a 3′ end. In some embodiments, a gRNA or an sgRNA may comprise a phosphorothioate (PS) linkage at a 5′ end and at a 3′ end. In some embodiments, a gRNA or an sgRNA may comprise one, two, or three, or more than three phosphorothioate linkages at the 5′ end or at the 3′ end. In some embodiments, a gRNA or an sgRNA may comprise three phosphorothioate (PS) linkages at the 5′ end or at the 3′ end. In some embodiments, a gRNA or an sgRNA may comprise three phosphorothioate linkages at the 3′ end. In some embodiments, a gRNA or an sgRNA may comprise two and no more than two (i.e., only two) contiguous phosphorothioate (PS) linkages at the 5′ end or at the 3′ end. In some embodiments, a gRNA or an sgRNA may comprise three contiguous phosphorothioate (PS) linkages at the 5′ end or at the 3′ end. In some embodiments, a gRNA or an sgRNA may comprise the sequence 5′-UsUsU-3′ at the 3′ end or at the 5′ end, wherein U indicates a uridine and wherein s indicates a phosphorothioate (PS) linkage. In some embodiments, a gRNA or an sgRNA may comprise the sequence 5′-ususu-3′ at the 3′end or at the 5′ end, wherein u indicates a 2′-O-methyluridine and wherein s indicates a phosphorothioate (PS) linkage. In some embodiments, a gRNA or an sgRNA may comprise the sequence 5′-ususuUUU-3′ at the 3′end or at the 5′ end, wherein U and u indicate uridine and 2′-O-methyluridine respectively, and wherein s indicates a phosphorothioate (PS) linkage. In some embodiments, a gRNA or an sgRNA may comprise the sequence 5′-ususuUuU-3′ at the 3′end or at the 5′ end, wherein U and u indicate uridine and 2′-O-methyluridine respectively, and wherein s indicates a phosphorothioate (PS) linkage. In some embodiments, a gRNA or an sgRNA may comprise the sequence 5′-usususuUuU-3′ at the 3′end, wherein U and u indicate uridine and 2′-O-methyluridine respectively, and wherein s indicates a phosphorothioate (PS) linkage. In some embodiments, a gRNA or an sgRNA may comprise the sequence 5′-ususuuuu-3′ at the 3′end, wherein u indicates 2′-O-methyluridine, and wherein s indicates a phosphorothioate (PS) linkage.

[0308] In some embodiments, the nucleobase may be chemically modified. Examples of chemical modifications to the nucleobase include, but are not limited to, 2-thiouridine, 4-thiouridine, N6-methyladenosine, pseudouridine, 2,6-diaminopurine, inosine, thymidine, 5-methylcytosine, 5-substituted pyrimidine, isoguanine, isocytosine, or halogenated aromatic groups.

[0309] In some embodiments the chemically modified gRNAs comprise nebularine. Nebularine is a purine ribonucleoside that is derived from a beta-D-ribose and is 9H-purine attached to a beta-D-ribofuranosyl residue at position 9 via a glycosidic (N-glycosyl) linkage. Nebularine is a purine ribonucleoside with no exocyclic functional moiety or substitution. In some embodiments, it is a purine ribonucleoside. In some embodiments, it is a purine D-ribonucleoside. In some embodiments, nebularine is further modified chemically. In this application, “X,” “x,” and “dX” may be used to depict a ribonebularine modification, a 2′-O-methylnebularine modification, and a 2′-deoxynebularine modification, respectively, in gRNA sequences (e.g., Table 1 or Table 24). In some embodiments, substitution of a nucleotide (e.g., A) of a gRNA sequence (e.g., spacer region or tracr region) with nebularine may reduce off-target effects without affecting the gRNA activity. In some embodiments, the nebularine, the deoxynebularine, or 2′-O-methylnebularine replaces an adenine in an unmodified gRNA or sgRNA. In some embodiments, the nebularine, the deoxynebularine, or 2′-O-methylnebularine is in the spacer sequence. In some embodiments, the nebularine, the deoxynebularine, or 2′-O-methylnebularine is in the tracrRNA sequence. In some embodiments, the nebularine, the deoxynebularine, or 2′-O-methylnebularine is in a tracrRNA sequence in the tracrRNA sequence. In some embodiments, the nebularine, the deoxynebularine, or 2′-O-methylnebularine is in a crRNA sequence in the tracrRNA sequence. In some embodiments, the nebularine, the deoxynebularine, or 2′-O-methylnebularine is in a stem loop structure in the tracrRNA sequence.

[0310] In some embodiments, the chemically modified gRNAs may comprise a total of 50-150 base pairs in length. In some embodiments, the chemically modified gRNAs may comprise a total of 50, 51, 52, 53, 54, 55, 56, 57, 58, 59, 60, 61, 62, 63, 64, 65, 66, 67, 68, 69, 70, 71, 72, 73, 74, 75, 76, 77, 78, 79, 80, 81, 82, 83, 84, 85, 86, 87, 88, 89, 90, 91, 92, 93, 94, 95, 96, 97, 98, 99, 100, 101, 102, 103, 104, 105, 106, 107, 108, 109, 110, 111, 112, 113, 114, 115, 116, 117, 118, 119, 120, 121, 122, 123, 124, 125, 126, 127, 128, 129, 130, 131, 132, 133, 134, 135, 136, 137, 138, 139, 140, 141, 142, 143, 144, 145, 146, 147, 148, 149, or 150 base pairs in length. In some embodiments, the chemically modified gRNAs may comprise a total of about 50 to about 140 base pairs in length. In some embodiments, the chemically modified gRNAs may comprise a total of about 50 to about 60, about 50 to about 70, about 50 to about 80, about 50 to about 90, about 50 to about 100, about 50 to about 110, about 50 to about 120, about 50 to about 130, about 50 to about 140, about 60 to about 70, about 60 to about 80, about 60 to about 90, about 60 to about 100, about 60 to about 110, about 60 to about 120, about 60 to about 130, about 60 to about 140, about 70 to about 80, about 70 to about 90, about 70 to about 100, about 70 to about 110, about 70 to about 120, about 70 to about 130, about 70 to about 140, about 80 to about 90, about 80 to about 100, about 80 to about 110, about 80 to about 120, about 80 to about 130, about 80 to about 140, about 90 to about 100, about 90 to about 110, about 90 to about 120, about 90 to about 130, about 90 to about 140, about 100 to about 110, about 100 to about 120, about 100 to about 130, about 100 to about 140, about 110 to about 120, about 110 to about 130, about 110 to about 140, about 120 to about 130, about 120 to about 140, or about 130 to about 140 base pairs in length. In some embodiments, the chemically modified gRNAs may comprise a total of about 50, about 60, about 70, about 80, about 90, about 100, about 110, about 120, about 130, or about 140 base pairs in length. In some embodiments, the chemically modified gRNAs may comprise a total of at least about 50, about 60, about 70, about 80, about 90, about 100, about 110, about 120, or about 130 base pairs in length. In some embodiments, the chemically modified gRNAs may comprise a total of at most about 60, about 70, about 80, about 90, about 100, about 110, about 120, about 130, or about 140 base pairs in length. In one embodiment, the chemically modified gRNAs may comprise a total of 100 base pairs in length. In another embodiment, the chemically modified gRNAs may comprise a total of 103 base pairs in length.

[0311] In some embodiments, the chemically modified gRNAs may comprise from 1 to 150 chemically modified nucleotides. In some embodiments, the chemically modified gRNAs may comprise a total of 1, 2, 3, 4, 5, 6, 7, 8, 9, 10, 11, 12, 13, 14, 15, 16, 17, 18, 19, 20, 21, 22, 23, 24, 25, 26, 27, 28, 29, 30, 31, 32, 33, 34, 35, 36, 37, 38, 39, 40, 41, 42, 43, 44, 45, 46, 47, 48, 49, 50, 51, 52, 53, 54, 55, 56, 57, 58, 59, 60, 61, 62, 63, 64, 65, 66, 67, 68, 69, 70, 71, 72, 73, 74, 75, 76, 77, 78, 79, 80, 81, 82, 83, 84, 85, 86, 87, 88, 89, 90, 91, 92, 93, 94, 95, 96, 97, 98, 99, 100, 101, 102, 103, 104, 105, 106, 107, 108, 109, 110, 111, 112, 113, 114, 115, 116, 117, 118, 119, 120, 121, 122, 123, 124, 125, 126, 127, 128, 129, 130, 131, 132, 133, 134, 135, 136, 137, 138, 139, 140, 141, 142, 143, 144, 145, 146, 147, 148, 149, or 150 chemically modified nucleotides. In some embodiments, the chemically modified gRNAs may comprise a total of about 1 to about 45 chemically modified nucleotides. In some embodiments, the chemically modified gRNAs may comprise a total of about 1 to about 3, about 1 to about 5, about 1 to about 10, about 1 to about 15, about 1 to about 20, about 1 to about 25, about 1 to about 30, about 1 to about 35, about 1 to about 40, about 1 to about 45, about 3 to about 5, about 3 to about 10, about 3 to about 15, about 3 to about 20, about 3 to about 25, about 3 to about 30, about 3 to about 35, about 3 to about 40, about 3 to about 45, about 5 to about 10, about 5 to about 15, about 5 to about 20, about 5 to about 25, about 5 to about 30, about 5 to about 35, about 5 to about 40, about 5 to about 45, about 10 to about 15, about 10 to about 20, about 10 to about 25, about 10 to about 30, about 10 to about 35, about 10 to about 40, about 10 to about 45, about 15 to about 20, about 15 to about 25, about 15 to about 30, about 15 to about 35, about 15 to about 40, about 15 to about 45, about 20 to about 25, about 20 to about 30, about 20 to about 35, about 20 to about 40, about 20 to about 45, about 25 to about 30, about 25 to about 35, about 25 to about 40, about 25 to about 45, about 30 to about 35, about 30 to about 40, about 30 to about 45, about 35 to about 40, about 35 to about 45, about 40 to about 45, or about 45 to about 50 chemically modified nucleotides. In some embodiments, the chemically modified gRNAs may comprise a total of about 1, about 3, about 5, about 10, about 15, about 20, about 25, about 30, about 35, about 40, about 45, or about 50 chemically modified nucleotides. In some embodiments, the chemically modified gRNAs may comprise a total of at least about 1, about 3, about 5, about 10, about 15, about 20, about 25, about 30, about 35, about 40, about 45, or about 50 chemically modified nucleotides. In some embodiments, the chemically modified gRNAs may comprise a total of at most about 3, about 5, about 10, about 15, about 20, about 25, about 30, about 35, about 40, about 45, or about 50 chemically modified nucleotides. In some embodiments, the chemically modified gRNAs may comprise a total of about 50 to about 140 chemically modified nucleotides. In some embodiments, the chemically modified gRNAs may comprise a total of about 50 to about 60, about 50 to about 70, about 50 to about 80, about 50 to about 90, about 50 to about 100, about 50 to about 110, about 50 to about 120, about 50 to about 130, about 50 to about 140, about 60 to about 70, about 60 to about 80, about 60 to about 90, about 60 to about 100, about 60 to about 110, about 60 to about 120, about 60 to about 130, about 60 to about 140, about 70 to about 80, about 70 to about 90, about 70 to about 100, about 70 to about 110, about 70 to about 120, about 70 to about 130, about 70 to about 140, about 80 to about 90, about 80 to about 100, about 80 to about 110, about 80 to about 120, about 80 to about 130, about 80 to about 140, about 90 to about 100, about 90 to about 110, about 90 to about 120, about 90 to about 130, about 90 to about 140, about 100 to about 110, about 100 to about 120, about 100 to about 130, about 100 to about 140, about 110 to about 120, about 110 to about 130, about 110 to about 140, about 120 to about 130, about 120 to about 140, or about 130 to about 140 chemically modified nucleotides. In some embodiments, the chemically modified gRNAs may comprise a total of about 50, about 60, about 70, about 80, about 90, about 100, about 110, about 120, about 130, or about 140 chemically modified nucleotides. In some embodiments, the chemically modified gRNAs may comprise a total of at least about 50, about 60, about 70, about 80, about 90, about 100, about 110, about 120, or about 130 chemically modified nucleotides. In some embodiments, the chemically modified gRNAs may comprise a total of at most about 60, about 70, about 80, about 90, about 100, about 110, about 120, about 130, or about 140 chemically modified nucleotides. In one embodiment, the chemically modified gRNAs may comprise a total of 54 chemically modified nucleotides. In another embodiment, the chemically modified gRNAs may comprise a total of 62 chemically modified nucleotides.

[0312] In some embodiments, the chemically modified gRNAs may comprise about 1% to about 100% chemically modified nucleotides. In some embodiments, the chemically modified gRNAs may comprise about 1% to about 10%, about 1% to about 20%, about 1% to about 30%, about 1% to about 40%, about 1% to about 50%, about 1% to about 60%, about 1% to about 70%, about 1% to about 80%, about 1% to about 90%, about 1% to about 95%, about 1% to about 100%, about 10% to about 20%, about 10% to about 30%, about 10% to about 40%, about 10% to about 50%, about 10% to about 60%, about 10% to about 70%, about 10% to about 80%, about 10% to about 90%, about 10% to about 95%, about 10% to about 100%, about 20% to about 30%, about 20% to about 40%, about 20% to about 50%, about 20% to about 60%, about 20% to about 70%, about 20% to about 80%, about 20% to about 90%, about 20% to about 95%, about 20% to about 100%, about 30% to about 40%, about 30% to about 50%, about 30% to about 60%, about 30% to about 70%, about 30% to about 80%, about 30% to about 90%, about 30% to about 95%, about 30% to about 100%, about 40% to about 50%, about 40% to about 60%, about 40% to about 70%, about 40% to about 80%, about 40% to about 90%, about 40% to about 95%, about 40% to about 100%, about 50% to about 60%, about 50% to about 70%, about 50% to about 80%, about 50% to about 90%, about 50% to about 95%, about 50% to about 100%, about 60% to about 70%, about 60% to about 80%, about 60% to about 90%, about 60% to about 95%, about 60% to about 100%, about 70% to about 80%, about 70% to about 90%, about 70% to about 95%, about 70% to about 100%, about 80% to about 90%, about 80% to about 95%, about 80% to about 100%, about 90% to about 95%, about 90% to about 100%, or about 95% to about 100% chemically modified nucleotides. In some embodiments, the chemically modified gRNAs may comprise about 1%, about 10%, about 20%, about 30%, about 40%, about 50%, about 60%, about 70%, about 80%, about 90%, about 95%, or about 100% chemically modified nucleotides. In some embodiments, the chemically modified gRNAs may comprise at least about 1%, about 10%, about 20%, about 30%, about 40%, about 50%, about 60%, about 70%, about 80%, about 90%, or about 95% chemically modified nucleotides. In some embodiments, the chemically modified gRNAs may comprise at most about 10%, about 20%, about 30%, about 40%, about 50%, about 60%, about 70%, about 80%, about 90%, about 95%, or about 100% chemically modified nucleotides.

[0313] In some embodiments, the chemically modified gRNAs may have chemically modified nucleotide on one or more of the positions 1, 2, 3, 4, 5, 6, 7, 8, 9, 10, 11, 12, 13, 14, 15, 16, 17, 18, 19, 20, 21, 22, 23, 24, 25, 26, 27, 28, 29, 30, 31, 32, 33, 34, 35, 36, 37, 38, 39, 40, 41, 42, 43, 44, 45, 46, 47, 48, 49, 50, 51, 52, 53, 54, 55, 56, 57, 58, 59, 60, 61, 62, 63, 64, 65, 66, 67, 68, 69, 70, 71, 72, 73, 74, 75, 76, 77, 78, 79, 80, 81, 82, 83, 84, 85, 86, 87, 88, 89, 90, 91, 92, 93, 94, 95, 96, 97, 98, 99, 100, 101, 102, 103, 104, 105, 106, 107, 108, 109, 110, 111, 112, 113, 114, 115, 116, 117, 118, 119, 120, 121, 122, 123, 124, 125, 126, 127, 128, 129, 130, 131, 132, 133, 134, 135, 136, 137, 138, 139, 140, 141, 142, 143, 144, 145, 146, 147, 148, 149, or 150 in the 5′-3′ direction in the gRNA sequence.

[0314] In some embodiments, the chemically modified gRNAs may have chemically modified nucleotide on one or more of the positions which are 1, 2, 3, 4, 5, 6, 7, 8, 9, 10, 11, 12, 13, 14, 15, 16, 17, 18, 19, 20, 21, 22, 23, 24, 25, 26, 27, 28, 29, 30, 31, 32, 33, 34, 35, 36, 37, 38, 39, 40, 41, 42, 43, 44, 45, 46, 47, 48, 49, 50, 51, 52, 53, 54, 55, 56, 57, 58, 59, 60, 61, 62, 63, 64, 65, 66, 67, 68, 69, 70, 71, 72, 73, 74, 75, 76, 77, 78, 79, 80, 81, 82, 83, 84, 85, 86, 87, 88, 89, 90, 91, 92, 93, 94, 95, 96, 97, 98, 99, 100, 101, 102, 103, 104, 105, 106, 107, 108, 109, 110, 111, 112, 113, 114, 115, 116, 117, 118, 119, 120, 121, 122, 123, 124, 125, 126, 127, 128, 129, 130, 131, 132, 133, 134, 135, 136, 137, 138, 139, 140, 141, 142, 143, 144, 145, 146, 147, 148, or 149 base pairs from the 5′ end of the gRNA sequence.

[0315] In some embodiments, the chemically modified gRNAs may have chemically modified nucleotide on one or more the positions where are 1, 2, 3, 4, 5, 6, 7, 8, 9, 10, 11, 12, 13, 14, 15, 16, 17, 18, 19, 20, 21, 22, 23, 24, 25, 26, 27, 28, 29, 30, 31, 32, 33, 34, 35, 36, 37, 38, 39, 40, 41, 42, 43, 44, 45, 46, 47, 48, 49, 50, 51, 52, 53, 54, 55, 56, 57, 58, 59, 60, 61, 62, 63, 64, 65, 66, 67, 68, 69, 70, 71, 72, 73, 74, 75, 76, 77, 78, 79, 80, 81, 82, 83, 84, 85, 86, 87, 88, 89, 90, 91, 92, 93, 94, 95, 96, 97, 98, 99, 100, 101, 102, 103, 104, 105, 106, 107, 108, 109, 110, 111, 112, 113, 114, 115, 116, 117, 118, 119, 120, 121, 122, 123, 124, 125, 126, 127, 128, 129, 130, 131, 132, 133, 134, 135, 136, 137, 138, 139, 140, 141, 142, 143, 144, 145, 146, 147, 148, or 149 base pairs from the 3′ end of the gRNA sequence.

[0316] In some embodiments, the chemically modified gRNA may be a sgRNA. The term “gRNA” and “sgRNA” are used interchangeably in this application. In some embodiments, the sgRNA may comprise one or more chemically modified nucleotides. In some embodiments, the chemically modified sgRNA may comprise a total of 50-150 base pairs in length. In some embodiments, the chemically modified sgRNA may comprise a total of 50, 51, 52, 53, 54, 55, 56, 57, 58, 59, 60, 61, 62, 63, 64, 65, 66, 67, 68, 69, 70, 71, 72, 73, 74, 75, 76, 77, 78, 79, 80, 81, 82, 83, 84, 85, 86, 87, 88, 89, 90, 91, 92, 93, 94, 95, 96, 97, 98, 99, 100, 101, 102, 103, 104, 105, 106, 107, 108, 109, 110, 111, 112, 113, 114, 115, 116, 117, 118, 119, 120, 121, 122, 123, 124, 125, 126, 127, 128, 129, 130, 131, 132, 133, 134, 135, 136, 137, 138, 139, 140, 141, 142, 143, 144, 145, 146, 147, 148, 149, or 150 base pairs in length. In some embodiments, the chemically modified sgRNA may comprise a total of about 50 to about 140 base pairs in length. In some embodiments, the chemically modified sgRNA may comprise a total of about 50 to about 60, about 50 to about 70, about 50 to about 80, about 50 to about 90, about 50 to about 100, about 50 to about 110, about 50 to about 120, about 50 to about 130, about 50 to about 140, about 60 to about 70, about 60 to about 80, about 60 to about 90, about 60 to about 100, about 60 to about 110, about 60 to about 120, about 60 to about 130, about 60 to about 140, about 70 to about 80, about 70 to about 90, about 70 to about 100, about 70 to about 110, about 70 to about 120, about 70 to about 130, about 70 to about 140, about 80 to about 90, about 80 to about 100, about 80 to about 110, about 80 to about 120, about 80 to about 130, about 80 to about 140, about 90 to about 100, about 90 to about 110, about 90 to about 120, about 90 to about 130, about 90 to about 140, about 100 to about 110, about 100 to about 120, about 100 to about 130, about 100 to about 140, about 110 to about 120, about 110 to about 130, about 110 to about 140, about 120 to about 130, about 120 to about 140, or about 130 to about 140 base pairs in length. In some embodiments, the chemically modified sgRNAs may comprise a total of about 50, about 60, about 70, about 80, about 90, about 100, about 110, about 120, about 130, or about 140 base pairs in length. In some embodiments, the chemically modified sgRNAs may comprise a total of at least about 50, about 60, about 70, about 80, about 90, about 100, about 110, about 120, or about 130 base pairs in length. In some embodiments, the chemically modified sgRNA may comprise a total of at most about 60, about 70, about 80, about 90, about 100, about 110, about 120, about 130, or about 140 base pairs in length. In one embodiment, the chemically modified sgRNA may comprise a total of 100 base pairs in length. In another embodiment, the chemically modified sgRNA may comprise a total of 103 base pairs in length.

[0317] In some embodiments, the chemically modified sgRNAs may comprise a total of from 1 to 150 chemically modified nucleotides. In some embodiments, the chemically modified sgRNAs may comprise a total of 1, 2, 3, 4, 5, 6, 7, 8, 9, 10, 11, 12, 13, 14, 15, 16, 17, 18, 19, 20, 21, 22, 23, 24, 25, 26, 27, 28, 29, 30, 31, 32, 33, 34, 35, 36, 37, 38, 39, 40, 41, 42, 43, 44, 45, 46, 47, 48, 49, 50, 51, 52, 53, 54, 55, 56, 57, 58, 59, 60, 61, 62, 63, 64, 65, 66, 67, 68, 69, 70, 71, 72, 73, 74, 75, 76, 77, 78, 79, 80, 81, 82, 83, 84, 85, 86, 87, 88, 89, 90, 91, 92, 93, 94, 95, 96, 97, 98, 99, 100, 101, 102, 103, 104, 105, 106, 107, 108, 109, 110, 111, 112, 113, 114, 115, 116, 117, 118, 119, 120, 121, 122, 123, 124, 125, 126, 127, 128, 129, 130, 131, 132, 133, 134, 135, 136, 137, 138, 139, 140, 141, 142, 143, 144, 145, 146, 147, 148, 149, or 150 chemically modified nucleotides. In some embodiments, the chemically modified sgRNAs may comprise a total of about 1 to about 45 chemically modified nucleotides. In some embodiments, the chemically modified sgRNAs may comprise a total of about 1 to about 3, about 1 to about 5, about 1 to about 10, about 1 to about 15, about 1 to about 20, about 1 to about 25, about 1 to about 30, about 1 to about 35, about 1 to about 40, about 1 to about 45, about 3 to about 5, about 3 to about 10, about 3 to about 15, about 3 to about 20, about 3 to about 25, about 3 to about 30, about 3 to about 35, about 3 to about 40, about 3 to about 45, about 5 to about 10, about 5 to about 15, about 5 to about 20, about 5 to about 25, about 5 to about 30, about 5 to about 35, about 5 to about 40, about 5 to about 45, about 10 to about 15, about 10 to about 20, about 10 to about 25, about 10 to about 30, about 10 to about 35, about 10 to about 40, about 10 to about 45, about 15 to about 20, about 15 to about 25, about 15 to about 30, about 15 to about 35, about 15 to about 40, about 15 to about 45, about 20 to about 25, about 20 to about 30, about 20 to about 35, about 20 to about 40, about 20 to about 45, about 25 to about 30, about 25 to about 35, about 25 to about 40, about 25 to about 45, about 30 to about 35, about 30 to about 40, about 30 to about 45, about 35 to about 40, about 35 to about 45, about 40 to about 45, or about 45 to about 50 chemically modified nucleotides. In some embodiments, the chemically modified sgRNAs may comprise a total of about 1, about 3, about 5, about 10, about 15, about 20, about 25, about 30, about 35, about 40, about 45, or about 50 chemically modified nucleotides. In some embodiments, the chemically modified sgRNAs may comprise a total of at least about 1, about 3, about 5, about 10, about 15, about 20, about 25, about 30, about 35, about 40, about 45, or about 50 chemically modified nucleotides. In some embodiments, the chemically modified sgRNAs may comprise a total of at most about 3, about 5, about 10, about 15, about 20, about 25, about 30, about 35, about 40, about 45, or about 50 chemically modified nucleotides. In some embodiments, the chemically modified sgRNAs may comprise a total of about 50 to about 140 chemically modified nucleotides. In some embodiments, the chemically modified sgRNAs may comprise a total of about 50 to about 60, about 50 to about 70, about 50 to about 80, about 50 to about 90, about 50 to about 100, about 50 to about 110, about 50 to about 120, about 50 to about 130, about 50 to about 140, about 60 to about 70, about 60 to about 80, about 60 to about 90, about 60 to about 100, about 60 to about 110, about 60 to about 120, about 60 to about 130, about 60 to about 140, about 70 to about 80, about 70 to about 90, about 70 to about 100, about 70 to about 110, about 70 to about 120, about 70 to about 130, about 70 to about 140, about 80 to about 90, about 80 to about 100, about 80 to about 110, about 80 to about 120, about 80 to about 130, about 80 to about 140, about 90 to about 100, about 90 to about 110, about 90 to about 120, about 90 to about 130, about 90 to about 140, about 100 to about 110, about 100 to about 120, about 100 to about 130, about 100 to about 140, about 110 to about 120, about 110 to about 130, about 110 to about 140, about 120 to about 130, about 120 to about 140, or about 130 to about 140 chemically modified nucleotides. In some embodiments, the chemically modified sgRNAs may comprise a total of about 50, about 60, about 70, about 80, about 90, about 100, about 110, about 120, about 130, or about 140 chemically modified nucleotides. In some embodiments, the chemically modified sgRNAs may comprise a total of at least about 50, about 60, about 70, about 80, about 90, about 100, about 110, about 120, or about 130 chemically modified nucleotides. In some embodiments, the chemically modified sgRNAs may comprise a total of at most about 60, about 70, about 80, about 90, about 100, about 110, about 120, about 130, or about 140 chemically modified nucleotides. In one embodiment, the chemically modified sgRNAs may comprise a total of 54 chemically modified nucleotides. In another embodiment, the chemically modified sgRNAs may comprise a total of 62 chemically modified nucleotides.

[0318] In some embodiments, the chemically modified sgRNAs may comprise about 1% to about 100% chemically modified nucleotides. In some embodiments, the chemically modified sgRNAs may comprise about 1% to about 10%, about 1% to about 20%, about 1% to about 30%, about 1% to about 40%, about 1% to about 50%, about 1% to about 60%, about 1% to about 70%, about 1% to about 80%, about 1% to about 90%, about 1% to about 95%, about 1% to about 100%, about 10% to about 20%, about 10% to about 30%, about 10% to about 40%, about 10% to about 50%, about 10% to about 60%, about 10% to about 70%, about 10% to about 80%, about 10% to about 90%, about 10% to about 95%, about 10% to about 100%, about 20% to about 30%, about 20% to about 40%, about 20% to about 50%, about 20% to about 60%, about 20% to about 70%, about 20% to about 80%, about 20% to about 90%, about 20% to about 95%, about 20% to about 100%, about 30% to about 40%, about 30% to about 50%, about 30% to about 60%, about 30% to about 70%, about 30% to about 80%, about 30% to about 90%, about 30% to about 95%, about 30% to about 100%, about 40% to about 50%, about 40% to about 60%, about 40% to about 70%, about 40% to about 80%, about 40% to about 90%, about 40% to about 95%, about 40% to about 100%, about 50% to about 60%, about 50% to about 70%, about 50% to about 80%, about 50% to about 90%, about 50% to about 95%, about 50% to about 100%, about 60% to about 70%, about 60% to about 80%, about 60% to about 90%, about 60% to about 95%, about 60% to about 100%, about 70% to about 80%, about 70% to about 90%, about 70% to about 95%, about 70% to about 100%, about 80% to about 90%, about 80% to about 95%, about 80% to about 100%, about 90% to about 95%, about 90% to about 100%, or about 95% to about 100% chemically modified nucleotides. In some embodiments, the chemically modified sgRNAs may comprise about 1%, about 10%, about 20%, about 30%, about 40%, about 50%, about 60%, about 70%, about 80%, about 90%, about 95%, or about 100% chemically modified nucleotides. In some embodiments, the chemically modified sgRNAs may comprise at least about 1%, about 10%, about 20%, about 30%, about 40%, about 50%, about 60%, about 70%, about 80%, about 90%, or about 95% chemically modified nucleotides. In some embodiments, the chemically modified sgRNAs may comprise at most about 10%, about 20%, about 30%, about 40%, about 50%, about 60%, about 70%, about 80%, about 90%, about 95%, or about 100% chemically modified nucleotides.

[0319] In some embodiments, the chemically modified sgRNAs may have chemically modified nucleotide on one or more of the positions 1, 2, 3, 4, 5, 6, 7, 8, 9, 10, 11, 12, 13, 14, 15, 16, 17, 18, 19, 20, 21, 22, 23, 24, 25, 26, 27, 28, 29, 30, 31, 32, 33, 34, 35, 36, 37, 38, 39, 40, 41, 42, 43, 44, 45, 46, 47, 48, 49, 50, 51, 52, 53, 54, 55, 56, 57, 58, 59, 60, 61, 62, 63, 64, 65, 66, 67, 68, 69, 70, 71, 72, 73, 74, 75, 76, 77, 78, 79, 80, 81, 82, 83, 84, 85, 86, 87, 88, 89, 90, 91, 92, 93, 94, 95, 96, 97, 98, 99, 100, 101, 102, 103, 104, 105, 106, 107, 108, 109, 110, 111, 112, 113, 114, 115, 116, 117, 118, 119, 120, 121, 122, 123, 124, 125, 126, 127, 128, 129, 130, 131, 132, 133, 134, 135, 136, 137, 138, 139, 140, 141, 142, 143, 144, 145, 146, 147, 148, 149, or 150 in the 5′-3′ direction in the sgRNA sequence.

[0320] In some embodiments, the chemically modified sgRNAs may have chemically modified nucleotide on one or more of the positions 1, 2, 3, 4, 5, 6, 7, 8, 9, 10, 11, 12, 13, 14, 15, 16, 17, 18, 19, 20, 21, 22, 23, 24, 25, 26, 27, 28, 29, 30, 31, 32, 33, 34, 35, 36, 37, 38, 39, 40, 41, 42, 43, 44, 45, 46, 47, 48, 49, 50, 51, 52, 53, 54, 55, 56, 57, 58, 59, 60, 61, 62, 63, 64, 65, 66, 67, 68, 69, 70, 71, 72, 73, 74, 75, 76, 77, 78, 79, 80, 81, 82, 83, 84, 85, 86, 87, 88, 89, 90, 91, 92, 93, 94, 95, 96, 97, 98, 99, 100, 101, 102, 103, 104, 105, 106, 107, 108, 109, 110, 111, 112, 113, 114, 115, 116, 117, 118, 119, 120, 121, 122, 123, 124, 125, 126, 127, 128, 129, 130, 131, 132, 133, 134, 135, 136, 137, 138, 139, 140, 141, 142, 143, 144, 145, 146, 147, 148, or 149 base pairs from the 5′ end of the sgRNA sequence.

[0321] In some embodiments, the chemically modified sgRNAs may have chemically modified nucleotide on one or more of the positions 1, 2, 3, 4, 5, 6, 7, 8, 9, 10, 11, 12, 13, 14, 15, 16, 17, 18, 19, 20, 21, 22, 23, 24, 25, 26, 27, 28, 29, 30, 31, 32, 33, 34, 35, 36, 37, 38, 39, 40, 41, 42, 43, 44, 45, 46, 47, 48, 49, 50, 51, 52, 53, 54, 55, 56, 57, 58, 59, 60, 61, 62, 63, 64, 65, 66, 67, 68, 69, 70, 71, 72, 73, 74, 75, 76, 77, 78, 79, 80, 81, 82, 83, 84, 85, 86, 87, 88, 89, 90, 91, 92, 93, 94, 95, 96, 97, 98, 99, 100, 101, 102, 103, 104, 105, 106, 107, 108, 109, 110, 111, 112, 113, 114, 115, 116, 117, 118, 119, 120, 121, 122, 123, 124, 125, 126, 127, 128, 129, 130, 131, 132, 133, 134, 135, 136, 137, 138, 139, 140, 141, 142, 143, 144, 145, 146, 147, 148, or 149 base pairs from the 3′ end of the sgRNA sequence.

[0322] In some embodiments, the chemically modified gRNAs or sgRNAs may have one or more chemical modifications in the spacer or protospacer region, i.e., the target sequence. In some embodiments, the chemically modified gRNAs or sgRNAs may comprise a spacer sequence of from 10 to 30 base pairs in length. In some embodiments, the chemically modified gRNAs or sgRNAs may comprise a spacer sequence of 10, 11, 12, 13, 14, 15, 16, 17, 18, 19, 20, 21, 22, 23, 24, 25, 26, 27, 28, 29, or 30 base pairs in length. In some embodiments, the chemically modified gRNAs or sgRNAs may comprise a spacer sequence of about 10 to about 30 base pairs in length. In some embodiments, the chemically modified gRNAs or sgRNAs may comprise a spacer sequence of about 10 to about 15, about 10 to about 20, about 10 to about 25, about 10 to about 30, about 15 to about 20, about 15 to about 25, about 15 to about 30, about 20 to about 25, about 20 to about 30, or about 25 to about 30 base pairs in length. In some embodiments, the chemically modified gRNAs or sgRNAs may comprise a spacer sequence of about 10, about 15, about 20, about 25, or about 30 base pairs in length. In some embodiments, the chemically modified gRNAs or sgRNAs may comprise a spacer sequence of at least about 10, about 15, about 20, or about 25 base pairs in length. In some embodiments, the chemically modified gRNAs or sgRNAs may comprise a spacer sequence of at most about 15, about 20, about 25, or about 30 base pairs in length. In one embodiment, the chemically modified gRNAs or sgRNAs may comprise a spacer sequence of 18 base pairs in length. In another embodiment, the chemically modified gRNAs or sgRNAs may comprise a spacer sequence of 22 base pairs in length. In a preferred embodiment, the chemically modified gRNAs or sgRNAs may comprise a spacer sequence of 20 base pairs in length.

[0323] In some embodiments, the spacer sequence may comprise a total of from 1 to 30 chemically modified nucleotides. In some embodiments, the spacer region may comprise a total of 1, 2, 3, 4, 5, 6, 7, 8, 9, 10, 11, 12, 13, 14, 15, 16, 17, 18, 19, 20, 21, 22, 23, 24, 25, 26, 27, 28, 29, or 30 chemically modified nucleotides. In some embodiments, the spacer sequence may comprise a total of about 1 to about 10 chemically modified nucleotides. In some embodiments, the spacer sequence may comprise a total of about 1 to about 2, about 1 to about 3, about 1 to about 4, about 1 to about 5, about 1 to about 6, about 1 to about 7, about 1 to about 8, about 1 to about 9, about 1 to about 10, about 2 to about 3, about 2 to about 4, about 2 to about 5, about 2 to about 6, about 2 to about 7, about 2 to about 8, about 2 to about 9, about 2 to about 10, about 3 to about 4, about 3 to about 5, about 3 to about 6, about 3 to about 7, about 3 to about 8, about 3 to about 9, about 3 to about 10, about 4 to about 5, about 4 to about 6, about 4 to about 7, about 4 to about 8, about 4 to about 9, about 4 to about 10, about 5 to about 6, about 5 to about 7, about 5 to about 8, about 5 to about 9, about 5 to about 10, about 6 to about 7, about 6 to about 8, about 6 to about 9, about 6 to about 10, about 7 to about 8, about 7 to about 9, about 7 to about 10, about 8 to about 9, about 8 to about 10, or about 9 to about 10 chemically modified nucleotides. In some embodiments, the spacer sequence may comprise a total of about 1, about 2, about 3, about 4, about 5, about 6, about 7, about 8, about 9, or about 10 chemically modified nucleotides. In some embodiments, the spacer sequence may comprise a total of at least about 1, about 2, about 3, about 4, about 5, about 6, about 7, about 8, or about 9 chemically modified nucleotides. In some embodiments, the spacer sequence may comprise a total of at most about 2, about 3, about 4, about 5, about 6, about 7, about 8, about 9, or about 10 chemically modified nucleotides. In some embodiments, the spacer sequence may comprise a total of about 10 to about 30 chemically modified nucleotides. In some embodiments, the spacer sequence may comprise a total of about 10 to about 15, about 10 to about 20, about 10 to about 25, about 10 to about 30, about 15 to about 20, about 15 to about 25, about 15 to about 30, about 20 to about 25, about 20 to about 30, or about 25 to about 30 chemically modified nucleotides. In some embodiments, the spacer sequence may comprise a total of about 10, about 15, about 20, about 25, or about 30 chemically modified nucleotides. In some embodiments, the spacer sequence may comprise a total of at least about 10, about 15, about 20, or about 25 chemically modified nucleotides. In some embodiments, the spacer sequence may comprise a total of at most about 15, about 20, about 25, or about 30 chemically modified nucleotides. In one embodiment, the spacer sequence may comprise a total of 3 chemically modified nucleotides. In another embodiment, the spacer sequence may comprise a total of 5 chemically modified nucleotides.

[0324] In some embodiments, the spacer sequence may comprise from 1% to 100% chemically modified nucleotides. In some embodiments, the spacer sequence may comprise about 1% to about 100% chemically modified nucleotides. In some embodiments, the spacer sequence may comprise about 1% to about 10%, about 1% to about 20%, about 1% to about 30%, about 1% to about 40%, about 1% to about 50%, about 1% to about 60%, about 1% to about 70%, about 1% to about 80%, about 1% to about 90%, about 1% to about 95%, about 1% to about 100%, about 10% to about 20%, about 10% to about 30%, about 10% to about 40%, about 10% to about 50%, about 10% to about 60%, about 10% to about 70%, about 10% to about 80%, about 10% to about 90%, about 10% to about 95%, about 10% to about 100%, about 20% to about 30%, about 20% to about 40%, about 20% to about 50%, about 20% to about 60%, about 20% to about 70%, about 20% to about 80%, about 20% to about 90%, about 20% to about 95%, about 20% to about 100%, about 30% to about 40%, about 30% to about 50%, about 30% to about 60%, about 30% to about 70%, about 30% to about 80%, about 30% to about 90%, about 30% to about 95%, about 30% to about 100%, about 40% to about 50%, about 40% to about 60%, about 40% to about 70%, about 40% to about 80%, about 40% to about 90%, about 40% to about 95%, about 40% to about 100%, about 50% to about 60%, about 50% to about 70%, about 50% to about 80%, about 50% to about 90%, about 50% to about 95%, about 50% to about 100%, about 60% to about 70%, about 60% to about 80%, about 60% to about 90%, about 60% to about 95%, about 60% to about 100%, about 70% to about 80%, about 70% to about 90%, about 70% to about 95%, about 70% to about 100%, about 80% to about 90%, about 80% to about 95%, about 80% to about 100%, about 90% to about 95%, about 90% to about 100%, or about 95% to about 100% chemically modified nucleotides. In some embodiments, the spacer sequence may comprise about 1%, about 10%, about 20%, about 30%, about 40%, about 50%, about 60%, about 70%, about 80%, about 90%, about 95%, or about 100% chemically modified nucleotides. In some embodiments, the spacer sequence may comprise at least about 1%, about 10%, about 20%, about 30%, about 40%, about 50%, about 60%, about 70%, about 80%, about 90%, or about 95% chemically modified nucleotides. In some embodiments, the spacer sequence may comprise at most about 10%, about 20%, about 30%, about 40%, about 50%, about 60%, about 70%, about 80%, about 90%, about 95%, or about 100% chemically modified nucleotides.

[0325] In some embodiments, the chemically modified spacer sequence may have chemically modified nucleotide on one or more of the positions 1, 2, 3, 4, 5, 6, 7, 8, 9, 10, 11, 12, 13, 14, 15, 16, 17, 18, 19, 20, 21, 22, 23, 24, 25, 26, 27, 28, 29, or 30 in the 5′-3′ direction in the spacer sequence.

[0326] In some embodiments, the chemically modified spacer region may have chemically modified nucleotide on one or more of the positions which are 1, 2, 3, 4, 5, 6, 7, 8, 9, 10, 11, 12, 13, 14, 15, 16, 17, 18, 19, 20, 21, 22, 23, 24, 25, 26, 27, 28, or 29 base pairs from the 5′ end of the spacer sequence.

[0327] In some embodiments, the chemically modified spacer region may have chemically modified nucleotide on one or more the positions which are 1, 2, 3, 4, 5, 6, 7, 8, 9, 10, 11, 12, 13, 14, 15, 16, 17, 18, 19, 20, 21, 22, 23, 24, 25, 26, 27, 28, or 29 base pairs from the 3′ end of the spacer sequence.

[0328] In some embodiments, the chemically modified gRNAs or sgRNAs may have one or more chemical modifications in the tracrRNA sequence. In some embodiments, the chemically modified gRNAs or sgRNAs may comprise a tracrRNA sequence of from 30 to 100 base pairs in length. In some embodiments, the chemically modified gRNAs or sgRNAs may comprise a tracrRNA sequence of 30, 31, 32, 33, 34, 35, 36, 37, 38, 39, 40, 41, 42, 43, 44, 45, 46, 47, 48, 49, 50, 51, 52, 53, 54, 55, 56, 57, 58, 59, 60, 61, 62, 63, 64, 65, 66, 67, 68, 69, 70, 71, 72, 73, 74, 75, 76, 77, 78, 79, 80, 81, 82, 83, 84, 85, 86, 87, 88, 89, 90, 91, 92, 93, 94, 95, 96, 97, 98, 99, 100, 101, 102, 103, 104, 105, 106, 107, 108, 109, 110, 111, 112, 113, 114, 115, 116, 117, 118, 119, 120, 121, 122, 123, 124, 125, 126, 127, 128, 129, or 130 base pairs in length. In some embodiments, the chemically modified gRNAs or sgRNAs may comprise a tracrRNA sequence of from about 30 to about 130 base pairs in length. In some embodiments, the chemically modified gRNAs or sgRNAs may comprise a tracrRNA sequence of from about 30 to about 40, about 30 to about 50, about 30 to about 60, about 30 to about 70, about 30 to about 75, about 30 to about 80, about 30 to about 90, about 30 to about 100, about 30 to about 110, about 30 to about 120, about 30 to about 130, about 40 to about 50, about 40 to about 60, about 40 to about 70, about 40 to about 75, about 40 to about 80, about 40 to about 90, about 40 to about 100, about 40 to about 110, about 40 to about 120, about 40 to about 130, about 50 to about 60, about 50 to about 70, about 50 to about 75, about 50 to about 80, about 50 to about 90, about 50 to about 100, about 50 to about 110, about 50 to about 120, about 50 to about 130, about 60 to about 70, about 60 to about 75, about 60 to about 80, about 60 to about 90, about 60 to about 100, about 60 to about 110, about 60 to about 120, about 60 to about 130, about 70 to about 75, about 70 to about 80, about 70 to about 90, about 70 to about 100, about 70 to about 110, about 70 to about 120, about 70 to about 130, about 75 to about 80, about 75 to about 90, about 75 to about 100, about 75 to about 110, about 75 to about 120, about 75 to about 130, about 80 to about 90, about 80 to about 100, about 80 to about 110, about 80 to about 120, about 80 to about 130, about 90 to about 100, about 90 to about 110, about 90 to about 120, about 90 to about 130, about 100 to about 110, about 100 to about 120, about 100 to about 130, about 110 to about 120, about 110 to about 130, or about 120 to about 130 base pairs in length. In some embodiments, the chemically modified gRNAs or sgRNAs may comprise a tracrRNA sequence of from about 30, about 40, about 50, about 60, about 70, about 75, about 80, about 90, about 100, about 110, about 120, or about 130 base pairs in length. In some embodiments, the chemically modified gRNAs or sgRNAs may comprise a tracrRNA sequence of from at least about 30, about 40, about 50, about 60, about 70, about 75, about 80, about 90, about 100, about 110, or about 120 base pairs in length. In some embodiments, the chemically modified gRNAs or sgRNAs may comprise a tracrRNA sequence of from at most about 40, about 50, about 60, about 70, about 75, about 80, about 90, about 100, about 110, about 120, or about 130 base pairs in length. In some embodiments, the chemically modified gRNAs or sgRNAs may comprise a tracrRNA sequence of 70 base pairs in length. In some embodiments, the chemically modified gRNAs or sgRNAs may comprise a tracrRNA sequence of 73 base pairs in length. In some embodiments, the chemically modified gRNAs or sgRNAs may comprise a tracrRNA sequence of 68 base pairs in length. In some embodiments, the chemically modified gRNAs or sgRNAs may comprise a tracrRNA sequence of 71 base pairs in length.

[0329] In some embodiments, the tracrRNA sequence may comprise a total of from 1 to 130 chemically modified nucleotides. In some embodiments, the chemically modified gRNAs or sgRNAs may comprise a tracrRNA sequence of from 1, 2, 3, 4, 5, 6, 7, 8, 9, 10, 11, 12, 13, 14, 15, 16, 17, 18, 19, 20, 21, 22, 23, 24, 25, 26, 27, 28, 29, 30, 31, 32, 33, 34, 35, 36, 37, 38, 39, 40, 41, 42, 43, 44, 45, 46, 47, 48, 49, 50, 51, 52, 53, 54, 55, 56, 57, 58, 59, 60, 61, 62, 63, 64, 65, 66, 67, 68, 69, 70, 71, 72, 73, 74, 75, 76, 77, 78, 79, 80, 81, 82, 83, 84, 85, 86, 87, 88, 89, 90, 91, 92, 93, 94, 95, 96, 97, 98, 99, 100, 101, 102, 103, 104, 105, 106, 107, 108, 109, 110, 111, 112, 113, 114, 115, 116, 117, 118, 119, 120, 121, 122, 123, 124, 125, 126, 127, 128, 129, or 130 chemically modified nucleotides. In some embodiments, the tracrRNA sequence may comprise a total of from about 1 to about 10 chemically modified nucleotides. In some embodiments, the tracrRNA sequence may comprise a total of from about 1 to about 2, about 1 to about 3, about 1 to about 4, about 1 to about 5, about 1 to about 6, about 1 to about 7, about 1 to about 8, about 1 to about 9, about 1 to about 10, about 2 to about 3, about 2 to about 4, about 2 to about 5, about 2 to about 6, about 2 to about 7, about 2 to about 8, about 2 to about 9, about 2 to about 10, about 3 to about 4, about 3 to about 5, about 3 to about 6, about 3 to about 7, about 3 to about 8, about 3 to about 9, about 3 to about 10, about 4 to about 5, about 4 to about 6, about 4 to about 7, about 4 to about 8, about 4 to about 9, about 4 to about 10, about 5 to about 6, about 5 to about 7, about 5 to about 8, about 5 to about 9, about 5 to about 10, about 6 to about 7, about 6 to about 8, about 6 to about 9, about 6 to about 10, about 7 to about 8, about 7 to about 9, about 7 to about 10, about 8 to about 9, about 8 to about 10, or about 9 to about 10 chemically modified nucleotides. In some embodiments, the tracrRNA sequence may comprise a total of from about 1, about 2, about 3, about 4, about 5, about 6, about 7, about 8, about 9, or about 10 chemically modified nucleotides. In some embodiments, the tracrRNA sequence may comprise a total of from at least about 1, about 2, about 3, about 4, about 5, about 6, about 7, about 8, or about 9 chemically modified nucleotides. In some embodiments, the tracrRNA sequence may comprise a total of from at most about 2, about 3, about 4, about 5, about 6, about 7, about 8, about 9, or about 10 chemically modified nucleotides. In some embodiments, the tracrRNA sequence may comprise a total of from about 10 to about 30 chemically modified nucleotides. In some embodiments, the tracrRNA sequence may comprise a total of from about 10 to about 15, about 10 to about 20, about 10 to about 25, about 10 to about 30, about 15 to about 20, about 15 to about 25, about 15 to about 30, about 20 to about 25, about 20 to about 30, or about 25 to about 30 chemically modified nucleotides. In some embodiments, the tracrRNA sequence may comprise a total of from about 10, about 15, about 20, about 25, or about 30 chemically modified nucleotides. In some embodiments, the tracrRNA sequence may comprise a total of from at least about 10, about 15, about 20, or about 25 chemically modified nucleotides. In some embodiments, the spacer region may comprise a total of at most about 15, about 20, about 25, or about 30 chemically modified nucleotides. In some embodiments, the tracrRNA sequence may comprise a total of from about 30 to about 130 chemically modified nucleotides. In some embodiments, the tracrRNA sequence may comprise a total of from about 30 to about 40, about 30 to about 50, about 30 to about 60, about 30 to about 70, about 30 to about 75, about 30 to about 80, about 30 to about 90, about 30 to about 100, about 30 to about 110, about 30 to about 120, about 30 to about 130, about 40 to about 50, about 40 to about 60, about 40 to about 70, about 40 to about 75, about 40 to about 80, about 40 to about 90, about 40 to about 100, about 40 to about 110, about 40 to about 120, about 40 to about 130, about 50 to about 60, about 50 to about 70, about 50 to about 75, about 50 to about 80, about 50 to about 90, about 50 to about 100, about 50 to about 110, about 50 to about 120, about 50 to about 130, about 60 to about 70, about 60 to about 75, about 60 to about 80, about 60 to about 90, about 60 to about 100, about 60 to about 110, about 60 to about 120, about 60 to about 130, about 70 to about 75, about 70 to about 80, about 70 to about 90, about 70 to about 100, about 70 to about 110, about 70 to about 120, about 70 to about 130, about 75 to about 80, about 75 to about 90, about 75 to about 100, about 75 to about 110, about 75 to about 120, about 75 to about 130, about 80 to about 90, about 80 to about 100, about 80 to about 110, about 80 to about 120, about 80 to about 130, about 90 to about 100, about 90 to about 110, about 90 to about 120, about 90 to about 130, about 100 to about 110, about 100 to about 120, about 100 to about 130, about 110 to about 120, about 110 to about 130, or about 120 to about 130 chemically modified nucleotides. In some embodiments, the tracrRNA sequence may comprise a total of from about 30, about 40, about 50, about 60, about 70, about 75, about 80, about 90, about 100, about 110, about 120, or about 130 chemically modified nucleotides. In some embodiments, the tracrRNA sequence may comprise a total of from at least about 30, about 40, about 50, about 60, about 70, about 75, about 80, about 90, about 100, about 110, or about 120 chemically modified nucleotides. In some embodiments, the tracrRNA sequence may comprise a total of from at most about 40, about 50, about 60, about 70, about 75, about 80, about 90, about 100, about 110, about 120, or about 130 chemically modified nucleotides. In one embodiment, the tracrRNA sequence may comprise a total of 51 chemically modified nucleotides. In another embodiment, the tracrRNA sequence may comprise a total of 59 chemically modified nucleotides.

[0330] In some embodiments, the tracrRNA sequence may comprise from 1% to 100% chemically modified nucleotides. In some embodiments, the tracrRNA sequence may comprise about 1% to about 100% chemically modified nucleotides. In some embodiments, the tracrRNA sequence may comprise about 1% to about 10%, about 1% to about 20%, about 1% to about 30%, about 1% to about 40%, about 1% to about 50%, about 1% to about 60%, about 1% to about 70%, about 1% to about 80%, about 1% to about 90%, about 1% to about 95%, about 1% to about 100%, about 10% to about 20%, about 10% to about 30%, about 10% to about 40%, about 10% to about 50%, about 10% to about 60%, about 10% to about 70%, about 10% to about 80%, about 10% to about 90%, about 10% to about 95%, about 10% to about 100%, about 20% to about 30%, about 20% to about 40%, about 20% to about 50%, about 20% to about 60%, about 20% to about 70%, about 20% to about 80%, about 20% to about 90%, about 20% to about 95%, about 20% to about 100%, about 30% to about 40%, about 30% to about 50%, about 30% to about 60%, about 30% to about 70%, about 30% to about 80%, about 30% to about 90%, about 30% to about 95%, about 30% to about 100%, about 40% to about 50%, about 40% to about 60%, about 40% to about 70%, about 40% to about 80%, about 40% to about 90%, about 40% to about 95%, about 40% to about 100%, about 50% to about 60%, about 50% to about 70%, about 50% to about 80%, about 50% to about 90%, about 50% to about 95%, about 50% to about 100%, about 60% to about 70%, about 60% to about 80%, about 60% to about 90%, about 60% to about 95%, about 60% to about 100%, about 70% to about 80%, about 70% to about 90%, about 70% to about 95%, about 70% to about 100%, about 80% to about 90%, about 80% to about 95%, about 80% to about 100%, about 90% to about 95%, about 90% to about 100%, or about 95% to about 100% chemically modified nucleotides. In some embodiments, the tracrRNA sequence may comprise about 1%, about 10%, about 20%, about 30%, about 40%, about 50%, about 60%, about 70%, about 80%, about 90%, about 95%, or about 100% chemically modified nucleotides. In some embodiments, the tracrRNA sequence may comprise at least about 1%, about 10%, about 20%, about 30%, about 40%, about 50%, about 60%, about 70%, about 80%, about 90%, or about 95% chemically modified nucleotides. In some embodiments, the tracrRNA sequence may comprise at most about 10%, about 20%, about 30%, about 40%, about 50%, about 60%, about 70%, about 80%, about 90%, about 95%, or about 100% chemically modified nucleotides.

[0331] In some embodiments, the chemically modified tracrRNA sequence may have chemically modified nucleotide on one or more of the positions 1, 2, 3, 4, 5, 6, 7, 8, 9, 10, 11, 12, 13, 14, 15, 16, 17, 18, 19, 20, 21, 22, 23, 24, 25, 26, 27, 28, 29, 30, 31, 32, 33, 34, 35, 36, 37, 38, 39, 40, 41, 42, 43, 44, 45, 46, 47, 48, 49, 50, 51, 52, 53, 54, 55, 56, 57, 58, 59, 60, 61, 62, 63, 64, 65, 66, 67, 68, 69, 70, 71, 72, 73, 74, 75, 76, 77, 78, 79, 80, 81, 82, 83, 84, 85, 86, 87, 88, 89, 90, 91, 92, 93, 94, 95, 96, 97, 98, 99, 100, 101, 102, 103, 104, 105, 106, 107, 108, 109, 110, 111, 112, 113, 114, 115, 116, 117, 118, 119, 120, 121, 122, 123, 124, 125, 126, 127, 128, 129, or 130 in the 5′-3′ direction in the tracrRNA sequence.

[0332] In some embodiments, the chemically modified tracr region may have chemically modified nucleotide on one or more of the positions which are 1, 2, 3, 4, 5, 6, 7, 8, 9, 10, 11, 12, 13, 14, 15, 16, 17, 18, 19, 20, 21, 22, 23, 24, 25, 26, 27, 28, 29, 30, 31, 32, 33, 34, 35, 36, 37, 38, 39, 40, 41, 42, 43, 44, 45, 46, 47, 48, 49, 50, 51, 52, 53, 54, 55, 56, 57, 58, 59, 60, 61, 62, 63, 64, 65, 66, 67, 68, 69, 70, 71, 72, 73, 74, 75, 76, 77, 78, 79, 80, 81, 82, 83, 84, 85, 86, 87, 88, 89, 90, 91, 92, 93, 94, 95, 96, 97, 98, 99, 100, 101, 102, 103, 104, 105, 106, 107, 108, 109, 110, 111, 112, 113, 114, 115, 116, 117, 118, 119, 120, 121, 122, 123, 124, 125, 126, 127, 128, or 129 base pairs from the 5′ end of the tracrRNA sequence.

[0333] In some embodiments, the chemically modified tracr region may have chemically modified nucleotide on one or more the positions which are 1, 2, 3, 4, 5, 6, 7, 8, 9, 10, 11, 12, 13, 14, 15, 16, 17, 18, 19, 20, 21, 22, 23, 24, 25, 26, 27, 28, 29, 30, 31, 32, 33, 34, 35, 36, 37, 38, 39, 40, 41, 42, 43, 44, 45, 46, 47, 48, 49, 50, 51, 52, 53, 54, 55, 56, 57, 58, 59, 60, 61, 62, 63, 64, 65, 66, 67, 68, 69, 70, 71, 72, 73, 74, 75, 76, 77, 78, 79, 80, 81, 82, 83, 84, 85, 86, 87, 88, 89, 90, 91, 92, 93, 94, 95, 96, 97, 98, 99, 100, 101, 102, 103, 104, 105, 106, 107, 108, 109, 110, 111, 112, 113, 114, 115, 116, 117, 118, 119, 120, 121, 122, 123, 124, 125, 126, 127, 128, or 129 base pairs from the 3′ end of the tracrRNA sequence.

[0334] In some embodiments, the chemically modified gRNAs may have one or more chemical modifications in the 5′ end of the gRNA sequence. In some embodiments, the chemically modified gRNAs may comprise one or more chemically modified nucleotides in the 5′ end of the gRNA sequence. In some embodiments, the chemically modified gRNAs may have one or more chemical modifications in the 3′ end of the gRNA sequence. In some embodiments, the chemically modified gRNAs may comprise one or more chemically modified nucleotides in the 3′ end of the gRNA sequence.

[0335] In some embodiments, the chemically modified gRNAs may comprise a crRNA. In some embodiments, the crRNA may comprise one or more chemically modified nucleotides. In some embodiments, the chemically modified crRNA may be of from 30 to 50 base pairs in length. In some embodiments, the chemically modified crRNA may be of 30, 31, 32, 33, 34, 35, 36, 37, 38, 39, 40, 41, 42, 43, 44, 45, 46, 47, 48, 49, or 50 base pairs in length. In some embodiments, the chemically modified crRNA may be of from about 30 to about 50 base pairs in length. In some embodiments, the chemically modified crRNA may be of from about 30 to about 32, about 30 to about 34, about 30 to about 36, about 30 to about 38, about 30 to about 40, about 30 to about 42, about 30 to about 44, about 30 to about 46, about 30 to about 48, about 30 to about 50, about 32 to about 34, about 32 to about 36, about 32 to about 38, about 32 to about 40, about 32 to about 42, about 32 to about 44, about 32 to about 46, about 32 to about 48, about 32 to about 50, about 34 to about 36, about 34 to about 38, about 34 to about 40, about 34 to about 42, about 34 to about 44, about 34 to about 46, about 34 to about 48, about 34 to about 50, about 36 to about 38, about 36 to about 40, about 36 to about 42, about 36 to about 44, about 36 to about 46, about 36 to about 48, about 36 to about 50, about 38 to about 40, about 38 to about 42, about 38 to about 44, about 38 to about 46, about 38 to about 48, about 38 to about 50, about 40 to about 42, about 40 to about 44, about 40 to about 46, about 40 to about 48, about 40 to about 50, about 42 to about 44, about 42 to about 46, about 42 to about 48, about 42 to about 50, about 44 to about 46, about 44 to about 48, about 44 to about 50, about 46 to about 48, about 46 to about 50, or about 48 to about 50 base pairs in length. In some embodiments, the chemically modified crRNA may be of from about 30, about 32, about 34, about 36, about 38, about 40, about 42, about 44, about 46, about 48, or about 50 base pairs in length. In some embodiments, the chemically modified crRNA may be of from at least about 30, about 32, about 34, about 36, about 38, about 40, about 42, about 44, about 46, or about 48 base pairs in length. In some embodiments, the chemically modified crRNA may be of from at most about 32, about 34, about 36, about 38, about 40, about 42, about 44, about 46, about 48, or about 50 base pairs in length.

[0336] In some embodiments, the crRNA may comprise a total of from 1 to 50 chemically modified nucleotides. In some embodiments, the chemically modified crRNA may comprise a total of 1, 2, 3, 4, 5, 6, 7, 8, 9, 10, 11, 12, 13, 14, 15, 16, 17, 18, 19, 20, 21, 22, 23, 24, 25, 26, 27, 28, 29, 30, 31, 32, 33, 34, 35, 36, 37, 38, 39, 40, 41, 42, 43, 44, 45, 46, 47, 48, 49, or 50 chemically modified nucleotides. In some embodiments, the chemically modified crRNA may comprise a total of about 1 to about 10 chemically modified nucleotides. In some embodiments, the chemically modified crRNA may comprise a total of about 1 to about 2, about 1 to about 3, about 1 to about 4, about 1 to about 5, about 1 to about 6, about 1 to about 7, about 1 to about 8, about 1 to about 9, about 1 to about 10, about 2 to about 3, about 2 to about 4, about 2 to about 5, about 2 to about 6, about 2 to about 7, about 2 to about 8, about 2 to about 9, about 2 to about 10, about 3 to about 4, about 3 to about 5, about 3 to about 6, about 3 to about 7, about 3 to about 8, about 3 to about 9, about 3 to about 10, about 4 to about 5, about 4 to about 6, about 4 to about 7, about 4 to about 8, about 4 to about 9, about 4 to about 10, about 5 to about 6, about 5 to about 7, about 5 to about 8, about 5 to about 9, about 5 to about 10, about 6 to about 7, about 6 to about 8, about 6 to about 9, about 6 to about 10, about 7 to about 8, about 7 to about 9, about 7 to about 10, about 8 to about 9, about 8 to about 10, or about 9 to about 10 chemically modified nucleotides. In some embodiments, the chemically modified crRNA may comprise a total of about 1, about 2, about 3, about 4, about 5, about 6, about 7, about 8, about 9, or about 10 chemically modified nucleotides. In some embodiments, the chemically modified crRNA may comprise a total of at least about 1, about 2, about 3, about 4, about 5, about 6, about 7, about 8, or about 9 chemically modified nucleotides. In some embodiments, the chemically modified crRNA may comprise a total of at most about 2, about 3, about 4, about 5, about 6, about 7, about 8, about 9, or about 10 chemically modified nucleotides. In some embodiments, the chemically modified crRNA may comprise a total of about 10 to about 30 chemically modified nucleotides. In some embodiments, the chemically modified crRNA may comprise a total of about 10 to about 15, about 10 to about 20, about 10 to about 25, about 10 to about 30, about 15 to about 20, about 15 to about 25, about 15 to about 30, about 20 to about 25, about 20 to about 30, or about 25 to about 30 chemically modified nucleotides. In some embodiments, the chemically modified crRNA may comprise a total of about 10, about 15, about 20, about 25, or about 30 chemically modified nucleotides. In some embodiments, the chemically modified crRNA may comprise a total of at least about 10, about 15, about 20, or about 25 chemically modified nucleotides. In some embodiments, the chemically modified crRNA may comprise a total of at most about 15, about 20, about 25, or about 30 chemically modified nucleotides. In some embodiments, the chemically modified crRNA may comprise a total of from about 30 to about 50 chemically modified nucleotides. In some embodiments, the chemically modified crRNA may comprise a total of from about 30 to about 32, about 30 to about 34, about 30 to about 36, about 30 to about 38, about 30 to about 40, about 30 to about 42, about 30 to about 44, about 30 to about 46, about 30 to about 48, about 30 to about 50, about 32 to about 34, about 32 to about 36, about 32 to about 38, about 32 to about 40, about 32 to about 42, about 32 to about 44, about 32 to about 46, about 32 to about 48, about 32 to about 50, about 34 to about 36, about 34 to about 38, about 34 to about 40, about 34 to about 42, about 34 to about 44, about 34 to about 46, about 34 to about 48, about 34 to about 50, about 36 to about 38, about 36 to about 40, about 36 to about 42, about 36 to about 44, about 36 to about 46, about 36 to about 48, about 36 to about 50, about 38 to about 40, about 38 to about 42, about 38 to about 44, about 38 to about 46, about 38 to about 48, about 38 to about 50, about 40 to about 42, about 40 to about 44, about 40 to about 46, about 40 to about 48, about 40 to about 50, about 42 to about 44, about 42 to about 46, about 42 to about 48, about 42 to about 50, about 44 to about 46, about 44 to about 48, about 44 to about 50, about 46 to about 48, about 46 to about 50, or about 48 to about 50 chemically modified nucleotides. In some embodiments, the chemically modified crRNA may comprise a total of from about 30, about 32, about 34, about 36, about 38, about 40, about 42, about 44, about 46, about 48, or about 50 chemically modified nucleotides. In some embodiments, the chemically modified crRNA may comprise a total of from at least about 30, about 32, about 34, about 36, about 38, about 40, about 42, about 44, about 46, or about 48 chemically modified nucleotides. In some embodiments, the chemically modified crRNA may comprise a total of from at most about 32, about 34, about 36, about 38, about 40, about 42, about 44, about 46, about 48, or about 50 chemically modified nucleotides.

[0337] In some embodiments, the crRNA may comprise from 1% to 100% chemically modified nucleotides. In some embodiments, the crRNA may comprise about 1% to about 100% chemically modified nucleotides. In some embodiments, the crRNA may comprise about 1% to about 10%, about 1% to about 20%, about 1% to about 30%, about 1% to about 40%, about 1% to about 50%, about 1% to about 60%, about 1% to about 70%, about 1% to about 80%, about 1% to about 90%, about 1% to about 95%, about 1% to about 100%, about 10% to about 20%, about 10% to about 30%, about 10% to about 40%, about 10% to about 50%, about 10% to about 60%, about 10% to about 70%, about 10% to about 80%, about 10% to about 90%, about 10% to about 95%, about 10% to about 100%, about 20% to about 30%, about 20% to about 40%, about 20% to about 50%, about 20% to about 60%, about 20% to about 70%, about 20% to about 80%, about 20% to about 90%, about 20% to about 95%, about 20% to about 100%, about 30% to about 40%, about 30% to about 50%, about 30% to about 60%, about 30% to about 70%, about 30% to about 80%, about 30% to about 90%, about 30% to about 95%, about 30% to about 100%, about 40% to about 50%, about 40% to about 60%, about 40% to about 70%, about 40% to about 80%, about 40% to about 90%, about 40% to about 95%, about 40% to about 100%, about 50% to about 60%, about 50% to about 70%, about 50% to about 80%, about 50% to about 90%, about 50% to about 95%, about 50% to about 100%, about 60% to about 70%, about 60% to about 80%, about 60% to about 90%, about 60% to about 95%, about 60% to about 100%, about 70% to about 80%, about 70% to about 90%, about 70% to about 95%, about 70% to about 100%, about 80% to about 90%, about 80% to about 95%, about 80% to about 100%, about 90% to about 95%, about 90% to about 100%, or about 95% to about 100% chemically modified nucleotides. In some embodiments, the crRNA may comprise about 1%, about 10%, about 20%, about 30%, about 40%, about 50%, about 60%, about 70%, about 80%, about 90%, about 95%, or about 100% chemically modified nucleotides. In some embodiments, the crRNA may comprise at least about 1%, about 10%, about 20%, about 30%, about 40%, about 50%, about 60%, about 70%, about 80%, about 90%, or about 95% chemically modified nucleotides. In some embodiments, the crRNA may comprise at most about 10%, about 20%, about 30%, about 40%, about 50%, about 60%, about 70%, about 80%, about 90%, about 95%, or about 100% chemically modified nucleotides.

[0338] In some embodiments, the chemically modified crRNA may have chemically modified nucleotide on one or more of the positions 1, 2, 3, 4, 5, 6, 7, 8, 9, 10, 11, 12, 13, 14, 15, 16, 17, 18, 19, 20, 21, 22, 23, 24, 25, 26, 27, 28, 29, 30, 31, 32, 33, 34, 35, 36, 37, 38, 39, 40, 41, 42, 43, 44, 45, 46, 47, 48, 49, or 50 in the 5′-3′ direction in the crRNA sequence.

[0339] In some embodiments, the chemically modified crRNA may have chemically modified nucleotide on one or more of the positions which are 1, 2, 3, 4, 5, 6, 7, 8, 9, 10, 11, 12, 13, 14, 15, 16, 17, 18, 19, 20, 21, 22, 23, 24, 25, 26, 27, 28, 29, 30, 31, 32, 33, 34, 35, 36, 37, 38, 39, 40, 41, 42, 43, 44, 45, 46, 47, 48, or 49 base pairs from the 5′ end of the crRNA sequence.

[0340] In some embodiments, the chemically modified crRNA may have chemically modified nucleotide on one or more of the positions which are 1, 2, 3, 4, 5, 6, 7, 8, 9, 10, 11, 12, 13, 14, 15, 16, 17, 18, 19, 20, 21, 22, 23, 24, 25, 26, 27, 28, 29, 30, 31, 32, 33, 34, 35, 36, 37, 38, 39, 40, 41, 42, 43, 44, 45, 46, 47, 48, or 49 base pairs from the 3′ end of the crRNA sequence.

[0341] In some embodiments, the chemically modified gRNAs may comprise a tracrRNA. In some embodiments, the tracrRNA may comprise one or more chemically modified nucleotides. In some embodiments, the chemically modified tracrRNA may comprise a total of from 50 to 130 base pairs in length. In some embodiments, the chemically modified tracrRNA may comprise a total of 30, 31, 32, 33, 34, 35, 36, 37, 38, 39, 40, 41, 42, 43, 44, 45, 46, 47, 48, 49, 50, 51, 52, 53, 54, 55, 56, 57, 58, 59, 60, 61, 62, 63, 64, 65, 66, 67, 68, 69, 70, 71, 72, 73, 74, 75, 76, 77, 78, 79, 80, 81, 82, 83, 84, 85, 86, 87, 88, 89, 90, 91, 92, 93, 94, 95, 96, 97, 98, 99, 100, 101, 102, 103, 104, 105, 106, 107, 108, 109, 110, 111, 112, 113, 114, 115, 116, 117, 118, 119, 120, 121, 122, 123, 124, 125, 126, 127, 128, 129, or 130 base pairs in length. In some embodiments, the chemically modified tracrRNA may comprise a total of about 30 to about 130 base pairs in length. In some embodiments, the chemically modified tracrRNA may comprise a total of about 30 to about 40, about 30 to about 50, about 30 to about 60, about 30 to about 70, about 30 to about 75, about 30 to about 80, about 30 to about 90, about 30 to about 100, about 30 to about 110, about 30 to about 120, about 30 to about 130, about 40 to about 50, about 40 to about 60, about 40 to about 70, about 40 to about 75, about 40 to about 80, about 40 to about 90, about 40 to about 100, about 40 to about 110, about 40 to about 120, about 40 to about 130, about 50 to about 60, about 50 to about 70, about 50 to about 75, about 50 to about 80, about 50 to about 90, about 50 to about 100, about 50 to about 110, about 50 to about 120, about 50 to about 130, about 60 to about 70, about 60 to about 75, about 60 to about 80, about 60 to about 90, about 60 to about 100, about 60 to about 110, about 60 to about 120, about 60 to about 130, about 70 to about 75, about 70 to about 80, about 70 to about 90, about 70 to about 100, about 70 to about 110, about 70 to about 120, about 70 to about 130, about 75 to about 80, about 75 to about 90, about 75 to about 100, about 75 to about 110, about 75 to about 120, about 75 to about 130, about 80 to about 90, about 80 to about 100, about 80 to about 110, about 80 to about 120, about 80 to about 130, about 90 to about 100, about 90 to about 110, about 90 to about 120, about 90 to about 130, about 100 to about 110, about 100 to about 120, about 100 to about 130, about 110 to about 120, about 110 to about 130, or about 120 to about 130 base pairs in length. In some embodiments, the chemically modified tracrRNA may comprise a total of about 30, about 40, about 50, about 60, about 70, about 75, about 80, about 90, about 100, about 110, about 120, or about 130 base pairs in length. In some embodiments, the chemically modified tracrRNA may comprise a total of at least about 30, about 40, about 50, about 60, about 70, about 75, about 80, about 90, about 100, about 110, or about 120 base pairs in length. In some embodiments, the chemically modified tracrRNA may comprise a total of at most about 40, about 50, about 60, about 70, about 75, about 80, about 90, about 100, about 110, about 120, or about 130 base pairs in length.

[0342] In some embodiments, the chemically modified tracrRNA may comprise a total of from 1 to 130 chemically modified nucleotides. In some embodiments, the chemically modified tracrRNA may comprise a total of 1, 2, 3, 4, 5, 6, 7, 8, 9, 10, 11, 12, 13, 14, 15, 16, 17, 18, 19, 20, 21, 22, 23, 24, 25, 26, 27, 28, 29, 30, 31, 32, 33, 34, 35, 36, 37, 38, 39, 40, 41, 42, 43, 44, 45, 46, 47, 48, 49, 50, 51, 52, 53, 54, 55, 56, 57, 58, 59, 60, 61, 62, 63, 64, 65, 66, 67, 68, 69, 70, 71, 72, 73, 74, 75, 76, 77, 78, 79, 80, 81, 82, 83, 84, 85, 86, 87, 88, 89, 90, 91, 92, 93, 94, 95, 96, 97, 98, 99, 100, 101, 102, 103, 104, 105, 106, 107, 108, 109, 110, 111, 112, 113, 114, 115, 116, 117, 118, 119, 120, 121, 122, 123, 124, 125, 126, 127, 128, 129, or 130 chemically modified nucleotides. In some embodiments, the chemically modified tracrRNA may comprise a total of about 1 to about 10 chemically modified nucleotides. In some embodiments, the chemically modified tracrRNA may comprise a total of about 1 to about 2, about 1 to about 3, about 1 to about 4, about 1 to about 5, about 1 to about 6, about 1 to about 7, about 1 to about 8, about 1 to about 9, about 1 to about 10, about 2 to about 3, about 2 to about 4, about 2 to about 5, about 2 to about 6, about 2 to about 7, about 2 to about 8, about 2 to about 9, about 2 to about 10, about 3 to about 4, about 3 to about 5, about 3 to about 6, about 3 to about 7, about 3 to about 8, about 3 to about 9, about 3 to about 10, about 4 to about 5, about 4 to about 6, about 4 to about 7, about 4 to about 8, about 4 to about 9, about 4 to about 10, about 5 to about 6, about 5 to about 7, about 5 to about 8, about 5 to about 9, about 5 to about 10, about 6 to about 7, about 6 to about 8, about 6 to about 9, about 6 to about 10, about 7 to about 8, about 7 to about 9, about 7 to about 10, about 8 to about 9, about 8 to about 10, or about 9 to about 10 chemically modified nucleotides. In some embodiments, the chemically modified tracrRNA may comprise a total of about 1, about 2, about 3, about 4, about 5, about 6, about 7, about 8, about 9, or about 10 chemically modified nucleotides. In some embodiments, the chemically modified tracrRNA may comprise a total of at least about 1, about 2, about 3, about 4, about 5, about 6, about 7, about 8, or about 9 chemically modified nucleotides. In some embodiments, the chemically modified tracrRNA may comprise a total of at most about 2, about 3, about 4, about 5, about 6, about 7, about 8, about 9, or about 10 chemically modified nucleotides. In some embodiments, the chemically modified tracrRNA may comprise a total of about 10 to about 30 chemically modified nucleotides. In some embodiments, the chemically modified tracrRNA may comprise a total of about 10 to about 15, about 10 to about 20, about 10 to about 25, about 10 to about 30, about 15 to about 20, about 15 to about 25, about 15 to about 30, about 20 to about 25, about 20 to about 30, or about 25 to about 30 chemically modified nucleotides. In some embodiments, the chemically modified tracrRNA may comprise a total of about 10, about 15, about 20, about 25, or about 30 chemically modified nucleotides. In some embodiments, the chemically modified tracrRNA may comprise a total of at least about 10, about 15, about 20, or about 25 chemically modified nucleotides. In some embodiments, the spacer region may comprise a total of at most about 15, about 20, about 25, or about 30 chemically modified nucleotides. In some embodiments, the chemically modified tracrRNA may comprise a total of about 30 to about 130 chemically modified nucleotides. In some embodiments, the chemically modified tracrRNA may comprise a total of about 30 to about 40, about 30 to about 50, about 30 to about 60, about 30 to about 70, about 30 to about 75, about 30 to about 80, about 30 to about 90, about 30 to about 100, about 30 to about 110, about 30 to about 120, about 30 to about 130, about 40 to about 50, about 40 to about 60, about 40 to about 70, about 40 to about 75, about 40 to about 80, about 40 to about 90, about 40 to about 100, about 40 to about 110, about 40 to about 120, about 40 to about 130, about 50 to about 60, about 50 to about 70, about 50 to about 75, about 50 to about 80, about 50 to about 90, about 50 to about 100, about 50 to about 110, about 50 to about 120, about 50 to about 130, about 60 to about 70, about 60 to about 75, about 60 to about 80, about 60 to about 90, about 60 to about 100, about 60 to about 110, about 60 to about 120, about 60 to about 130, about 70 to about 75, about 70 to about 80, about 70 to about 90, about 70 to about 100, about 70 to about 110, about 70 to about 120, about 70 to about 130, about 75 to about 80, about 75 to about 90, about 75 to about 100, about 75 to about 110, about 75 to about 120, about 75 to about 130, about 80 to about 90, about 80 to about 100, about 80 to about 110, about 80 to about 120, about 80 to about 130, about 90 to about 100, about 90 to about 110, about 90 to about 120, about 90 to about 130, about 100 to about 110, about 100 to about 120, about 100 to about 130, about 110 to about 120, about 110 to about 130, or about 120 to about 130 chemically modified nucleotides. In some embodiments, the chemically modified tracrRNA may comprise a total of about 30, about 40, about 50, about 60, about 70, about 75, about 80, about 90, about 100, about 110, about 120, or about 130 chemically modified nucleotides. In some embodiments, the chemically modified tracrRNA may comprise a total of at least about 30, about 40, about 50, about 60, about 70, about 75, about 80, about 90, about 100, about 110, or about 120 chemically modified nucleotides. In some embodiments, the chemically modified tracrRNA may comprise a total of at most about 40, about 50, about 60, about 70, about 75, about 80, about 90, about 100, about 110, about 120, or about 130 chemically modified nucleotides.

[0343] In some embodiments, the chemically modified tracrRNA may comprise about 1% to about 100% chemically modified nucleotides. In some embodiments, the chemically modified tracrRNA may comprise about 1% to about 10%, about 1% to about 20%, about 1% to about 30%, about 1% to about 40%, about 1% to about 50%, about 1% to about 60%, about 1% to about 70%, about 1% to about 80%, about 1% to about 90%, about 1% to about 95%, about 1% to about 100%, about 10% to about 20%, about 10% to about 30%, about 10% to about 40%, about 10% to about 50%, about 10% to about 60%, about 10% to about 70%, about 10% to about 80%, about 10% to about 90%, about 10% to about 95%, about 10% to about 100%, about 20% to about 30%, about 20% to about 40%, about 20% to about 50%, about 20% to about 60%, about 20% to about 70%, about 20% to about 80%, about 20% to about 90%, about 20% to about 95%, about 20% to about 100%, about 30% to about 40%, about 30% to about 50%, about 30% to about 60%, about 30% to about 70%, about 30% to about 80%, about 30% to about 90%, about 30% to about 95%, about 30% to about 100%, about 40% to about 50%, about 40% to about 60%, about 40% to about 70%, about 40% to about 80%, about 40% to about 90%, about 40% to about 95%, about 40% to about 100%, about 50% to about 60%, about 50% to about 70%, about 50% to about 80%, about 50% to about 90%, about 50% to about 95%, about 50% to about 100%, about 60% to about 70%, about 60% to about 80%, about 60% to about 90%, about 60% to about 95%, about 60% to about 100%, about 70% to about 80%, about 70% to about 90%, about 70% to about 95%, about 70% to about 100%, about 80% to about 90%, about 80% to about 95%, about 80% to about 100%, about 90% to about 95%, about 90% to about 100%, or about 95% to about 100% chemically modified nucleotides. In some embodiments, the chemically modified tracrRNA may comprise about 1%, about 10%, about 20%, about 30%, about 40%, about 50%, about 60%, about 70%, about 80%, about 90%, about 95%, or about 100% chemically modified nucleotides. In some embodiments, the chemically modified tracrRNA may comprise at least about 1%, about 10%, about 20%, about 30%, about 40%, about 50%, about 60%, about 70%, about 80%, about 90%, or about 95% chemically modified nucleotides. In some embodiments, the chemically modified tracrRNA may comprise at most about 10%, about 20%, about 30%, about 40%, about 50%, about 60%, about 70%, about 80%, about 90%, about 95%, or about 100% chemically modified nucleotides.

[0344] In some embodiments, the chemically modified tracrRNA may have chemically modified nucleotide on one or more of the positions 1, 2, 3, 4, 5, 6, 7, 8, 9, 10, 11, 12, 13, 14, 15, 16, 17, 18, 19, 20, 21, 22, 23, 24, 25, 26, 27, 28, 29, 30, 31, 32, 33, 34, 35, 36, 37, 38, 39, 40, 41, 42, 43, 44, 45, 46, 47, 48, 49, 50, 51, 52, 53, 54, 55, 56, 57, 58, 59, 60, 61, 62, 63, 64, 65, 66, 67, 68, 69, 70, 71, 72, 73, 74, 75, 76, 77, 78, 79, 80, 81, 82, 83, 84, 85, 86, 87, 88, 89, 90, 91, 92, 93, 94, 95, 96, 97, 98, 99, 100, 101, 102, 103, 104, 105, 106, 107, 108, 109, 110, 111, 112, 113, 114, 115, 116, 117, 118, 119, 120, 121, 122, 123, 124, 125, 126, 127, 128, 129, or 130 in the 5′-3′ direction in the tracrRNA sequence.

[0345] In some embodiments, the chemically modified tracrRNA may have chemically modified nucleotide on one or more of the positions 1, 2, 3, 4, 5, 6, 7, 8, 9, 10, 11, 12, 13, 14, 15, 16, 17, 18, 19, 20, 21, 22, 23, 24, 25, 26, 27, 28, 29, 30, 31, 32, 33, 34, 35, 36, 37, 38, 39, 40, 41, 42, 43, 44, 45, 46, 47, 48, 49, 50, 51, 52, 53, 54, 55, 56, 57, 58, 59, 60, 61, 62, 63, 64, 65, 66, 67, 68, 69, 70, 71, 72, 73, 74, 75, 76, 77, 78, 79, 80, 81, 82, 83, 84, 85, 86, 87, 88, 89, 90, 91, 92, 93, 94, 95, 96, 97, 98, 99, 100, 101, 102, 103, 104, 105, 106, 107, 108, 109, 110, 111, 112, 113, 114, 115, 116, 117, 118, 119, 120, 121, 122, 123, 124, 125, 126, 127, 128, or 129 base pairs from the 5′ end of the tracrRNA sequence.

[0346] In some embodiments, the chemically modified tracrRNA may have chemically modified nucleotide on one or more of the positions 1, 2, 3, 4, 5, 6, 7, 8, 9, 10, 11, 12, 13, 14, 15, 16, 17, 18, 19, 20, 21, 22, 23, 24, 25, 26, 27, 28, 29, 30, 31, 32, 33, 34, 35, 36, 37, 38, 39, 40, 41, 42, 43, 44, 45, 46, 47, 48, 49, 50, 51, 52, 53, 54, 55, 56, 57, 58, 59, 60, 61, 62, 63, 64, 65, 66, 67, 68, 69, 70, 71, 72, 73, 74, 75, 76, 77, 78, 79, 80, 81, 82, 83, 84, 85, 86, 87, 88, 89, 90, 91, 92, 93, 94, 95, 96, 97, 98, 99, 100, 101, 102, 103, 104, 105, 106, 107, 108, 109, 110, 111, 112, 113, 114, 115, 116, 117, 118, 119, 120, 121, 122, 123, 124, 125, 126, 127, 128, or 129 base pairs from the 3′ end of the tracrRNA sequence.

[0347] In some embodiments, the chemically modified gRNA or sgRNA comprises phosphorothioate (PS) linkages at the 5′ or 3′ end of the gRNA sequence. In some embodiments, the chemically modified gRNA or sgRNA comprises 0, 1, 2, 3, 4, or 5 PS linkages at the 5′ end of the gRNA or sgRNA sequence. In some embodiments, the chemically modified gRNA or sgRNA comprises 0, 1, 2, 3, 4, or 5 PS linkages at the 3′ end of the gRNA or sgRNA sequence. In some embodiments, the chemically modified gRNA or sgRNA comprises 0, 1, 2, 3, 4, or 5 PS linkages, or any combinations thereof at each of 5′ and 3′ end of the gRNA or sgRNA sequence. In some embodiments, the chemically modified gRNA or sgRNA comprises 0, 1, 2 or 3 PS linkages, or any combinations thereof at each of 5′ and 3′ end of the gRNA or sgRNA sequence. In some embodiments, the chemically modified gRNA or sgRNA comprises 1 PS linkage at each of 5′ and 3′ end of the gRNA or sgRNA sequence. In some embodiments, the chemically modified gRNA or sgRNA comprises 2 PS linkages at each of 5′ and 3′ end of the gRNA or sgRNA sequence. In some embodiments, the chemically modified gRNA or sgRNA comprises 3 PS linkages at each of 5′ and 3′ end of the gRNA or sgRNA sequence. In some embodiments, the chemically modified gRNA or sgRNA comprises 4 PS linkages at each of 5′ and 3′ end of the gRNA or sgRNA sequence. In some embodiments, the chemically modified gRNA or sgRNA comprises 5 PS linkages at each of 5′ and 3′ end of the gRNA or sgRNA sequence. In some embodiments, the chemically modified gRNA or sgRNA comprises 3 PS linkages at the 5′ end and 0 PS linkage (i.e., no modification) at the 3′ end of the gRNA or sgRNA sequence. In some embodiments, the chemically modified gRNA or sgRNA comprises 3 PS linkages at the 5′ end and 1 PS linkage at the 3′ end of the gRNA or sgRNA sequence. In some embodiments, the chemically modified gRNA or sgRNA comprises 3 PS linkages at the 5′ end and 2 PS linkages at the 3′ end of the gRNA or sgRNA sequence. In some embodiments, the chemically modified gRNA or sgRNA comprises 3 PS linkages at the 5′ end and 4 PS linkages at the 3′ end of the gRNA or sgRNA sequence. In some embodiments, the chemically modified gRNA or sgRNA comprises 3 PS linkages at the 5′ end and 5 PS linkages at the 3′ end of the gRNA or sgRNA sequence. In some embodiments, the chemically modified gRNA or sgRNA comprises 2 PS linkages at the 5′ end and 0 PS linkage (i.e., no modification) at the 3′ end of the gRNA or sgRNA sequence. In some embodiments, the chemically modified gRNA or sgRNA comprises 2 PS linkages at the 5′ end and 1 PS linkage at the 3′ end of the gRNA or sgRNA sequence. In some embodiments, the chemically modified gRNA or sgRNA comprises 2 PS linkages at the 5′ end and 3 PS linkages at the 3′ end of the gRNA or sgRNA sequence. In some embodiments, the chemically modified gRNA or sgRNA comprises 2 PS linkages at the 5′ end and 4 PS linkages at the 3′ end of the gRNA or sgRNA sequence. In some embodiments, the chemically modified gRNA or sgRNA comprises 2 PS linkages at the 5′ end and 5 PS linkages at the 3′ end of the gRNA or sgRNA sequence.

[0348] In some embodiments, the chemically modified gRNA or sgRNA comprises 2 and no more than 2 contiguous phosphorothioate (PS) linkages at the 5′ end. In some embodiments, the chemically modified gRNA or sgRNA comprises 2 and no more than 2 contiguous phosphorothioate (PS) linkages at the 3′ end. In some embodiments, the chemically modified gRNA or sgRNA comprises 3 contiguous phosphorothioate (PS) linkages at the 5′ end. In some embodiments, the chemically modified gRNA or sgRNA comprises 3 contiguous phosphorothioate (PS) linkages at the 3′ end. In some embodiments, the chemically modified gRNA or sgRNA comprises the sequence 5′-UsUsU-3′ at the 3′end or at the 5′ end, wherein U indicates a uridine and wherein s indicates a phosphorothioate (PS) linkage. In some embodiments, the chemically modified gRNA or sgRNA comprises 3 phosphorothioate (PS) linkages at the 5′ end. In some embodiments, the chemically modified gRNA or sgRNA comprises 3 phosphorothioate (PS) linkages at the 3′ end. In some embodiments, the chemically modified gRNA or sgRNA comprises the two phosphorothioate linkages at the 5′ end, wherein the two phosphorothioate (PS) linkages are two contiguous phosphorothioate (PS) linkages at the first two nucleotide positions of the 5′ end. In some embodiments, the chemically modified gRNA or sgRNA comprises the two phosphorothioate linkages at the 5′ end, wherein the two phosphorothioate (PS) linkages are within the first 3-10 nucleotides of the 5′ end. In some embodiments, the chemically modified gRNA or sgRNA comprises the two phosphorothioate (PS) linkages at the 3′ end, wherein the two phosphorothioate (PS) linkages are two contiguous phosphorothioate (PS) linkages at the first two nucleotide positions of the 3′ end. In some embodiments, the chemically modified gRNA or sgRNA comprises the two phosphorothioate (PS) linkages at the 3′ end, wherein the two phosphorothioate (PS) linkages are within the first 3-10 nucleotides of the 3′ end. In some embodiments, the chemically modified gRNA or sgRNA comprises the sequence 5′-UsUsUs-3′ at the 3′ end, wherein U indicates a uridine and s indicates a phosphorothioate (PS) linkage. In some embodiments, the chemically modified gRNA or sgRNA comprises the sequence 5′-UsUsU-3′ at the 3′end, wherein U indicates a uridine and s indicates a phosphorothioate (PS) linkage.

[0349] In some embodiments, the chemically modified gRNA or sgRNA comprises PS linkages at the internal positions of the gRNA or sgRNA sequence. In some embodiments, the chemically modified gRNA or sgRNA comprises 1, 2, 3, 4, 5, 6, 7, 8, 9, or 10 PS linkages at the internal positions of the gRNA or sgRNA sequence. In some embodiments, the chemically modified gRNA or sgRNA comprises 1 PS linkage at the internal position of the gRNA or sgRNA sequence. In some embodiments, the chemically modified gRNA or sgRNA comprises 2 PS linkages at the internal positions of the gRNA or sgRNA sequence. In some embodiments, the chemically modified gRNA or sgRNA comprises 3 PS linkages at the internal positions of the gRNA or sgRNA sequence. In some embodiments, the chemically modified gRNA or sgRNA comprises 4 PS linkages at the internal positions of the gRNA or sgRNA sequence. In some embodiments, the chemically modified gRNA or sgRNA comprises 5 PS linkages at the internal positions of the gRNA or sgRNA sequence. In some embodiments, the chemically modified gRNA or sgRNA comprises 6 PS linkages at the internal positions of the gRNA or sgRNA sequence. In some embodiments, the chemically modified gRNA or sgRNA comprises 7 PS linkages at the internal positions of the gRNA or sgRNA sequence. In some embodiments, the chemically modified gRNA or sgRNA comprises 8 PS linkages at the internal positions of the gRNA or sgRNA sequence. In some embodiments, the chemically modified gRNA or sgRNA comprises 9 PS linkages at the internal positions of the gRNA or sgRNA sequence. In some embodiments, the chemically modified gRNA or sgRNA comprises 10 PS linkages at the internal positions of the gRNA or sgRNA sequence.

[0350] In some embodiments, the chemically modified gRNA or sgRNA comprises PS linkages at the 5′ end, the 3′ end, or at the internal positions, or any combination thereof, of the gRNA or sgRNA sequence. In some embodiments, the chemically modified gRNA or sgRNA comprises 0, 1, 2, 3, 4, 5, 6, 7, 8, 9, or 10 PS linkages at the 5′end, the 3′ end, or at the internal positions, or any combination thereof, of the gRNA or sgRNA sequence.

[0351] In some embodiments, the chemically modified gRNA or sgRNA comprises 2 PS linkages at the 5′ end, 3 PS linkages at the 3′ end, and 0 PS linkage (i.e., no modification) at the internal position of the gRNA or sgRNA sequence. In some embodiments, the chemically modified gRNA or sgRNA comprises 2 PS linkages at the 5′ end, 3 PS linkages at the 3′ end, and 1 PS linkage at the internal position of the gRNA or sgRNA sequence. In some embodiments, the chemically modified gRNA or sgRNA comprises 2 PS linkages at the 5′ end, 3 PS linkages at the 3′ end, and 2 PS linkages at the internal positions of the gRNA or sgRNA sequence. In some embodiments, the chemically modified gRNA or sgRNA comprises 2 PS linkages at the 5′ end, 3 PS linkages at the 3′ end, and 3 PS linkages at the internal positions of the gRNA or sgRNA sequence. In some embodiments, the chemically modified gRNA or sgRNA comprises 2 PS linkages at the 5′ end, 3 PS linkages at the 3′ end, and 4 PS linkages at the internal positions of the gRNA or sgRNA sequence. In some embodiments, the chemically modified gRNA or sgRNA comprises 2 PS linkages at the 5′ end, 3 PS linkages at the 3′ end, and 5 PS linkages at the internal positions of the gRNA or sgRNA sequence. In some embodiments, the chemically modified gRNA or sgRNA comprises 2 PS linkages at the 5′ end, 3 PS linkages at the 3′ end, and 6 PS linkages at the internal positions of the gRNA or sgRNA sequence.

[0352] In some embodiments, the chemically modified gRNA or sgRNA comprises 3 PS linkages at the 5′ end, 2 PS linkages at the 3′ end, and 0 PS linkage (i.e., no modification) at the internal position of the gRNA or sgRNA sequence. In some embodiments, the chemically modified gRNA or sgRNA comprises 3 PS linkages at the 5′ end, 2 PS linkages at the 3′ end, and 1 PS linkage at the internal position of the gRNA or sgRNA sequence. In some embodiments, the chemically modified gRNA or sgRNA comprises 3 PS linkages at the 5′ end, 2 PS linkages at the 3′ end, and 2 PS linkages at the internal positions of the gRNA or sgRNA sequence. In some embodiments, the chemically modified gRNA or sgRNA comprises 3 PS linkages at the 5′ end, 2 PS linkages at the 3′ end, and 3 PS linkages at the internal positions of the gRNA or sgRNA sequence. In some embodiments, the chemically modified gRNA or sgRNA comprises 3 PS linkages at the 5′ end, 2 PS linkages at the 3′ end, and 4 PS linkages at the internal positions of the gRNA or sgRNA sequence. In some embodiments, the chemically modified gRNA or sgRNA comprises 3 PS linkages at the 5′ end, 2 PS linkages at the 3′ end, and 5 PS linkages at the internal positions of the gRNA or sgRNA sequence. In some embodiments, the chemically modified gRNA or sgRNA comprises 3 PS linkages at the 5′ end, 2 PS linkages at the 3′ end, and 6 PS linkages at the internal positions of the gRNA or sgRNA sequence.

[0353] In some embodiments, the chemically modified gRNA or sgRNA comprises 2 PS linkages at the 5′ end, 2 PS linkages at the 3′ end, and 0 PS linkage (i.e., no modification) at the internal position of the gRNA or sgRNA sequence. In some embodiments, the chemically modified gRNA or sgRNA comprises 2 PS linkages at the 5′ end and 2 PS linkages at the 3′ end and 1 PS linkage at the internal position of the gRNA or sgRNA sequence. In some embodiments, the chemically modified gRNA or sgRNA comprises 2 PS linkages at the 5′ end and 2 PS linkages at the 3′ end and 2 PS linkages at the internal positions of the gRNA or sgRNA sequence. In some embodiments, the chemically modified gRNA or sgRNA comprises 2 PS linkages at the 5′ end and 2 PS linkages at the 3′ end and 3 PS linkages at the internal positions of the gRNA or sgRNA sequence. In some embodiments, the chemically modified gRNA or sgRNA comprises 2 PS linkages at the 5′ end and 2 PS linkages at the 3′ end and 4 PS linkages at the internal positions of the gRNA or sgRNA sequence. In some embodiments, the chemically modified gRNA or sgRNA comprises 2 PS linkages at the 5′ end and 2 PS linkages at the 3′ end and 5 PS linkages at the internal positions of the gRNA or sgRNA sequence. In some embodiments, the chemically modified gRNA or sgRNA comprises 2 PS linkages at the 5′ end and 2 PS linkages at the 3′ end and 6 PS linkages at the internal positions of the gRNA or sgRNA sequence.

[0354] In some embodiments, the chemically modified gRNA or sgRNA comprises 3 PS linkages at the 5′ end, 3 PS linkages at the 3′ end, and 0 PS linkage (i.e., no modification) at the internal position of the gRNA or sgRNA sequence. In some embodiments, the chemically modified gRNA or sgRNA comprises 3 PS linkages at the 5′ end and 3 PS linkages at the 3′ end and 1 PS linkage at the internal position of the gRNA or sgRNA sequence. In some embodiments, the chemically modified gRNA or sgRNA comprises 3 PS linkages at the 5′ end and 3 PS linkages at the 3′ end and 2 PS linkages at the internal positions of the gRNA or sgRNA sequence. In some embodiments, the chemically modified gRNA or sgRNA comprises 3 PS linkages at the 5′ end and 3 PS linkages at the 3′ end and 3 PS linkages at the internal positions of the gRNA or sgRNA sequence. In some embodiments, the chemically modified gRNA or sgRNA comprises 3 PS linkages at the 5′ end and 3 PS linkages at the 3′ end and 4 PS linkages at the internal positions of the gRNA or sgRNA sequence. In some embodiments, the chemically modified gRNA or sgRNA comprises 3 PS linkages at the 5′ end and 3 PS linkages at the 3′ end and 5 PS linkages at the internal positions of the gRNA or sgRNA sequence. In some embodiments, the chemically modified gRNA or sgRNA comprises 3 PS linkages at the 5′ end and 3 PS linkages at the 3′ end and 6 PS linkages at the internal positions of the gRNA or sgRNA sequence.

[0355] In some embodiments, the chemically modified gRNA or sgRNA comprises additional modified or unmodified nucleotide (N) with phosphodiester linkage, wherein N is an A, C, G, U, dA (deoxyA), dC (deoxyC), dG (deoxyG), or T, and any combinations thereof. In some embodiments, the chemically modified gRNA or sgRNA comprises 1, 2, 3, 4, or 5 additional N with phosphodiester linkage, wherein N is an A, G, U, dA, dG, dC, or T, and any combinations thereof. In some embodiments, the chemically modified gRNA or sgRNA comprises 1, 2, 3, 4, or 5 additional N with phosphodiester linkage at the 5′ or 3′ end. In one embodiment, the chemically modified gRNA or sgRNA comprises 1, 2, 3, 4, or 5 additional N with phosphodiester linkage at the 5′ end. In a preferred embodiment, the chemically modified gRNA or sgRNA comprises 1, 2, 3, 4, or 5 additional N with phosphodiester linkage at the 3′ end. In some embodiments, the chemically modified gRNA or sgRNA comprises 1, 2, 3, 4, or 5 additional N with phosphodiester linkage and each N is the same modified or unmodified nucleotide. For example, the chemically modified gRNA or sgRNA may comprise 4 additional N with phosphodiester linkage and each N of the 4 additional N is A, C, G, U, dA, dC, dG, or T. For example, the chemically modified gRNA or sgRNA may comprise 4 additional N with phosphodiester linkage and each N of the 4 additional N is A. For example, the chemically modified gRNA or sgRNA may comprise 3 additional N with phosphodiester linkage and each N of the 3 additional N is A, C, G, U, dA, dC, dG, or T. For example, the chemically modified gRNA or sgRNA may comprise 3 additional N with phosphodiester linkage and each N of the 3 additional N is A. For example, the chemically modified gRNA or sgRNA may comprise 3 additional N with phosphodiester linkage and each N of the 3 additional N is C. For example, the chemically modified gRNA or sgRNA may comprise 3 additional N with phosphodiester linkage and each N of the 3 additional N is G. For example, the chemically modified gRNA or sgRNA may comprise 3 additional N with phosphodiester linkage and each N of the 3 additional N is U. For example, the chemically modified gRNA or sgRNA may comprise 3 additional N with phosphodiester linkage and each N of the 3 additional N is dA. For example, the chemically modified gRNA or sgRNA may comprise 3 additional N with phosphodiester linkage and each N of the 3 additional N is dC. For example, the chemically modified gRNA or sgRNA may comprise 3 additional N with phosphodiester linkage and each N of the 3 additional N is dG. For example, the chemically modified gRNA or sgRNA may comprise 3 additional N with phosphodiester linkage and each N of the 3 additional N is T.

[0356] In some embodiments, the chemically modified gRNA or sgRNA comprises additional Uracil (U) with phosphodiester linkage at the 5′ or 3′ end. In one embodiment, the chemically modified gRNA or sgRNA comprises additional U with phosphodiester linkage at the 5′ end. In a preferred embodiment, the chemically modified gRNA or sgRNA comprises additional U with phosphodiester linkage at the 3′ end. In some embodiments, the chemically modified gRNA or sgRNA comprises 1, 2, 3, 4, or 5 additional U with phosphodiester linkage at the 5′ or 3′ end. In some embodiments, the chemically modified gRNA or sgRNA comprises 1 additional U with phosphodiester linkage at the 5′ end. In some embodiments, the chemically modified gRNA or sgRNA comprises 1 additional U with phosphodiester linkage at the 3′ end. In some embodiments, the chemically modified gRNA or sgRNA comprises 2 additional U with phosphodiester linkage at the 5′ end. In some embodiments, the chemically modified gRNA or sgRNA comprises 2 additional U with phosphodiester linkage at the 3′ end. In some embodiments, the chemically modified gRNA or sgRNA comprises 3 additional U with phosphodiester linkage at the 5′ end. In a preferred embodiment, the chemically modified gRNA or sgRNA comprises 3 additional U with phosphodiester linkage at the 3′ end. In some embodiments, the chemically modified gRNA or sgRNA comprises 4 additional U with phosphodiester linkage at the 5′ end. In some embodiments, the chemically modified gRNA or sgRNA comprises 4 additional U with phosphodiester linkage at the 3′ end. In some embodiments, the chemically modified gRNA or sgRNA comprises 5 additional U with phosphodiester linkage at the 5′ end. In some embodiments, the chemically modified gRNA or sgRNA comprises 5 additional U with phosphodiester linkage at the 3′ end.

[0357] In some embodiments, the chemically modified gRNA or sgRNA comprises a ribonebularine (depicted as “X” in this application, e.g., in Table 1 or Table 24). In some embodiments, the chemically modified gRNA or sgRNA comprises 0, 1, 2, 3, 4, 5, 6, 7, 8, 9, or 10 ribonebularines. In some embodiments, the chemically modified gRNA or sgRNA does not comprise ribonebularine. In some embodiments, the chemically modified gRNA or sgRNA comprises 1 ribonebularine. In some embodiments, the chemically modified gRNA or sgRNA comprises 2 ribonebularines. In some embodiments, the chemically modified gRNA or sgRNA comprises 3 ribonebularines. In some embodiments, the chemically modified gRNA or sgRNA comprises 4 ribonebularines. In some embodiments, the chemically modified gRNA or sgRNA comprises 5 ribonebularines. In some embodiments, the chemically modified gRNA or sgRNA comprises 6 ribonebularines. In some embodiments, the chemically modified gRNA or sgRNA comprises 7 ribonebularines. In some embodiments, the chemically modified gRNA or sgRNA comprises 8 ribonebularines. In some embodiments, the chemically modified gRNA or sgRNA comprises 9 ribonebularines. In some embodiments, the chemically modified gRNA or sgRNA comprises 10 ribonebularines. In some embodiments, the nebularine replaces an adenine in an unmodified gRNA or sgRNA or sgRNA or sgRNA. In some embodiments, the nebularine is in the spacer sequence. In some embodiments, the nebularine is in a tracrRNA sequence. In some embodiments, the nebularine is in a crRNA sequence in the tracrRNA sequence. In some embodiments, the nebularine is in a stem loop structure in the tracrRNA sequence.

[0358] In some embodiments, the chemically modified gRNA or sgRNA comprises a 2′-O-methylnebularine (depicted as “x” in this application, e.g., in Table 1 or Table 24). In some embodiments, the chemically modified gRNA or sgRNA comprises 0, 1, 2, 3, 4, 5, 6, 7, 8, 9, or 10 2′-O-methylnebularines. In some embodiments, the chemically modified gRNA or sgRNA does not comprise 2′-O-methylnebularine. In some embodiments, the chemically modified gRNA or sgRNA comprises 1 2′-O-methylnebularine. In some embodiments, the chemically modified gRNA or sgRNA comprises 2 2′-O-methylnebularines. In some embodiments, the chemically modified gRNA or sgRNA comprises 3 2′-O-methylnebularines. In some embodiments, the chemically modified gRNA or sgRNA comprises 4 2′-O-methylnebularines. In some embodiments, the chemically modified gRNA or sgRNA comprises 5 2′-O-methylnebularines. In some embodiments, the chemically modified gRNA or sgRNA comprises 6 2′-O-methylnebularines. In some embodiments, the chemically modified gRNA or sgRNA comprises 7 2′-O-methylnebularines. In some embodiments, the chemically modified gRNA or sgRNA comprises 8 2′-O-methylnebularines. In some embodiments, the chemically modified gRNA or sgRNA comprises 9 2′-O-methylnebularines. In some embodiments, the chemically modified gRNA or sgRNA comprises 10 2′-O-methylnebularines. In some embodiments, the 2′-O-methylnebularine replaces an adenine in an unmodified gRNA or sgRNA or sgRNA or sgRNA. In some embodiments, the 2′-O-methylnebularine is in the spacer sequence. In some embodiments, the 2′-O-methylnebularine is in a tracrRNA sequence. In some embodiments, the 2′-O-methylnebularine is in a crRNA sequence in the tracrRNA sequence. In some embodiments, the 2′-O-methylnebularine is in a stem loop structure in the tracrRNA sequence.

[0359] In some embodiments, the chemically modified gRNA or sgRNA comprises a 2′-deoxynebularine (depicted as “dX” in this application, e.g., in Table 1 or Table 24). In some embodiments, the chemically modified gRNA or sgRNA comprises 0, 1, 2, 3, 4, 5, 6, 7, 8, 9, or 10 2′-deoxynebularine. In some embodiments, the chemically modified gRNA or sgRNA does not comprise 2′-deoxynebularine. In some embodiments, the chemically modified gRNA or sgRNA comprises 1 2′-deoxynebularine. In some embodiments, the chemically modified gRNA or sgRNA comprises 2 2′-deoxynebularine. In some embodiments, the chemically modified gRNA or sgRNA comprises 3 2′-deoxynebularines. In some embodiments, the chemically modified gRNA or sgRNA comprises 4 2′-deoxynebularines. In some embodiments, the chemically modified gRNA or sgRNA comprises 5 2′-deoxynebularines. In some embodiments, the chemically modified gRNA or sgRNA comprises 6 2′-deoxynebularines. In some embodiments, the chemically modified gRNA or sgRNA comprises 7 2′-deoxynebularines. In some embodiments, the chemically modified gRNA or sgRNA comprises 8 2′-deoxynebularines. In some embodiments, the chemically modified gRNA or sgRNA comprises 9 2′-deoxynebularines. In some embodiments, the chemically modified gRNA or sgRNA comprises 10 2′-deoxynebularines. In some embodiments, the 2′-deoxynebularine replaces an adenine in an unmodified gRNA or sgRNA or sgRNA or sgRNA. In some embodiments, the 2′-deoxynebularine is in the spacer sequence. In some embodiments, the 2′-deoxynebularine is in a tracrRNA sequence. In some embodiments, the 2′-deoxynebularine is in a crRNA sequence in the tracrRNA sequence. In some embodiments, the 2′-deoxynebularine is in a stem loop structure in the tracrRNA sequence.

[0360] In some embodiments, the chemically modified gRNA or sgRNA comprises a 2′-O-methylribonucleotide (2′-OMe). In some embodiments, the chemically modified gRNA or sgRNA comprises from about 0 to about 70 2′-OMe. In some embodiments, the chemically modified gRNA or sgRNA comprises 0, 1, 2, 3, 4, 5, 6, 7, 8, 9, 10, 11, 12, 13, 14, 15, 16, 17, 18, 19, 20, 21, 22, 23, 24, 25, 26, 27, 28, 29, 30, 31, 32, 33, 34, 35, 36, 37, 38, 39, 40, 41, 42, 43, 44, 45, 46, 47, 48, 49, 50, 51, 52, 53, 54, 55, 56, 57, 58, 59, 60, 61, 62, 63, 64, 65, 66, 67, 68, 69, or 70 2′-OMe. In some embodiments, the chemically modified gRNA or sgRNAs may comprise from about 0 to about 70 2′-OMe. In some embodiments, the chemically modified gRNA or sgRNAs may comprise from about 0 to about 10, about 0 to about 20, about 0 to about 30, about 0 to about 35, about 0 to about 40, about 0 to about 45, about 0 to about 50, about 0 to about 55, about 0 to about 60, about 0 to about 65, about 0 to about 70, about 10 to about 20, about 10 to about 30, about 10 to about 35, about 10 to about 40, about 10 to about 45, about 10 to about 50, about 10 to about 55, about 10 to about 60, about 10 to about 65, about 10 to about 70, about 20 to about 30, about 20 to about 35, about 20 to about 40, about 20 to about 45, about 20 to about 50, about 20 to about 55, about 20 to about 60, about 20 to about 65, about 20 to about 70, about 30 to about 35, about 30 to about 40, about 30 to about 45, about 30 to about 50, about 30 to about 55, about 30 to about 60, about 30 to about 65, about 30 to about 70, about 35 to about 40, about 35 to about 45, about 35 to about 50, about 35 to about 55, about 35 to about 60, about 35 to about 65, about 35 to about 70, about 40 to about 45, about 40 to about 50, about 40 to about 55, about 40 to about 60, about 40 to about 65, about 40 to about 70, about 45 to about 50, about 45 to about 55, about 45 to about 60, about 45 to about 65, about 45 to about 70, about 50 to about 55, about 50 to about 60, about 50 to about 65, about 50 to about 70, about 55 to about 60, about 55 to about 65, about 55 to about 70, about 60 to about 65, about 60 to about 70, or about 65 to about 70 2′-OMe. In some embodiments, the chemically modified gRNA or sgRNAs may comprise from about 0, about 10, about 20, about 30, about 35, about 40, about 45, about 50, about 55, about 60, about 65, or about 70 2′-OMe. In some embodiments, the chemically modified gRNA or sgRNAs may comprise from at least about 0, about 10, about 20, about 30, about 35, about 40, about 45, about 50, about 55, about 60, or about 65 2′-OMe. In some embodiments, the chemically modified gRNA or sgRNAs may comprise from at most about 10, about 20, about 30, about 35, about 40, about 45, about 50, about 55, about 60, about 65, or about 70 2′-OMe. In some embodiments, the chemically modified gRNA or sgRNA does not comprise 2′-OMe. In some embodiments, the chemically modified gRNA or sgRNA comprises 62 2′-OMe. In some embodiments, the chemically modified gRNA or sgRNA comprises 54 2′-OMe.

[0361] In some embodiments, the chemically modified gRNA or sgRNA comprises 2′-OMe at the 5′ end of the gRNA or sgRNA sequence. In some embodiments, the chemically modified gRNA or sgRNA comprises 2′-OMe at the 3′ end of the gRNA or sgRNA sequence. In some embodiments, the chemically modified gRNA or sgRNA comprises 2′-OMe at the internal positions of the gRNA or sgRNA sequence. In some embodiments, the chemically modified gRNA or sgRNA comprises 2′-OMe at the 5′ end, 3′ end, or internal positions of the gRNA or sgRNA sequence. In some embodiments, the chemically modified gRNA or sgRNA comprises 2′-OMe at the 5′ end, 3′ end, and internal positions of the gRNA or sgRNA sequence. In some embodiments, the chemically modified gRNA or sgRNA does not comprise 2′-OMe at the positions 2, 3, 4, 23, 24, 25, 27, 31, or 42, or any combinations thereof, in the 5′-3′ direction in the gRNA or sgRNA sequence. In some embodiments, the chemically modified gRNA or sgRNA does not comprise 2′-OMe at the positions 2, 3, 4, 23, 24, 25, 27, 31, and 42 in the 5′-3′ direction in the gRNA or sgRNA sequence.

[0362] An exemplary chemically modified gRNA or sgRNA sequence is shown below:

(SEQ ID NO: 55)
5′-csasgsGUUCCAUGGGAUGCUCUgUUUUAGagcuaGaaauagcaa
GUUaAaAuAaggCUaGUCcGUUAucAAcuuGaaaaaguGgcaccgAgUCg
gugcusususu-3

wherein the uppercase A, U, G, or C denote a ribonucleotide adenosine, uridine, guanine, or cytidine, the lowercase a, u, g, and c indicate 2′-O-Methyl-modified adenine, uridine, guanine, and cytidine, and “s” denotes phosphorothioate (PS) linkage.

[0363] An exemplary chemically modified spacer sequence is shown below:

(SEQ ID NO: 56)
5′-csasgsGUUCCAUGGGAUGCUCU-3′

wherein the uppercase A, U, G, or C denote a ribonucleotide adenosine, uridine, guanine, or cytidine, the lowercase a, u, g, and c indicate 2′-O-Methyl-modified adenine, uridine, guanine, and cytidine, and “s” denotes phosphorothioate (PS) linkage.

[0364] An exemplary chemically modified tracrRNA sequence is shown below:

(SEQ ID NO: 57)
5′-gUUUUAGagcuaGaaauagcaaGUUaAaAuAaggCUaGUCcGUUA
ucAAcuuGaaaaaguGgcaccgAgUCggugcusususu-3′

wherein the uppercase A, U, G, or C denote a ribonucleotide adenosine, uridine, guanine, or cytidine, the lowercase a, u, g, and c indicate 2′-O-Methyl-modified adenine, uridine, guanine, and cytidine, and “s” denotes phosphorothioate (PS) linkage.

[0365] Another exemplary chemically modified gRNA or sgRNA sequence is shown below:

(SEQ ID NO: 2244)
5′-csasgsGUUCCAUGGGAUGCUCUgUUUUAGagcuagaaauagcaa
GUUaAaAuAaggcuaGUccGUUAucAAcuugaaaaagugGcaccgagucg
gugcusususu-3′

wherein the uppercase A, U, G, or C denote a ribonucleotide adenosine, uridine, guanine, or cytidine, the lowercase a, u, g, and c indicate 2′-O-Methyl-modified adenine, uridine, guanine, and cytidine, and “s” denotes phosphorothioate (PS) linkage.

[0366] Another exemplary chemically modified tracrRNA sequence is shown below:

(SEQ ID NO: 57)
5′-gUUUUAGagcuagaaauagcaaGUUaAaAuAaggcuaGUccGUUAuc
AAcuugaaaaagugGcaccgagucggugcusususu-3′

[0367] Another exemplary chemically modified guide RNA sequence is shown below:

(SEQ ID NO: 58)
5'-cscscsGCACCTTGGCGCAGCGGGUUUUAGAGCUAGAAAUAGCA
AGUUAAAAUAAGGCUAGUCCGUUAUCAACUUGAAAAAGUGGCACCGAGU
CGGUGCUsususu-3',

wherein the uppercase A, U, G, or C denote a ribonucleotide adenosine, uridine, guanine, or cytidine, the lowercase a, u, g, and c indicate 2′-O-Methyl-modified adenine, uridine, guanine, and cytidine, and “s” denotes phosphorothioate (PS) linkage.

[0368] Another exemplary chemically modified guide RNA sequence is shown below:

(GA091)
(SEQ ID NO: 59)
5′-asasgsAUACCUGAAUAACCCUCGUUUUAGAGCUAGAAAUAGCAAGU
UAAAAUAAGGCUAGUCCGUUAUCAACUUGAAAAAGUGGCACCGAGUCGGU
GCUsususu-3′

[0369] Another exemplary chemically modified guide RNA sequence is shown below:

(GA098)
(SEQ ID NO: 60)
5′-asasgsAUACCUGAAUAACCCUCGUUUUAGAgcuagaaauagcAAGU
UAAAAUAAGGCUAGUCCGUUAUCAacuugaaaaaguggcaccgagucggu
gcusususu 3′

wherein the uppercase A, U, G, or C denote a ribonucleotide adenosine, uridine, guanine, or cytidine, the lowercase a, u, g, and c indicate 2′-O-Methyl-modified adenine, uridine, guanine, and cytidine, and “s” denotes phosphorothioate (PS) linkage.

[0370] Another exemplary chemically modified guide RNA sequence is shown below:

(GA099)
(SEQ ID NO: 2250)
5′-asasgsAUACCUGAAUAACCCUCgUUUUAGagcuaGaaauagcaaGU
UaAaAuAaggCUaGUCcGUUAucAAcuuGaaaaaguGgcaccgAgUCggu
gcusususu-3′

wherein the uppercase A, U, G, or C denote a ribonucleotide adenosine, uridine, guanine, or cytidine, the lowercase a, u, g, and c indicate 2′-O-Methyl-modified adenine, uridine, guanine, and cytidine, and “s” denotes phosphorothioate (PS) linkage.

[0371] Another exemplary chemically modified guide RNA sequence is shown below:

(GA100)
(SEQ ID NO: 2251)
5′-asasgsAUACCUGAAUAACCCUCgUUUUAGagcuagaaauagcaa
GUUaAaAuAaggcuaGUccGUUAucAAcuugaaaaagugGcaccgagucg
gugcusususu-3′

wherein the uppercase A, U, G, or C denote a ribonucleotide adenosine, uridine, guanine, or cytidine, the lowercase a, u, g, and c indicate 2′-O-Methyl-modified adenine, uridine, guanine, and cytidine, and “s” denotes phosphorothioate (PS) linkage.

[0372] Another exemplary chemically modified guide RNA sequence is shown below:

(GA385)
(SEQ ID NO: 11)
5′-cscscsGCACCUUGGCGCAGCGGgUUUUAGagcuagaaauagcaaGU
UaAaAuAaggcuaGUccGUUAucAAcuugaaaaagugGcaccgagucggu
gcusususuuuu-3′

wherein the uppercase A, U, G, or C denote a ribonucleotide adenosine, uridine, guanine, or cytidine, the lowercase a, u, g, and c indicate 2′-O-Methyl-modified adenine, uridine, guanine, and cytidine, and “s” denotes phosphorothioate (PS) linkage.

[0373] Another exemplary chemically modified guide RNA sequence is shown below:

(GA386)
(SEQ ID NO: 2241)
5′-cscscsGCACCUUGGCGCAGCGGgUUUUAGagcuagaaauagcaaGU
UaAaAuAaggcuaGUccGUUAucAAcuugaaaaagugGcaccgagucggu
gcusususuuUu-3′,

wherein the uppercase A, U, G, or C denote a ribonucleotide adenosine, uridine, guanine, or cytidine, the lowercase a, u, g, and c indicate 2′-O-Methyl-modified adenine, uridine, guanine, and cytidine, and “s” denotes phosphorothioate (PS) linkage.

[0374] Another exemplary chemically modified guide RNA sequence is shown below:

(GA387)
(SEQ ID NO: 12)
5′-cscscsGCACCUUGGCGCAGCGgUUUUAGagcuaGaaauagcaaGUU
aAaAuAaggcuaGUccGUUAucAAcuuGaaaaagugGcaccgagucggug
cuususuuuu-3′,

wherein the uppercase A, U, G, or C denote a ribonucleotide adenosine, uridine, guanine, or cytidine, the lowercase a, u, g, and c indicate 2′-O-Methyl-modified adenine, uridine, guanine, and cytidine, and “s” denotes phosphorothioate (PS) linkage.

[0375] Additional chemically modified guide RNA sequences and target gene information are provided in Table 1 or Table 24.

[0376] In some embodiments, the chemical modification comprises a phosphorothioate linkage (PS). In some embodiments, the sgRNA comprises a phosphorothioate linkage (PS) at a 5′ end or at a 3′ end. In some embodiments, the sgRNA comprises two and no more than two contiguous phosphorothioate linkages (PS) at the 5′ end or at the 3′ end. In some embodiments, the sgRNA comprises three contiguous phosphorothioate linkages (PS) at the 5′ end or at the 3′ end. In some embodiments, the sgRNA comprises the sequence 5′-UsUsU-3′ at the 3′end or at the 5′ end, wherein U indicates a uridine and wherein s indicates a phosphorothioate linkage (PS).

[0377] In some aspects, provided herein, is an sgRNA that comprises (i) a spacer sequence and (ii) a tracrRNA sequence, wherein the spacer sequence hybridizes with a target polynucleotide sequence in a PCSK9 gene or an ANGPTL3 gene when contacted with the target polynucleotide sequence, wherein the tracrRNA sequence binds a Cas protein in a base editor system when contacted with the base editor system, and wherein the sgRNA comprises a nebularine or a deoxynebularine. In some embodiments, the nebularine or the deoxynebularine replaces an adenine in an unmodified sgRNA. In some embodiments, the nebularine or the deoxynebularine is in the spacer sequence. In some embodiments, wherein the nebularine or the deoxynebularine is in the tracrRNA sequence. In some embodiments, the nebularine or the deoxynebularine is in a tracrRNA sequence. In some embodiments, the nebularine or the deoxynebularine is in a crRNA sequence in the tracrRNA sequence. In some embodiments, the nebularine or the deoxynebularine is in a stem loop structure in the tracrRNA sequence.

[0378] In some aspects, provided herein, is a single guide RNA that comprises a sequence selected from Table 1 or Table 24, wherein a, u, g, and c indicate 2′-OMe modified adenine, uridine, guanine, and cytidine, wherein s indicates a phosphorothioate (PS) linkage.

[0379] In some embodiments, the chemically modified guide RNA comprises an unmodified tracrRNA sequence GUUUUAGAGCUAGAAAUAGCAAGUUAAAAUAAGGCUAGUCCGUUAUCAACUU GAAAAAGUGGCACCGAGUCGGUGCUUUU (SEQ ID NO: 61). In some embodiments, the chemically modified guide RNA comprises a tracrRNA sequence GUUUUAGAGCUAGAAAUAGCAAGUUAAAAUAAGGCUAGUCCGUUAUCAACUU GAAAAAGUGGCACCGAGUCGGUGCUUUU (SEQ ID NO: 61), which comprises 1 or more modification.

[0380] In some embodiments, the chemically modified guide RNA comprises an oligonucleotide that is at least 60%, at least 65%, at least 70%, at least 75%, at least 80%, at least 85%, at least 90%, at least 95%, at least 96%, at least 97%, at least 98%, at least 99%, at least 99.5%, at least 99.7%, or at least 99.9% identical to any one of the chemically modified guide RNAs listed in Table 1 or Table 24. In some embodiments, the chemically modified guide RNA comprises any one of the chemically modified guide RNAs listed in Table 1 or Table 24. In some embodiments, the chemically modified guide RNA is any one of the chemically modified guide RNAs listed in Table 1 or Table 24. In some embodiments, the chemically modified guide RNA comprises an oligonucleotide that is at least 60%, at least 65%, at least 70%, at least 75%, at least 80%, at least 85%, at least 90%, at least 95%, at least 96%, at least 97%, at least 98%, at least 99%, at least 99.5%, at least 99.7%, or at least 99.9% identical to any one of the chemically modified guide RNAs of SEQ ID NOs: 9-11, 55, 59, 253-452, 1618-1635, 1637-1800, 1802-2135, and 2191. In some embodiments, the chemically modified guide RNA comprises any one of the chemically modified guide RNAs of SEQ ID NOs: 9-11, 55, 59, 253-452, 1618-1635, 1637-1800, 1802-2135, and 2191. In some embodiments, the chemically modified guide RNA is any one of the chemically modified guide RNAs of SEQ ID NOs: 9-11, 55, 59, 253-452, 1618-1635, 1637-1800, 1802-2135, and 2191.

### Base Editing at Splice Sites

[0381] In an aspect, provided herein are base editor systems and methods of using same for modifying target genes by generating a genetic alteration in the DNA sequence that occurs at the boundary of an exon and an intron (splice site) at a splice site of a target gene. In some embodiments, the base editor system modifies a nucleobase at a splice acceptor site of a target gene. In some embodiments, the base editor system modifies a nucleobase at a splice donor site of a target gene. Modification at a splice donor or splice acceptor site may result in alternated transcripts. In some embodiments, modification at a splice donor or splice acceptor site results in aberrant transcripts. In some embodiments, modification at a splice donor or splice acceptor site results in unstable transcripts that are subject to degradation upon transcription. In some embodiments, modification at a splice donor or splice acceptor site results in a premature stop codon in the transcript. In certain embodiments, the methods comprise knocking out or knocking down genes by targeting splice acceptor-splice donor (SA-SD) sites or premature STOP (pmSTOP) sites. For such methods, guide polynucleotides are designed to disrupt one or more slice acceptor/donor sites within the target nucleotide sequence. In some embodiments, a guide polynucleotide, e.g. a single guide RNA comprises a sequence of at least 10 contiguous nucleotides or a sequence of 17-23 contiguous nucleotides, that is complementary to a target sequence in the genome of an organism and comprises a target base pair.

[0382] Disruptions at SA-SD sites are particularly advantageous because one may knock out coding sequence and non-coding RNAs (ncRNAs) without stop codon read through. Efficiency of base editing can be determined on the genomic level by EditR analysis of Sanger sequencing traces or by next generation sequencing (NGS), and also on the protein level by flow cytometry. Splice acceptor-splice donor base editing gRNAs that target the splice donor regions and the splice acceptor region exhibit base conversion efficiency of at least 5% and, in some cases, at least 80% or greater (e.g., 5%, 10%, 15%, 20%, 25%, 30%, 35%, 40%, 45%, 50%, 55%, 60%, 65%, 70%, 75%, 80%, 85%, 90%, 95%, 99%). In some cases, SA-SD gRNAs are significantly more efficient at C-to-T conversions than gRNAs that introduce premature stop codons disrupting.

[0383] Guide RNAs for targeting SA-SD sites can be designed using an R based program that identifies gRNAs targeting all ncRNAs and protein coding gene SA-SD sites. In some cases, the user supplies the reference genome, Ensembl transcript ID of the reference sequence, protospacer adjacent motif (PAM) site, and distance to subset upstream and downstream of exon-intron boundary. The program extracts sequences of 20 base pairs+the PAM length upstream and 15 base pairs downstream of an exon-intron boundary, as well as the splice site motif. In some embodiments, a guide molecule can be from 20 to 120 bases in length, or more. In certain embodiments, a guide molecule can be from 20 to 60 bases in length, or 20 to 50 bases, or 30 to 50 bases, or 39 to 46 bases.

[0384] In some cases, it is advantageous to use chemically modified gRNAs having increased stability when transfected into mammalian cells. For example, gRNAs can be chemically modified to comprise 2′-O-methyl phosphorthioate modifications on at least one 5′ nucleotide and at least one 3′ nucleotide of each gRNA. In some cases, the three terminal 5′ nucleotides and three terminal 3′ nucleotides are chemically modified to comprise 2′-O-methyl phosphorthioate modifications.

[0385] In an aspect, provided herein are base editing systems and methods for targeting diseases for base editing disruption. The target sequence can be any disease-associated polynucleotide or gene, as have been established in the art.

[0386] Without being bound by a particular theory, where the goal is to disrupt a gene in vivo for a therapeutic purpose, cytosine base editors may be used to directly introduce stop codons into the coding sequence of the gene (nonsense mutations) by altering specific codons for glutamine (CAG-TAG, CAA-TAA), arginine (CGA-TGA), and tryptophan (TGG-TAG/TAA/TGA, with editing of cytosines on the antisense strand). In certain embodiments, adenine base editors may be used to disrupt gene function and/or expression by modifying nucleobases at splice sites of target genes. The more favorable off-target profile of adenine base editors, particularly with respect to gRNA-independent off-target DNA base editing, recommend the use of adenine base editors over cytosine base editors for therapeutic purposes. In some embodiments, a base editor, e.g. an adenosine nucleobase editor as describe herein may be used to disrupt a splice donors at the 5′ ends of introns or splice acceptors at the 3′ ends of introns. In some embodiments, splice site disruption results in the inclusion of intronic sequences in messenger RNA (mRNA)—potentially introducing nonsense, frameshift, or in-frame indel mutations that result in premature stop codons or in insertion/deletion of amino acids that disrupt protein activity—or in the exclusion of exonic sequences, which can also introduce nonsense, frameshift, or in-frame indel mutations.

[0387] Canonical splice donors comprise the DNA sequence GT on the sense strand, whereas canonical splice acceptors comprise the DNA sequence AG. In some embodiments, a base editor, e.g. an adenosine nucleobase editor as described herein can be used to generate alteration of the sequence disrupts normal splicing. In some embodiments, the adenosine base editor disrupts a complementary base in the second position in the antisense strand (GT-GC). In some embodiments, the adenosine base editor disrupts the first position in the sense strand (AG-GG).

[0388] Examples of useful applications of mutation or disruption of an endogenous gene sequence that reduces or abolishes expression of the target gene related to the disease, with significantly reduced off-target effect, indels frequency, and/or other unintended genetic interruptions related to double stranded breaks that result from traditional CRISPR-Cas9 nuclease modification. In some embodiments, the target gene is a PCSK9 gene. In some embodiments, the target gene is an ANGPTL3 gene.

[0389] The chemically modified gRNAs or sgRNAs of the present disclosure can enhance or increase the binding affinity between a programmable DNA binding component of a base editor fusion protein, such as a Cas protein (e.g., a Cas9 protein, a nuclease inactive Cas9 protein, a Cas9 nickase) and guide RNAs (e.g., gRNAs or sgRNAs). In some embodiments, the chemically modified gRNAs or sgRNAs of the present disclosure can enhance or increase the binding affinity between a Cas protein and gRNAs or sgRNAs by at least 1%, 2%, 3%, 4%, 5%, 6%, 7%, 8%, 9%, 10%, 11%, 12%, 13%, 14%, 15%, 20%, 25%, 30%, 35%, 40%, 50%, 75%, 90%, 100%, 110%, 120%, 130%, 140%, 150%, 160%, 170%, 180%, 190%, 200%, 210%, 220%, 230%, 240%, 250%, 260%, 270%, 280%, 290%, 300%, 400% 500%, 600%, 700%, 800%, 900%, or 1000% compared to unmodified gRNAs or sgRNAs. In some embodiments, the chemically modified gRNAs or sgRNAs of the present disclosure can enhance or increase the binding affinity between a Cas protein, e.g. a Cas9 protein, a nuclease inactive Cas9 protein, a Cas9 nickase, and gRNAs or sgRNAs by about 20% to about 300%, about 50% to about 300%, about 100% to about 300%, about 150% to about 300%, about 20% to about 50%, about 20% to about 100%, about 20% to about 150%, about 20% to about 200%, about 20% to about 250%, about 50% to about 100%, about 50% to about 150%, about 50% to about 200%, about 50% to about 250%, about 100% to about 150%, about 100% to about 200%, about 100% to about 250%, about 150% to about 200%, about 150% to about 250%, about 200% to about 250%, at least about 20%, at least about 50%, at least about 100%, at least about 150%, at least about 200%, at least about 250%, or at least about 300% compared to unmodified gRNAs or sgRNAs. In some embodiments, the chemically modified gRNAs or sgRNAs of the present disclosure can enhance or increase the binding affinity between a base editor fusion or Cas protein and gRNAs or sgRNAs by about 20% to about 300%, about 50% to about 300%, about 100% to about 300%, about 150% to about 300%, about 20% to about 50%, about 20% to about 100%, about 20% to about 150%, about 20% to about 200%, about 20% to about 250%, about 50% to about 100%, about 50% to about 150%, about 50% to about 200%, about 50% to about 250%, about 100% to about 150%, about 100% to about 200%, about 100% to about 250%, about 150% to about 200%, about 150% to about 250%, about 200% to about 250%, at least about 20%, at least about 50%, at least about 100%, at least about 150%, at least about 200%, at least about 250%, or at least about 300% compared unmodified gRNAs or sgRNAs. In some embodiments, the chemically modified gRNAs or sgRNAs of the present disclosure can enhance or increase the binding affinity between a Cas protein or component of a base editor fusion protein and gRNAs or sgRNAs by at least 1.1-fold, 1.2-fold, 1.3-fold, 1.4-fold, 1.5-fold, 1.6-fold, 1.7-fold, 1.8-fold, 1.9-fold, 2-fold, 2.5-fold, 3-fold, 3.5-fold, 4-fold, 4.5-fold, 5-fold, 6-fold, 7-fold, 8-fold, 9-fold, 10-fold, or more than 10-fold compared to unmodified gRNAs or sgRNAs.

[0390] The chemically modified gRNAs or sgRNAs of the present disclosure can enhance or increase the binding affinity between a programmable DNA binding component of a base editor fusion protein, such as a Cas protein (e.g., a Cas9 protein, a nuclease inactive Cas9 protein, a Cas9 nickase) and the tracrRNA sequence of the guide RNAs (e.g., gRNAs or sgRNAs). In some embodiments, the chemically modified gRNAs or sgRNAs of the present disclosure can enhance or increase the binding affinity between a base editor fusion or Cas protein and the tracrRNA sequence of the gRNAs or sgRNAs by at least 1%, 2%, 3%, 4%, 5%, 6%, 7%, 8%, 9%, 10%, 11%, 12%, 13%, 14%, 15%, 20%, 25%, 30%, 35%, 40%, 50%, 75%, 90%, 100%, 110%, 120%, 130%, 140%, 150%, 160%, 170%, 180%, 190%, 200%, 210%, 220%, 230%, 240%, 250%, 260%, 270%, 280%, 290%, 300%, 400% 500%, 600%, 700%, 800%, 900%, or 1000% compared to unmodified gRNAs or sgRNAs. In some embodiments, the chemically modified gRNAs or sgRNAs of the present disclosure can enhance or increase the binding affinity between a base editor fusion or Cas protein and the tracrRNA sequence of the gRNAs or sgRNAs by about 20% to about 300%, about 50% to about 300%, about 100% to about 300%, about 150% to about 300%, about 20% to about 50%, about 20% to about 100%, about 20% to about 150%, about 20% to about 200%, about 20% to about 250%, about 50% to about 100%, about 50% to about 150%, about 50% to about 200%, about 50% to about 250%, about 100% to about 150%, about 100% to about 200%, about 100% to about 250%, about 150% to about 200%, about 150% to about 250%, about 200% to about 250%, at least about 20%, at least about 50%, at least about 100%, at least about 150%, at least about 200%, at least about 250%, or at least about 300% compared to unmodified gRNAs or sgRNAs. In some embodiments, the chemically modified gRNAs or sgRNAs of the present disclosure can enhance or increase the binding affinity between a base editor fusion or Cas protein and the tracrRNA sequence of the gRNAs or sgRNAs by about 20% to about 300%, about 50% to about 300%, about 100% to about 300%, about 150% to about 300%, about 20% to about 50%, about 20% to about 100%, about 20% to about 150%, about 20% to about 200%, about 20% to about 250%, about 50% to about 100%, about 50% to about 150%, about 50% to about 200%, about 50% to about 250%, about 100% to about 150%, about 100% to about 200%, about 100% to about 250%, about 150% to about 200%, about 150% to about 250%, about 200% to about 250%, at least about 20%, at least about 50%, at least about 100%, at least about 150%, at least about 200%, at least about 250%, or at least about 300% compared unmodified gRNAs or sgRNAs. In some embodiments, the chemically modified gRNAs or sgRNAs of the present disclosure can enhance or increase the binding affinity between a base editor fusion or Cas protein and the tracrRNA sequence of the gRNAs or sgRNAs by at least 1.1-fold, 1.2-fold, 1.3-fold, 1.4-fold, 1.5-fold, 1.6-fold, 1.7-fold, 1.8-fold, 1.9-fold, 2-fold, 2.5-fold, 3-fold, 3.5-fold, 4-fold, 4.5-fold, 5-fold, 6-fold, 7-fold, 8-fold, 9-fold, 10-fold, or more than 10-fold compared to unmodified gRNAs or sgRNAs.

[0391] In some embodiments, the tracrRNA sequence of the gRNAs or sgRNAs may bind a programmable DNA binding component of a base editor fusion protein, such as a Cas protein (,) with increased binding affinity compared to a tracrRNA sequence in an unmodified sgRNA. The type II Cas protein may be used as a system or base editor as described herein. In some embodiments, the tracrRNA sequence of the gRNAs or sgRNAs may bind a Type II Cas protein with at least 1%, 2%, 3%, 4%, 5%, 6%, 7%, 8%, 9%, 10%, 11%, 12%, 13%, 14%, 15%, 20%, 25%, 30%, 35%, 40%, 50%, 75%, 90%, 100%, 110%, 120%, 130%, 140%, 150%, 160%, 170%, 180%, 190%, 200%, 210%, 220%, 230%, 240%, 250%, 260%, 270%, 280%, 290%, 300%, 400% 500%, 600%, 700%, 800%, 900%, or 1000% increased binding affinity compared to a tracrRNA sequence in an unmodified sgRNA. In some embodiments, the tracrRNA sequence of the gRNAs or sgRNAs may bind a base editor comprising a Type II Cas protein with at least 1.1-fold, 1.2-fold, 1.3-fold, 1.4-fold, 1.5-fold, 1.6-fold, 1.7-fold, 1.8-fold, 1.9-fold, 2-fold, 2.5-fold, 3-fold, 3.5-fold, 4-fold, 4.5-fold, 5-fold, 6-fold, 7-fold, 8-fold, 9-fold, 10-fold, or more than 10-fold increased binding affinity compared to a tracrRNA sequence in an unmodified sgRNA. In some embodiments, the tracrRNA sequence of the gRNAs or sgRNAs may bind a base editor fusion protein comprising a Cas9 protein with increased binding affinity compared to a tracrRNA sequence in an unmodified sgRNA. In some embodiments, the tracrRNA sequence of the gRNAs or sgRNAs may bind a Cas9 protein with at least 1%, 2%, 3%, 4%, 5%, 6%, 7%, 8%, 9%, 10%, 11%, 12%, 13%, 14%, 15%, 20%, 25%, 30%, 35%, 40%, 50%, 75%, 90%, 100%, 110%, 120%, 130%, 140%, 150%, 160%, 170%, 180%, 190%, 200%, 210%, 220%, 230%, 240%, 250%, 260%, 270%, 280%, 290%, or 300% increased binding affinity compared to a tracrRNA sequence in an unmodified sgRNA. In some embodiments, the tracrRNA sequence of the gRNAs or sgRNAs may bind a base editor fusion protein comprising a Cas9 protein with at least 1.1-fold, 1.2-fold, 1.3-fold, 1.4-fold, 1.5-fold, 1.6-fold, 1.7-fold, 1.8-fold, 1.9-fold, 2-fold, 2.5-fold, 3-fold, 3.5-fold, 4-fold, 4.5-fold, 5-fold, 6-fold, 7-fold, 8-fold, 9-fold, 10-fold, or more than 10-fold increased binding affinity compared to a tracrRNA sequence in an unmodified sgRNA.

[0392] The chemically modified gRNAs or sgRNAs of the present disclosure can reduce off-target effect in gene modification (e.g., gene or genome editing) of the target sequence. In some embodiments, the chemically modified gRNAs or sgRNAs of the present disclosure can reduce off-target effect in gene modification of the target sequence by at least 1%, 2%, 3%, 4%, 5%, 6%, 7%, 8%, 9%, 10%, 11%, 12%, 13%, 14%, 15%, 20%, 25%, 30%, 35%, 40%, 50%, 75%, 90%, 100%, 110%, 120%, 130%, 140%, 150%, 160%, 170%, 180%, 190%, 200%, 210%, 220%, 230%, 240%, 250%, 260%, 270%, 280%, 290%, 300%, 400% 500%, 600%, 700%, 800%, 900%, or 1000% compared to unmodified gRNAs or sgRNAs. In some embodiments, the chemically modified gRNAs or sgRNAs of the present disclosure can reduce off-target effect in gene modification of the target sequence by about 20% to about 300%, about 50% to about 300%, about 100% to about 300%, about 150% to about 300%, about 20% to about 50%, about 20% to about 100%, about 20% to about 150%, about 20% to about 200%, about 20% to about 250%, about 50% to about 100%, about 50% to about 150%, about 50% to about 200%, about 50% to about 250%, about 100% to about 150%, about 100% to about 200%, about 100% to about 250%, about 150% to about 200%, about 150% to about 250%, about 200% to about 250%, at least about 20%, at least about 50%, at least about 100%, at least about 150%, at least about 200%, at least about 250%, or at least about 300% compared to unmodified gRNAs or sgRNAs. In some embodiments, the chemically modified gRNAs or sgRNAs of the present disclosure can reduce off-target effect in gene modification of the target sequence by about 20% to about 300%, about 50% to about 300%, about 100% to about 300%, about 150% to about 300%, about 20% to about 50%, about 20% to about 100%, about 20% to about 150%, about 20% to about 200%, about 20% to about 250%, about 50% to about 100%, about 50% to about 150%, about 50% to about 200%, about 50% to about 250%, about 100% to about 150%, about 100% to about 200%, about 100% to about 250%, about 150% to about 200%, about 150% to about 250%, about 200% to about 250%, at least about 20%, at least about 50%, at least about 100%, at least about 150%, at least about 200%, at least about 250%, or at least about 300% compared unmodified gRNAs or sgRNAs. In some embodiments, the chemically modified gRNAs or sgRNAs of the present disclosure can reduce off-target effect in gene modification of the target sequence by at least 1.1-fold, 1.2-fold, 1.3-fold, 1.4-fold, 1.5-fold, 1.6-fold, 1.7-fold, 1.8-fold, 1.9-fold, 2-fold, 2.5-fold, 3-fold, 3.5-fold, 4-fold, 4.5-fold, 5-fold, 6-fold, 7-fold, 8-fold, 9-fold, 10-fold, or more than 10-fold compared to unmodified gRNAs or sgRNAs.

[0393] In some embodiments, the target polynucleotide sequence is in a genome, wherein the gRNA or sgRNA is capable of directing a component (e.g. Cas9) of a base editor fusion protein to effect a modification in the target polynucleotide sequence, and wherein the modification results in less off-target effect in the genome as compared to an unmodified gRNA or sgRNA. In some embodiments, the gRNA or sgRNA is capable of directing a Type II Cas protein to effect a modification in the target polynucleotide sequence wherein the modification results in at least 1%, 2%, 3%, 4%, 5%, 6%, 7%, 8%, 9%, 10%, 11%, 12%, 13%, 14%, 15%, 20%, 25%, 30%, 35%, 40%, 50%, 75%, 90%, 100%, 110%, 120%, 130%, 140%, 150%, 160%, 170%, 180%, 190%, 200%, 210%, 220%, 230%, 240%, 250%, 260%, 270%, 280%, 290%, 300%, 400% 500%, 600%, 700%, 800%, 900%, or 1000% less off-target effect in the genome as compared to an unmodified gRNA or sgRNA. In some embodiments, the gRNA or sgRNA is capable of directing a Type II Cas protein of a base editor fusion protein to effect a modification in the target polynucleotide sequence wherein the modification results in at least 1.1-fold, 1.2-fold, 1.3-fold, 1.4-fold, 1.5-fold, 1.6-fold, 1.7-fold, 1.8-fold, 1.9-fold, 2-fold, 2.5-fold, 3-fold, 3.5-fold, 4-fold, 4.5-fold, 5-fold, 6-fold, 7-fold, 8-fold, 9-fold, 10-fold, or more than 10-fold less off-target effect in the genome as compared to an unmodified gRNA or sgRNA. In some embodiments, the target polynucleotide sequence is in a genome, wherein the gRNA or sgRNA is capable of directing a Cas9 protein to effect a modification in the target polynucleotide sequence, and wherein the modification results in less off-target effect in the genome as compared to an unmodified gRNA or sgRNA. In some embodiments, the gRNA or sgRNA is capable of directing a Cas9 protein to effect a modification in the target polynucleotide sequence wherein the modification results in at least 1%, 2%, 3%, 4%, 5%, 6%, 7%, 8%, 9%, 10%, 11%, 12%, 13%, 14%, 15%, 20%, 25%, 30%, 35%, 40%, 50%, 75%, 90%, 100%, 110%, 120%, 130%, 140%, 150%, 160%, 170%, 180%, 190%, 200%, 210%, 220%, 230%, 240%, 250%, 260%, 270%, 280%, 290%, 300%, 400% 500%, 600%, 700%, 800%, 900%, or 1000% less off-target effect in the genome as compared to an unmodified gRNA or sgRNA. In some embodiments, the gRNA or sgRNA is capable of directing a Cas9. In some embodiments, the target polynucleotide sequence is in a genome, wherein the gRNA or sgRNA is capable of directing a base editor fusion protein to effect a modification in the target polynucleotide sequence, and wherein the modification results in less off-target effect in the genome as compared to an unmodified gRNA or sgRNA. In some embodiments, the gRNA or sgRNA is capable of directing a base editor fusion protein to effect a modification in the target polynucleotide sequence wherein the modification results in at least 1%, 2%, 3%, 4%, 5%, 6%, 7%, 8%, 9%, 10%, 11%, 12%, 13%, 14%, 15%, 20%, 25%, 30%, 35%, 40%, 50%, 75%, 90%, 100%, 110%, 120%, 130%, 140%, 150%, 160%, 170%, 180%, 190%, 200%, 210%, 220%, 230%, 240%, 250%, 260%, 270%, 280%, 290%, 300%, 400% 500%, 600%, 700%, 800%, 900%, or 1000% less off-target effect in the genome as compared to an unmodified gRNA or sgRNA. In some embodiments, the gRNA or sgRNA is capable of directing a base editor fusion protein to effect a modification in the target polynucleotide sequence wherein the modification results in at least 1.1-fold, 1.2-fold, 1.3-fold, 1.4-fold, 1.5-fold, 1.6-fold, 1.7-fold, 1.8-fold, 1.9-fold, 2-fold, 2.5-fold, 3-fold, 3.5-fold, 4-fold, 4.5-fold, 5-fold, 6-fold, 7-fold, 8-fold, 9-fold, 10-fold, or more than 10-fold less off-target effect in the genome as compared to an unmodified gRNA or sgRNA. In some embodiments, the modification using the chemically modified gRNAs or sgRNAs results in less off-target effect in a cell as compared to an unmodified gRNA or sgRNA. In some embodiments, the modification using the chemically modified gRNAs or sgRNAs results in at least 1%, 2%, 3%, 4%, 5%, 6%, 7%, 8%, 9%, 10%, 11%, 12%, 13%, 14%, 15%, 20%, 25%, 30%, 35%, 40%, 50%, 75%, 90%, 100%, 110%, 120%, 130%, 140%, 150%, 160%, 170%, 180%, 190%, 200%, 210%, 220%, 230%, 240%, 250%, 260%, 270%, 280%, 290%, 300%, 400% 500%, 600%, 700%, 800%, 900%, or 1000% less off-target effect in a cell as compared to an unmodified gRNA or sgRNA. In some embodiments, the modification using the chemically modified gRNAs or sgRNAs results in at least 1.1-fold, 1.2-fold, 1.3-fold, 1.4-fold, 1.5-fold, 1.6-fold, 1.7-fold, 1.8-fold, 1.9-fold, 2-fold, 2.5-fold, 3-fold, 3.5-fold, 4-fold, 4.5-fold, 5-fold, 6-fold, 7-fold, 8-fold, 9-fold, 10-fold, or more than 10-fold less off-target effect in a cell as compared to an unmodified gRNA or sgRNA.

[0394] The chemically modified gRNAs or sgRNAs of the present disclosure can enhance or increase the gene modification (e.g., gene or genome editing) efficiency. In some embodiments, the chemically modified gRNAs or sgRNAs of the present disclosure can enhance or increase the gene modification (e.g., gene or genome editing) efficiency by at least 1%, 2%, 3%, 4%, 5%, 6%, 7%, 8%, 9%, 10%, 11%, 12%, 13%, 14%, 15%, 20%, 25%, 30%, 35%, 40%, 50%, 75%, 90%, 100%, 110%, 120%, 130%, 140%, 150%, 160%, 170%, 180%, 190%, 200%, 210%, 220%, 230%, 240%, 250%, 260%, 270%, 280%, 290%, 300%, 400% 500%, 600%, 700%, 800%, 900%, or 1000% compared to unmodified gRNAs or sgRNAs. In some embodiments, the chemically modified gRNAs or sgRNAs of the present disclosure can enhance or increase the gene modification (e.g., gene or genome editing) efficiency by about 20% to about 300%, about 50% to about 300%, about 100% to about 300%, about 150% to about 300%, about 20% to about 50%, about 20% to about 100%, about 20% to about 150%, about 20% to about 200%, about 20% to about 250%, about 50% to about 100%, about 50% to about 150%, about 50% to about 200%, about 50% to about 250%, about 100% to about 150%, about 100% to about 200%, about 100% to about 250%, about 150% to about 200%, about 150% to about 250%, about 200% to about 250%, at least about 20%, at least about 50%, at least about 100%, at least about 150%, at least about 200%, at least about 250%, or at least about 300% compared to unmodified gRNAs or sgRNAs. In some embodiments, the chemically modified gRNAs or sgRNAs of the present disclosure can enhance or increase the gene modification (e.g., gene or genome editing) efficiency by about 20% to about 300%, about 50% to about 300%, about 100% to about 300%, about 150% to about 300%, about 20% to about 50%, about 20% to about 100%, about 20% to about 150%, about 20% to about 200%, about 20% to about 250%, about 50% to about 100%, about 50% to about 150%, about 50% to about 200%, about 50% to about 250%, about 100% to about 150%, about 100% to about 200%, about 100% to about 250%, about 150% to about 200%, about 150% to about 250%, about 200% to about 250%, at least about 20%, at least about 50%, at least about 100%, at least about 150%, at least about 200%, at least about 250%, or at least about 300% compared unmodified gRNAs or sgRNAs. In some embodiments, the chemically modified gRNAs or sgRNAs of the present disclosure can enhance or increase the gene modification (e.g., gene or genome editing) efficiency by at least 1.1-fold, 1.2-fold, 1.3-fold, 1.4-fold, 1.5-fold, 1.6-fold, 1.7-fold, 1.8-fold, 1.9-fold, 2-fold, 2.5-fold, 3-fold, 3.5-fold, 4-fold, 4.5-fold, 5-fold, 6-fold, 7-fold, 8-fold, 9-fold, 10-fold, or more than 10-fold compared to unmodified gRNAs or sgRNAs.

[0395] The chemically modified gRNAs or sgRNAs of the present disclosure can enhance or increase the stability of the complex of a base editor protein or component (e.g., Cas9 protein) and the guide RNAs (e.g., gRNAs or sgRNAs), for example, the stability of base editor complex. In some embodiments, the chemically modified gRNAs or sgRNAs of the present disclosure can enhance or increase the stability of the Cas protein-gRNA complex by at least 1%, 2%, 3%, 4%, 5%, 6%, 7%, 8%, 9%, 10%, 11%, 12%, 13%, 14%, 15%, 20%, 25%, 30%, 35%, 40%, 50%, 75%, 90%, 100%, 110%, 120%, 130%, 140%, 150%, 160%, 170%, 180%, 190%, 200%, 210%, 220%, 230%, 240%, 250%, 260%, 270%, 280%, 290%, 300%, 400% 500%, 600%, 700%, 800%, 900%, or 1000% compared to unmodified gRNAs or sgRNAs. In some embodiments, the chemically modified gRNAs or sgRNAs of the present disclosure can enhance or increase the stability of the base editor fusion or Cas protein-gRNA complex by about 20% to about 300%, about 50% to about 300%, about 100% to about 300%, about 150% to about 300%, about 20% to about 50%, about 20% to about 100%, about 20% to about 150%, about 20% to about 200%, about 20% to about 250%, about 50% to about 100%, about 50% to about 150%, about 50% to about 200%, about 50% to about 250%, about 100% to about 150%, about 100% to about 200%, about 100% to about 250%, about 150% to about 200%, about 150% to about 250%, about 200% to about 250%, at least about 20%, at least about 50%, at least about 100%, at least about 150%, at least about 200%, at least about 250%, or at least about 300% compared to unmodified gRNAs or sgRNAs. In some embodiments, the chemically modified gRNAs or sgRNAs of the present disclosure can enhance or increase the stability of the base editor fusion or Cas protein-gRNA complex by about 20% to about 300%, about 50% to about 300%, about 100% to about 300%, about 150% to about 300%, about 20% to about 50%, about 20% to about 100%, about 20% to about 150%, about 20% to about 200%, about 20% to about 250%, about 50% to about 100%, about 50% to about 150%, about 50% to about 200%, about 50% to about 250%, about 100% to about 150%, about 100% to about 200%, about 100% to about 250%, about 150% to about 200%, about 150% to about 250%, about 200% to about 250%, at least about 20%, at least about 50%, at least about 100%, at least about 150%, at least about 200%, at least about 250%, or at least about 300% compared unmodified gRNAs or sgRNAs. In some embodiments, the chemically modified gRNAs or sgRNAs of the present disclosure can enhance or increase the stability of the base editor fusion or Cas protein-gRNA complex by at least 1.1-fold, 1.2-fold, 1.3-fold, 1.4-fold, 1.5-fold, 1.6-fold, 1.7-fold, 1.8-fold, 1.9-fold, 2-fold, 2.5-fold, 3-fold, 3.5-fold, 4-fold, 4.5-fold, 5-fold, 6-fold, 7-fold, 8-fold, 9-fold, 10-fold, or more than 10-fold compared to unmodified gRNAs or sgRNAs.

[0396] In some embodiments, the chemically modified gRNAs or sgRNAs of the present disclosure can enhance or increase the stability of the base editor complex by at least 1%, 2%, 3%, 4%, 5%, 6%, 7%, 8%, 9%, 10%, 11%, 12%, 13%, 14%, 15%, 20%, 25%, 30%, 35%, 40%, 50%, 75%, 90%, 100%, 110%, 120%, 130%, 140%, 150%, 160%, 170%, 180%, 190%, 200%, 210%, 220%, 230%, 240%, 250%, 260%, 270%, 280%, 290%, 300%, 400% 500%, 600%, 700%, 800%, 900%, or 1000% compared to unmodified sgRNAs. In some embodiments, the chemically modified gRNAs or sgRNAs of the present disclosure can enhance or increase the stability of the base editor complex by about 20% to about 300%, about 50% to about 300%, about 100% to about 300%, about 150% to about 300%, about 20% to about 50%, about 20% to about 100%, about 20% to about 150%, about 20% to about 200%, about 20% to about 250%, about 50% to about 100%, about 50% to about 150%, about 50% to about 200%, about 50% to about 250%, about 100% to about 150%, about 100% to about 200%, about 100% to about 250%, about 150% to about 200%, about 150% to about 250%, about 200% to about 250%, at least about 20%, at least about 50%, at least about 100%, at least about 150%, at least about 200%, at least about 250%, or at least about 300% compared to unmodified sgRNAs. In some embodiments, the chemically modified gRNAs or sgRNAs of the present disclosure can enhance or increase the stability of the base editor complex by about 20% to about 300%, about 50% to about 300%, about 100% to about 300%, about 150% to about 300%, about 20% to about 50%, about 20% to about 100%, about 20% to about 150%, about 20% to about 200%, about 20% to about 250%, about 50% to about 100%, about 50% to about 150%, about 50% to about 200%, about 50% to about 250%, about 100% to about 150%, about 100% to about 200%, about 100% to about 250%, about 150% to about 200%, about 150% to about 250%, about 200% to about 250%, at least about 20%, at least about 50%, at least about 100%, at least about 150%, at least about 200%, at least about 250%, or at least about 300% compared unmodified sgRNAs. In some embodiments, the chemically modified gRNAs or sgRNAs of the present disclosure can enhance or increase the stability of the base editor-sgRNA or Cas9-sgRNA complex by at least 1.1-fold, 1.2-fold, 1.3-fold, 1.4-fold, 1.5-fold, 1.6-fold, 1.7-fold, 1.8-fold, 1.9-fold, 2-fold, 2.5-fold, 3-fold, 3.5-fold, 4-fold, 4.5-fold, 5-fold, 6-fold, 7-fold, 8-fold, 9-fold, 10-fold, or more than 10-fold compared to unmodified sgRNAs.

[0397] The chemically modified gRNAs or sgRNAs of the present disclosure can enhance or increase the stability of the guide RNAs (e.g., gRNAs or sgRNAs) in vitro, in vivo, and/or ex vivo. In some embodiments, the chemically modified gRNAs or sgRNAs of the present disclosure can enhance or increase the stability of the gRNAs or sgRNAs in vitro, in vivo, and/or ex vivo by at least 1%, 2%, 3%, 4%, 5%, 6%, 7%, 8%, 9%, 10%, 11%, 12%, 13%, 14%, 15%, 20%, 25%, 30%, 35%, 40%, 50%, 75%, 90%, 100%, 110%, 120%, 130%, 140%, 150%, 160%, 170%, 180%, 190%, 200%, 210%, 220%, 230%, 240%, 250%, 260%, 270%, 280%, 290%, 300%, 400% 500%, 600%, 700%, 800%, 900%, or 1000% compared to unmodified gRNAs or sgRNAs. In some embodiments, the chemically modified gRNAs or sgRNAs of the present disclosure can enhance or increase the stability of the gRNAs or sgRNAs in vitro, in vivo, and/or ex vivo by about 20% to about 300%, about 50% to about 300%, about 100% to about 300%, about 150% to about 300%, about 20% to about 50%, about 20% to about 100%, about 20% to about 150%, about 20% to about 200%, about 20% to about 250%, about 50% to about 100%, about 50% to about 150%, about 50% to about 200%, about 50% to about 250%, about 100% to about 150%, about 100% to about 200%, about 100% to about 250%, about 150% to about 200%, about 150% to about 250%, about 200% to about 250%, at least about 20%, at least about 50%, at least about 100%, at least about 150%, at least about 200%, at least about 250%, or at least about 300% compared to unmodified gRNAs or sgRNAs. In some embodiments, the chemically modified gRNAs or sgRNAs of the present disclosure can enhance or increase the stability of the gRNAs or sgRNAs in vitro, in vivo, and/or ex vivo by about 20% to about 300%, about 50% to about 300%, about 100% to about 300%, about 150% to about 300%, about 20% to about 50%, about 20% to about 100%, about 20% to about 150%, about 20% to about 200%, about 20% to about 250%, about 50% to about 100%, about 50% to about 150%, about 50% to about 200%, about 50% to about 250%, about 100% to about 150%, about 100% to about 200%, about 100% to about 250%, about 150% to about 200%, about 150% to about 250%, about 200% to about 250%, at least about 20%, at least about 50%, at least about 100%, at least about 150%, at least about 200%, at least about 250%, or at least about 300% compared unmodified gRNAs or sgRNAs. In some embodiments, the chemically modified gRNAs or sgRNAs of the present disclosure can enhance or increase the stability of the gRNAs or sgRNAs in vitro, in vivo, and/or ex vivo by at least 1.1-fold, 1.2-fold, 1.3-fold, 1.4-fold, 1.5-fold, 1.6-fold, 1.7-fold, 1.8-fold, 1.9-fold, 2-fold, 2.5-fold, 3-fold, 3.5-fold, 4-fold, 4.5-fold, 5-fold, 6-fold, 7-fold, 8-fold, 9-fold, 10-fold, or more than 10-fold compared to unmodified gRNAs or sgRNAs.

[0398] In some embodiments, the chemically modified gRNAs or sgRNAs exhibit increased stability in a cell as compared to unmodified gRNAs or sgRNAs. In some embodiments, the chemically modified gRNAs or sgRNAs exhibit at least 1%, 2%, 3%, 4%, 5%, 6%, 7%, 8%, 9%, 10%, 11%, 12%, 13%, 14%, 15%, 20%, 25%, 30%, 35%, 40%, 50%, 75%, 90%, 100%, 110%, 120%, 130%, 140%, 150%, 160%, 170%, 180%, 190%, 200%, 210%, 220%, 230%, 240%, 250%, 260%, 270%, 280%, 290%, 300%, 400% 500%, 600%, 700%, 800%, 900%, or 1000% higher or increased stability in a cell as compared to unmodified gRNAs or sgRNAs. In some embodiments, the chemically modified gRNAs or sgRNAs exhibit be at least 1.1-fold, 1.2-fold, 1.3-fold, 1.4-fold, 1.5-fold, 1.6-fold, 1.7-fold, 1.8-fold, 1.9-fold, 2-fold, 2.5-fold, 3-fold, 3.5-fold, 4-fold, 4.5-fold, 5-fold, 6-fold, 7-fold, 8-fold, 9-fold, 10-fold, or more than 10-fold higher or increased stability in a cell as compared to unmodified gRNAs or sgRNAs.

[0399] In some embodiments, the stability of the chemically modified gRNAs or sgRNAs is measured by half-life of the gRNAs or sgRNAs in the cell. In some embodiments, the chemically modified gRNAs or sgRNAs exhibit increased half-life in the cell compared to unmodified gRNAs or sgRNAs. In some embodiments, the gRNAs or sgRNAs exhibit increased half-life in the cell by at least 1%, 2%, 3%, 4%, 5%, 6%, 7%, 8%, 9%, 10%, 11%, 12%, 13%, 14%, 15%, 20%, 25%, 30%, 35%, 40%, 50%, 75%, 90%, 100%, 110%, 120%, 130%, 140%, 150%, 160%, 170%, 180%, 190%, 200%, 210%, 220%, 230%, 240%, 250%, 260%, 270%, 280%, 290%, 300%, 400% 500%, 600%, 700%, 800%, 900%, or 1000% as compared to unmodified gRNAs or sgRNAs. In some embodiments, the gRNAs or sgRNAs exhibit increased half-life in the cell by about 20% to about 300%, about 50% to about 300%, about 100% to about 300%, about 150% to about 300%, about 20% to about 50%, about 20% to about 100%, about 20% to about 150%, about 20% to about 200%, about 20% to about 250%, about 50% to about 100%, about 50% to about 150%, about 50% to about 200%, about 50% to about 250%, about 100% to about 150%, about 100% to about 200%, about 100% to about 250%, about 150% to about 200%, about 150% to about 250%, about 200% to about 250%, at least about 20%, at least about 50%, at least about 100%, at least about 150%, at least about 200%, at least about 250%, or at least about 300% as compared to unmodified gRNAs or sgRNAs. In some embodiments, the gRNAs or sgRNAs exhibit increased half-life in the cell by at least 1.1-fold, 1.2-fold, 1.3-fold, 1.4-fold, 1.5-fold, 1.6-fold, 1.7-fold, 1.8-fold, 1.9-fold, 2-fold, 2.5-fold, 3-fold, 3.5-fold, 4-fold, 4.5-fold, 5-fold, 6-fold, 7-fold, 8-fold, 9-fold, 10-fold, or more than 10-fold as compared to unmodified gRNAs or sgRNAs.

[0400] The chemically modified gRNAs or sgRNAs of the present disclosure can be more resistant to degradation as compared to an unmodified gRNA or sgRNA. In some embodiments, the chemically modified gRNAs or sgRNAs of the present disclosure can be at least 1%, 2%, 3%, 4%, 5%, 6%, 7%, 8%, 9%, 10%, 11%, 12%, 13%, 14%, 15%, 20%, 25%, 30%, 35%, 40%, 50%, 75%, 90%, 100%, 110%, 120%, 130%, 140%, 150%, 160%, 170%, 180%, 190%, 200%, 210%, 220%, 230%, 240%, 250%, 260%, 270%, 280%, 290%, 300%, 400% 500%, 600%, 700%, 800%, 900%, or 1000% more resistant to degradation compared to unmodified gRNAs or sgRNAs. In some embodiments, the chemically modified gRNAs or sgRNAs of the present disclosure can be about 20% to about 300%, about 50% to about 300%, about 100% to about 300%, about 150% to about 300%, about 20% to about 50%, about 20% to about 100%, about 20% to about 150%, about 20% to about 200%, about 20% to about 250%, about 50% to about 100%, about 50% to about 150%, about 50% to about 200%, about 50% to about 250%, about 100% to about 150%, about 100% to about 200%, about 100% to about 250%, about 150% to about 200%, about 150% to about 250%, about 200% to about 250%, at least about 20%, at least about 50%, at least about 100%, at least about 150%, at least about 200%, at least about 250%, or at least about 300% more resistant to degradation compared to unmodified gRNAs or sgRNAs. In some embodiments, the chemically modified gRNAs or sgRNAs of the present disclosure can be about 20% to about 300%, about 50% to about 300%, about 100% to about 300%, about 150% to about 300%, about 20% to about 50%, about 20% to about 100%, about 20% to about 150%, about 20% to about 200%, about 20% to about 250%, about 50% to about 100%, about 50% to about 150%, about 50% to about 200%, about 50% to about 250%, about 100% to about 150%, about 100% to about 200%, about 100% to about 250%, about 150% to about 200%, about 150% to about 250%, about 200% to about 250%, at least about 20%, at least about 50%, at least about 100%, at least about 150%, at least about 200%, at least about 250%, or at least about 300% more resistant to degradation compared unmodified gRNAs or sgRNAs. In some embodiments, the chemically modified gRNAs or sgRNAs of the present disclosure can be at least 1.1-fold, 1.2-fold, 1.3-fold, 1.4-fold, 1.5-fold, 1.6-fold, 1.7-fold, 1.8-fold, 1.9-fold, 2-fold, 2.5-fold, 3-fold, 3.5-fold, 4-fold, 4.5-fold, 5-fold, 6-fold, 7-fold, 8-fold, 9-fold, 10-fold, or more than 10-fold more resistant to degradation compared to unmodified gRNAs or sgRNAs.

### Target Gene Modification

[0401] In some aspects, provided herein, is a method for treating or preventing a condition in a subject in need thereof, the method comprising administering to the subject the composition or lipid nanoparticle comprising chemically modified gRNAs or sgRNAs described herein, wherein the gRNAs or sgRNAs direct a base editor protein to effect a modification in a target polynucleotide sequence in a cell of the subject, thereby treating or preventing the condition. In some embodiments, the target polynucleotide is in a PCSK9 gene. In some embodiments, the target polynucleotide is in an ANGPTL3 gene. In some embodiments, the modification is at a splice site of the target polynucleotide. In some embodiments, the modification is at a splice donor site of the target polynucleotide. In some embodiments, the modification is at a splice acceptor site of the target polynucleotide. In some embodiments, the modification reduces expression of functional PCSK9 protein encoded by the PCSK9 gene in the subject. In some embodiments, the modification reduces expression of functional ANGPTL3 protein encoded by the ANGPTL3 gene in the subject. In some embodiments, the condition is atherosclerotic vascular disease. In some embodiments, the condition is an atherosclerotic vascular disease, hypertriglyceridemia, or diabetes. In some embodiments, the subject exhibits a reduced blood LDL cholesterol level and/or a reduced blood triglycerides level as compared to before the administration.

[0402] In some embodiments, the disclosure provides base-editing systems, compositions and methods for editing a polynucleotide encoding an Apolipoprotein C3 (APOC3) protein and variants thereof. In some embodiments, provided herein are genome/base-editing systems, compositions and methods for editing a polynucleotide encoding Proprotein convertase subtilisin/kexin type 9 (PCSK9) and variants thereof. In some embodiments, provided herein are genome/base-editing systems, compositions and methods for editing a polynucleotide encoding Angiopoietin-like 3 (ANGPTL3) and variants thereof. To edit a target gene, a target gene polynucleotide may contact the compositions disclosed herein comprising a sgRNA and a adenosine base editor protein, wherein the sgRNA comprises a spacer sequence and a tracrRNA sequence, wherein the spacer sequence hybridizes with a target polynucleotide sequence in a PCSK9 or ANGPTL3 gene and the tracrRNA sequence binds the adenosine base editor protein (e.g. a Cas9 component of the adenosine base editor). In some embodiments, the sgRNA therefore directs the base editor protein to the target polynucleotide sequence to result in a to G modification in the target gene. In some embodiments, the target gene or target polynucleotide is selected from a gene encoding PCSK9, APOC3, LPA, and ANGPTL3. In some embodiments, the target polynucleotide sequence is in a PCSK9 gene. In some embodiments, the target polynucleotide sequence is in an ANGPTL3 gene. In some embodiments, the modification reduces or abolishes expression of functional PCSK9 protein encoded by the PCSK9 gene in the cell. In some embodiments, the modification reduces or abolishes expression of functional ANGPTL3 protein encoded by the ANGPTL3 gene in the cell. In some embodiments, the introduction is performed via a lipid nanoparticle that comprises the composition.

[0403] For example, the sgRNA and the Adenosine base editor protein may be expressed in a cell where a target gene editing is desired (e.g., a liver cell), to thereby allowing contact of the target gene with the composition disclosed herein (e.g., sgRNA and the Adenosine base editor protein). In some embodiments, the binding of the Adenosine base editor protein to its target polynucleotide sequence in the target gene is directed by a single guide RNA disclosed herein, e.g., a single guide RNA comprising (i) a spacer sequence and (ii) a tracrRNA sequence, wherein the spacer sequence hybridizes with a target polynucleotide sequence in a target gene. Thus, by designing the guide RNA sequence, the Adenosine base editor protein can be directed to edit any target polynucleotide sequence in the target gene (e.g., target gene encoding PCSK9, APOC3 and ANGPTL3). In some embodiments, the guide RNA sequence is co-expressed with the Adenosine base editor protein in a cell where editing is desired.

[0404] In some embodiments, a target gene comprising more than one mutations described herein are contemplated. For example, a target gene encoding a variant protein can be produced using the methods described herein that includes 1, 2, 3, 4, 5, 6, 7, 8, 9, 10, or more mutations. To make multiple mutations in the target gene, a plurality of guide RNA sequences can be used, each guide RNA sequence targeting one target polynucleotide sequence in the target gene. The Adenosine base editor protein is capable of editing each and every target polynucleotide sequence dictated by the guide RNA sequence. For example, 1, 2, 3, 4, 5, 6, 7, 8, 9, 10, or more guide RNA sequences can be used in a gene editing reaction. In some embodiments, the guide RNA sequences as used (e.g., gRNA). In some embodiments, DNA molecule encoding the guide RNA sequences can also be used.

[0405] In some embodiments, simultaneous modifications into more than one target genes (e.g., more than one target gene in the LDL-mediated cholesterol clearance pathway) are also contemplated herein. For example, in some embodiments, a modification may be simultaneously introduced into PCSK9 and APOC3 gene. In some embodiments, a modification may be simultaneously introduced into PCSK9 and LDL-R gene. In some embodiments, a modification may be simultaneously introduced into PCSK9 and IODL gene. In some embodiments, a modification may be simultaneously introduced into PCSK9 and LPA gene. In some embodiments, a modification may be simultaneously introduced into APOC3 and IODL gene. In some embodiments, a modification may be simultaneously introduced into LDL-R and APOC3 gene. In some embodiments, a modification may be simultaneously introduced into LDL-R and IDOL gene. In some embodiments, a modification may be simultaneously introduced into PCSK9, APOC3, LDL-R and IDOL gene. In some embodiments, a modification can be simultaneously introduced into PCSK9 and ANGPTL3 gene. To simultaneously introduce of modifications into more than one target genes, multiple guide nucleotide sequences are used.

[0406] To edit a gene encoding the PCSK9 or ANGPTL3 protein, the gene is contacted with the composition described herein. In some embodiments, a target polynucleotide sequence in a target gene is contacted with the single guide RNA disclosed herein and a Adenosine base editor protein or a nucleic acid sequence encoding the Adenosine base editor protein, wherein the single guide RNA directs the Adenosine base editor protein to effect a modification in the target gene (e.g., target gene encoding PCSK9, APOC3 and ANGPTL3). In some embodiments, the target polynucleotide sequence is the gene locus in the genomic DNA of a cell. In some embodiments, the cell is a cultured cell. In some embodiments, the cell is in vivo. In some embodiments, the cell is in vitro. In some embodiments, the cell is ex vivo.

[0407] In some embodiments, the cell is from a mammal. In some embodiments, the mammal is a human. In some embodiments, the mammal is a rodent. In some embodiments, the rodent is a mouse. In some embodiments, the rodent is a rat. As would be understood be those skilled in the art, a target polynucleotide sequence may be a DNA molecule comprising a coding strand and a complementary strand, e.g., the PCSK9 or ANGPTL3 gene locus in a genome. As such, the target polynucleotide sequence may also include coding regions (e.g., exons) and non-coding regions (e.g., introns or splicing sites). In some embodiments, the target polynucleotide sequence is located in the coding region (e.g., an exon) of the target gene (e.g., the PCSK9 or ANGPTL3 gene locus). As such, the modification in the coding region may result in an amino acid change in the protein encoded by the target gene, i.e., a mutation. In some embodiments, the mutation is a loss of function mutation. In some embodiments, the loss-of-function mutation is a naturally occurring loss-of-function mutation. In some embodiments, the target polynucleotide sequence is located in a non-coding region of the target gene, e.g., in an intron or a splicing site. In some embodiments, the base editor system provided herein results in a A•T to G•C alteration at a splice site in a PCSK9 gene or a ANGPTL3 gene. In some embodiments, the A•T to G•C alteration is at a splice acceptor site of the PCSK9 gene. In some embodiments, the A•T to G•C alteration results in an aberrant PCSK9 transcript encoded by the PCSK9 gene. In some embodiments, the A•T to G•C alteration results in a non-functional PCSK9 polypeptide encoded by the PCSK9 gene when expressed in a cell. In some embodiments, the A•T to G•C alteration is at a 5′ end of a splice donor site of an intron 1 of the PCSK9 gene. In some embodiments, the A•T to G•C alteration is at a 5′ end of a splice donor site of an intron 4 of the PCSK9 gene. In some embodiments, the base editor system provided herein results in a A•T to G•C alteration at a splice site ANGPTL3 gene, or the second A•T to G•C alteration is at a splice donor site of the ANGPTL3 gene. In some embodiments, the A•T to G•C alteration or the second A•T to G•C alteration is at a splice acceptor site of the ANTPTL3 gene. In some embodiments, the A•T to G•C alteration or the second A•T to G•C alteration results in an aberrant ANGPTL3 transcript encoded by the ANGPTL3 gene. In some embodiments, the A•T to G•C alteration or the second A•T to G•C alteration results in a non-functional ANGPTL3 polypeptide encoded by the ANGPTL3 gene. In some embodiments, the A•T to G•C alteration or the second A•T to G•C alteration is at a 5′ end of a splice donor site of an intron 6 of the ANGPLT3 gene.

[0408] In some embodiments, a target polynucleotide sequence is located in a splicing site and the editing of such sequence causes alternative splicing of the mRNA of a target gene. In some embodiments, the alternative splicing leads to leading to loss-of-function mutants. In some embodiments, the alternative splicing leads to the introduction of a premature stop codon in a mRNA encoded by the target gene, resulting in truncated and unstable proteins. In some embodiments, mutants that are defective in folding are produced. A loss-of-function variant generated by a gene that is modified using the compositions and methods disclosed herein, may have reduced activity compared to a wild type protein encoded by an unmodified target gene. Activity refers to any known biological activity of the wild-type protein in the art.

[0409] In some embodiments, the activity of a loss-of-function variant may be reduced by at least 20%, at least 30%, at least 40%, at least 50%, at least 60%, at least 70%, at least 80%, at least 90%, at least 99%, or more. In some embodiments, the loss-of-function variant has no more than 50%, no more than 40%, no more than 30%, no more than 20%, no more than 10%, no more than 5%, no more than 1% or less activity compared to a wild type protein.

[0410] In some embodiments, cellular activity of a protein encoded by a target gene may be reduced by reducing the level of properly folded and active protein. Introducing destabilizing mutations into the wild type protein may cause misfolding or deactivation of the protein. A variant generated by modifying a target gene using the compositions and methods disclosed herein comprises one or more destabilizing mutations may have reduced activity compared to the wild type protein encoded by an unmodified target gene. For example, the activity of a variant comprising one or more destabilizing mutations may be reduced by at least about 20%, at least about 30%, at least about 40%, at least about 50%, at least about 60%, at least about 70%, at least about 80%, at least about 90%, at least about 95%, at least about 99%, or more.

[0411] In some embodiments, the methods and composition disclosed herein reduces or abolishes expression and/or function of protein encoded by a target gene. For example, the methods and composition disclosed herein reduces expression and/or function of protein encoded by the target gene by at least 3-fold, at least 4-fold, at least 5-fold, at least 6-fold, at least 7-fold, at least 8-fold, at least 9-fold, or at least 10-fold relative to a control.

[0412] In some embodiments, the methods and composition disclosed herein reduces or abolishes expression and/or function of the protein encoded by a target gene by at least 2-fold relative to a control. For example, the methods and composition disclosed herein reduces or abolishes expression and/or function of the protein encoded by a target gene by at least 3-fold, at least 4-fold, at least 5-fold, at least 6-fold, at least 7-fold, at least 8-fold, at least 9-fold, or at least 10-fold relative to a control.

[0413] Some aspects of the present disclosure provide strategies of editing target gene to reduce the amount of full-length, functional protein being produced. In some embodiments, stop codons may be introduced into the coding sequence of target gene upstream of the normal stop codon (referred to as a “premature stop codon”). Premature stop codons cause premature translation termination, in turn resulting in truncated and nonfunctional proteins and induces rapid degradation of the mRNA via the non-sense mediated mRNA decay pathway. See, e.g., Baker et al., Current Opinion in Cell Biology 16 (3): 293-299, 2004; Chang et al, Annual Review of Biochemistry 76: 51-74, 2007; and Behm-Ansmant et ah, Genes & Development 20 (4): 391-398, 2006, each of which is incorporated herein by reference.

### Proprotein Convertase Subtilisin-Kexin Type 9 (PCSK9)

[0414] In some embodiments, the target gene for modification using the compositions and methods disclosed herein is gene encoding PCSK9. Proprotein convertase subtilisin-kexin type 9 (PCSK9), also known as neural apoptosis-regulated convertase 1 (NARC-I), is a proteinase K-like subtilase identified as the 9th member of the secretory subtilase family. “Proprotein convertase subtilisin/kexin type 9 (PCSK9)” refers to an enzyme encoded by the PCSK9 gene. PCSK9 binds to the receptor for low-density lipoprotein (LDL) particles. In the liver, the LDL receptor removes LDL particles from the blood through the endocytosis pathway. When PCSK9 binds to the LDL receptor, the receptor is channeled towards the lysosomal pathway and broken down by proteolytic enzymes, limiting the number of times that a given LDL receptor is able to uptake LDL particles from the blood. Thus, blocking PCSK9 activity may lead to more LDL receptors being recycled and present on the surface of the liver cells, and will remove more LDL cholesterol from the blood.

[0415] Therefore, blocking PCSK9 can lower blood cholesterol levels. PCSK9 orthologs are found across many species. PCSK9 is inactive when first synthesized, a pre-pro enzyme, because a section of the peptide chain blocks its activity; proprotein convertases remove that section to activate the enzyme. Pro-PCSK9 is a secreted, globular, serine protease capable of proteolytic auto-processing of its N-terminal pro-domain into a potent endogenous inhibitor of PCSK9, which blocks its catalytic site. PCSK9's role in cholesterol homeostasis has been exploited medically. Drugs that block PCSK9 can lower the blood level of low-density lipoprotein cholesterol (LDL-C). The first two PCSK9 inhibitors, alirocumab and evolocumab, were approved by the U.S. Food and Drug Administration in 2015 for lowering cholesterol where statins and other drugs were insufficient.

[0416] The human gene for PCSK9 localizes to human chromosome Ip33-p34.3. PCSK9 is expressed in cells capable of proliferation and differentiation including, for example, hepatocytes, kidney mesenchymal cells, intestinal ileum, and colon epithelia as well as embryonic brain telencephalon neurons. See, e.g., Seidah et al., 2003 PNAS 100:928-933, which is incorporated herein by reference.

[0417] Original synthesis of PCSK9 is in the form of an inactive enzyme precursor, or zymogen, of 72-kDa, which undergoes autocatalytic, intramolecular processing in the endoplasmic reticulum (ER) to activate its functionality. This internal processing event has been reported to occur at the SSVFAQ jSIP motif (SEQ ID NO: 3159), and has been reported as a requirement of exit from the ER. “j” indicates cleavage site. See, Benjannet et al., 2004 J. Biol. Chem. 279:48865-48875, and Seidah et al, 2003 PNAS 100:928-933, each of which are incorporated herein by reference. The cleaved protein is then secreted. The cleaved peptide remains associated with the activated and secreted enzyme.

[0418] The gene sequence for human PCSK9 is ˜22-kb long with 12 exons encoding a 692 amino acid protein. The protein sequence of human PCSK9 can be found, for example, at Deposit No. NP_777596.2, which sequence is incorporated herein in its entirety. Human, mouse and rat PCSK9 nucleic acid sequences have been deposited; see, e.g., GenBank Accession Nos.: AX127530 (also AX207686), AX207688, and AX207690, respectively, each of which sequence is incorporated herein in its entirety. The gene sequence of Macaca fascicularis can be found publically, for example, NCBI Gene ID: 102142788, which sequence is incorporated herein in their entirety. Macaca fascicularis proprotein convertase subtilisin/kexin type 9 isoform X2 sequence can be found publically, for example, at NCBI Reference Sequence: XP_005543317.1, which sequence is incorporated herein in its entirety.

[0419] The translated protein contains a signal peptide in the NH2-terminus, and in cells and tissues an about 74 kDa zymogen (precursor) form of the full-length protein is found in the endoplasmic reticulum. During initial processing in the cell, the about 14 kDa prodomain peptide is autocatalytically cleaved to yield a mature about 60 kDa protein containing the catalytic domain and a C-terminal domain often referred to as the cysteine-histidine rich domain (CHRD). This about 60 kDa form of PCSK9 is secreted from liver cells. The secreted form of PCSK9 appears to be the physiologically active species, although an intracellular functional role of the about 60 kDa form has not been ruled out.

[0420] Numerous PCSK9 variants are disclosed and/or claimed in several patent publications including, but not limited to the following: PCT Publication Nos. WO2001031007, WO2001057081, WO2002014358, WO2001098468, WO2002102993, WO2002102994, WO2002046383, WO2002090526, WO2001077137, and WO2001034768; US Publication Nos. US 2004/0009553 and US 2003/0119038, and European Publication Nos. EP 1 440 981, EP 1 067 182, and EP 1 471 152, each of which are incorporated herein by reference.

[0421] Several mutant forms of PCSK9 are well characterized, including S 127R, N157K, F216L, R218S, and D374Y, with S 127R, F216L, and D374Y being linked to autosomal dominant hypercholesterolemia (ADH). Benjannet et al. (J. Biol. Chem., 279(47):48865-48875 (2004)) demonstrated that the S 127R and D374Y mutations result in a significant decrease in the level of pro-PCSK9 processed in the ER to form the active secreted zymogen. As a consequence, it is believed that wild-type PCSK9 increases the turnover rate of the LDL receptor causing inhibition of LDL clearance (Maxwell et al, PNAS, 102(6):2069-2074 (2005); Benjannet et al, and Lalanne et al), while PCSK9 autosomal dominant mutations result in increased levels of LDLR, increased clearance of circulating LDL, and a corresponding decrease in plasma cholesterol levels. See, Rashid et al, PNAS, 102(15):5374-5379 (2005); Abifadel et al, 2003 Nature Genetics 34: 154-156; Timms et al, 2004 Hum. Genet. 114:349-353; and Leren, 2004 Clin. Genet. 65:419-422, each of which are incorporated herein by reference.

[0422] A later-published study on the S127R mutation of Abifadel et al, reported that patients carrying such a mutation exhibited higher total cholesterol and apoB 100 in the plasma attributed to (1) an overproduction of apoB 100-containing lipoproteins, such as low density lipoprotein (LDL), very low density lipoprotein (VLDL) and intermediate density lipoprotein (IDL), and (2) an associated reduction in clearance or conversion of said lipoproteins. Together, the studies referenced above evidence the fact that PCSK9 plays a role in the regulation of LDL production. Expression or upregulation of PCSK9 is associated with increased plasma levels of LDL cholesterol, and inhibition or the lack of expression of PCSK9 is associated with low LDL cholesterol plasma levels. Significantly, lower levels of LDL cholesterol associated with sequence variations in PCSK9 have conferred protection against coronary heart disease; Cohen et al, 2006 N. Engl. J. Med. 354: 1264-1272.

[0423] Lalanne et al. demonstrated that LDL catabolism was impaired and apolipoprotein B-containing lipoprotein synthesis was enhanced in two patients harboring S 127R mutations in PCSK9 (J. Lipid Research, 46: 1312-1319 (2005)). Sun et al. also provided evidence that mutant forms of PCSK9 are also the cause of unusually severe dominant hypercholesterolaemia as a consequence of its effect of increasing apolipoprotein B secretion (Sun et al, Hum. Mol. Genet, 14(9): 1161-1169 (2005)). These results were consistent with earlier results which demonstrated adenovirus-mediated overexpression of PCSK9 in mice results in severe hypercholesteremia due to drastic decreases in the amount of LDL receptor Dubuc et al., Thromb. Vase. Biol., 24: 1454-1459 (2004), in addition to results demonstrating mutant forms of PCSK9 also reduce the level of LDL receptor (Park et al., J. Biol. Chem., 279:50630-50638 (2004). The overexpression of PCSK9 in cell lines, including liver-derived cells, and in livers of mice in vivo, results in a pronounced reduction in LDLR protein levels and LDLR functional activity without changes in LDLR mRNA level (Maxwell et al., Proc. Nat. Amer. Set, 101:7100-7105 (2004); Benjannet S. et al, J. Bio. Chem. 279: 48865-48875 (2004)).

[0424] Various therapeutic approaches to the inhibition of PSCK9 have been proposed, including: inhibition of PSCK9 synthesis by gene silencing agents, e.g., RNAi; inhibition of PCSK9 binding to LDLR by monoclonal antibodies, small peptides or adnectins; and inhibition of PCSK9 autocatalytic processing by small molecule inhibitors. These strategies have been described in Hedrick et al., Curr Opin Investig Drugs 2009; 10:938-46; Hooper et al, Expert Opin Biol Ther, 2013; 13:429-35; Rhainds et al, Clin Lipid, 2012; 7:621-40; Seidah et al; Expert Opin Ther Targets 2009; 13:19-28; and Seidah et al, Nat Rev Drug Discov 2012; 11:367-83, each of which are incorporated herein by reference.

[0425] In some embodiments, the loss of function mutation induced in PCSK9 e.g., G106R, L253F, A443T, R93C, etc. In some embodiments, the loss-of-function mutation is engineered (i.e., not naturally occurring), e.g., G24D, S47F, R46H, S 153N, H193Y, etc.

[0426] PCSK9 variants that can be useful in the present disclosure are loss-of-function variants that may boost LDL receptor-mediated clearance of LDL cholesterol, alone or in combination with other genes involved in the pathway, e.g., APOC3, LDL-R, or Idol. In some embodiments, the PCSK9 loss-of-function variants produced using the methods of the present disclosure express efficiently in a cell. In some embodiments, the PCKS9 loss-of-function variants produced using the methods of the present disclosure is activated and exported to engage the clathrin-coated pits from unmodified cells in a paracrine mechanism, thus competing with the wild-type PCSK9 protein. In some embodiments, the PCSK9 loss-of-function variant comprises mutations in residues in the LDL-R bonding region that make direct contact with the LDL-R protein. In some embodiments, the residues in the LDL-R bonding region that make direct contact with the LDL-R protein are selected from the group consisting of R194, R237, F379, S372, D374, D375, D378, R46, R237, and A443.

[0427] As described herein, a loss-of-function PCSK9 variant, may have reduced activity compared to a wild type PCSK9 protein. PCSK9 activity refers to any known biological activity of the PCSK9 protein in the art. For example, in some embodiments, PCSK9 activity refers to its protease activity. In some embodiments, PCSK9 activity refers to its ability to be secreted through the cellular secretory pathway. In some embodiments, PCSK9 activity refers to its ability to act as a protein-binding adaptor in clathrin-coated vesicles. In some embodiments, PCSK9 activity refers to its ability to interact with LDL receptor. In some embodiments, PCSK9 activity refers to its ability to prevent LDL receptor recycling. These examples are not meant to be limiting.

[0428] In some embodiments, the activity of a loss-of-function PCSK9 variant may be reduced by at least 20%, at least 30%, at least 40%, at least 50%, at least 60%, at least 70%, at least 80%, at least 90%, at least 99%, or more. In some embodiments, the loss-of-function PCSK9 variant has no more than 50%, no more than 40%, no more than 30%, no more than 20%, no more than 10%, no more than 5%, no more than 1% or less activity compared to a wild type PCSK9 protein. Non-limiting, exemplary assays for determining PCSK9 activity have been described in the art, e.g., in US Patent Application Publication US20120082680, which are incorporated herein by reference.

[0429] In some embodiments, cellular PCSK9 activity may be reduced by reducing the level of properly folded and active PCSK9 protein. Introducing destabilizing mutations into the wild type PCSK9 protein may cause misfolding or deactivation of the protein. A PCSK9 variant comprising one or more destabilizing mutations described herein may have reduced activity compared to the wild type PCSK9 protein. For example, the activity of a PCSK9 variant comprising one or more destabilizing mutations described herein may be reduced by at least about 20%, at least about 30%, at least about 40%, at least about 50%, at least about 60%, at least about 70%, at least about 80%, at least about 90%, at least about 95%, at least about 99%, or more.

[0430] In some embodiments, the methods and composition disclosed herein reduce or abolish expression of protein encoded by a target gene and/or function thereof. For example, the methods and composition disclosed herein reduces expression and/or function of PCSK9 protein encoded by the PCSK9 gene by at least 3-fold, at least 4-fold, at least 5-fold, at least 6-fold, at least 7-fold, at least 8-fold, at least 9-fold, or at least 10-fold relative to a control. For example, the methods and composition disclosed herein reduces expression and/or function of APOC3 protein encoded by the APOC3 gene by at least 3-fold, at least 4-fold, at least 5-fold, at least 6-fold, at least 7-fold, at least 8-fold, at least 9-fold, or at least 10-fold relative to a control. For example, the methods and composition disclosed herein reduces expression and/or function of ANGPTL3 protein encoded by the ANGPTL3 gene by at least 3-fold, at least 4-fold, at least 5-fold, at least 6-fold, at least 7-fold, at least 8-fold, at least 9-fold, or at least 10-fold relative to a control.

[0431] In some embodiments, the gene modification methods and compositions disclosed herein reduces expression of functional PCSK9 protein encoded by the PCSK9 gene in the cell by at least 5%, at least 10%, at least 15%, at least 20%, at least 25%, at least 30%, at least 35%, at least 40%, at least 45%, at least 50%, at least 55%, at least 60%, at least 65%, at least 70%, at least 75%, at least 80%, at least 85%, at least 90%, at least 95%, at least 97%, at least 98%, at least 99%, at least 99.5%, at least 99.9%, or 100%. In some embodiments, the modification reduces expression of functional PCSK9 protein encoded by the PCSK9 gene in the cell by at least 2 fold, at least 3 fold, at least 4 fold, at least 5 fold, at least 10 fold, at least 20 fold, at least 25 fold, at least 30 fold, at least 40 fold, at least 50 fold, at least 60 fold, at least 70 fold, at least 80 fold, at least 90 fold, at least 100 fold, at least 200 fold, at least 300 fold, at least 400 fold, at least 500 fold, at least 600 fold, at least 700 fold, at least 800 fold, at least 900 fold, at least 1000 fold, at least 2000 fold, at least 3000 fold, at least 4000 fold, at least 5000 fold, at least 6000 fold, at least 7000 fold, at least 8000 fold, at least 9000 fold, or at least 10000 fold. In some embodiments, the modification abolishes expression of functional PCSK9 protein encoded by the PCSK9 gene in the cell.

[0432] Some aspects of the present disclosure provide strategies of reducing cellular PCSK9 activity via preventing PCSK9 mRNA maturation and production. In some embodiments, such strategies involve alterations of splicing sites in the PCSK9 gene. Altered splicing site may lead to altered splicing and maturation of the PCSK9 mRNA. For example, in some embodiments, an altered splicing site may lead to the skipping of an exon, in turn leading to a truncated protein product or an altered reading frame. In some embodiments, an altered splicing site may lead to translation of an intron sequence and premature translation termination when an in frame stop codon is encountered by the translating ribosome in the intron. In some embodiments, a start codon is edited and protein translation initiates at the next ATG codon, which may not be in the correct coding frame.

[0433] The splicing sites typically comprises an intron donor site, a Lariat branch point, and an intron acceptor site. The mechanism of splicing is familiar to those skilled in the art. As a non-limiting example, the intron donor site has a consensus sequence of GGGTRAGT, and the C bases paired with the G bases in the intron donor site consensus sequence may be targeted by the methods and compositions described herein, thereby altering the intron donor site. The Lariat branch point also has consensus sequences, e.g., YTRAC, wherein Y is a pyrimidine and R is a purine. The C base in the Lariat branch point consensus sequence may be targeted by the nucleobase editors described herein, leading to the skipping of the following exon. The intron acceptor site has a consensus sequence of YNCAGG, wherein Y is a pyrimidine and N is any nucleotide. The C base of the consensus sequence of the intron acceptor site, and the C base paired with the G bases in the consensus sequence of the intron acceptor site may be targeted by the nucleobase editors described herein, thereby altering the intron acceptor site, in turn leading the skipping of an exon. As described herein, gene sequence for human PCSK9 is −22-kb long and contains 12 exons and 11 introns. Each of the exon-intron junction may be altered to disrupt the processing and maturation of the PCSK9 mRNA.

[0434] In some embodiments, a splice site disruption generated by a base editor system disclosed herein can result in the inclusion of intronic sequences in messenger RNA (mRNA) encoded by the PCSK9 gene. In some embodiments, the splice site disruption generates a nonsense, frameshift, or an in-frame indel mutation that result in premature stop codons or in insertion/deletion of amino acids that disrupt protein activity. In some embodiments, the splice site disruption generates exclusion of exonic sequences. In some embodiments, the splice site disruption generates exclusion of exonic sequences that results in nonsense, frameshift, or in-frame indel mutations in the PCSK9 transcript. Canonical splice donors comprise the DNA sequence GT on the sense strand, whereas canonical splice acceptors comprise the DNA sequence AG. Alteration of the sequence disrupts normal splicing. Splice donors can be disrupted by adenine base editing of the complementary base in the second position in the antisense strand (GT to GC), and splice acceptors can be disrupted by adenine base editing of the first position in the sense strand (AG to GG).

[0435] Further, the present disclosure also contemplates the use of destabilizing mutations to counteract the effect of gain-of-function PCSK9 variant. Gain-of-function PCSK9 variants (e.g., the gain-of-function variants have been described in the art and are found to be associated with hypercholesterolemia (e.g., in Peterson et al., J Lipid Res. 2008 June; 49(6): 1152-1156; Benjannet et al., J Biol Chem. 2012 Sep. 28; 287(40):33745-55; Abifadel et al, Atherosclerosis. 2012 August; 223(2):394-400; and Cameron et al, Hum. Mol. Genet. (1 May 2006) 15(9): 1551-1558, each of which is incorporated herein by reference). Introducing destabilizing mutations into these gain-of-function PCSK9 variants may cause misfolding and deactivation of these gain-of-function variants, thereby counteracting the hyper-activity caused by the gain-of-function mutation. Further, gain-of-function mutations in several other key factors in the LDL-R mediated cholesterol clearance pathway, e.g., LDL-R, APOB, or APOC, have also been described in the art. Thus, making destabilizing mutations in these factors to counteract the deleterious effect of the gain-of-function mutation using the compositions and methods described herein, is also within the scope of the present disclosure. As such, the present disclosure further provides mutations that cause misfolding of PCSK9 protein or structurally destabilization of PCSK9 protein.

[0436] The polypeptide and coding nucleic acid sequences of PCSK9 and of other members of the family of human origin and those of a number of animals are publicly available, e.g., from the NCBI website or ENSEMBL website. Examples include, but are not limited to the following sequences, each of which sequences are incorporated herein in their entireties; Wild Type PCSK9 Gene (NG_009061.1), Homo sapiens proprotein convertase subtilisin/kexin type 9 (PCSK9), RefSeqGene (LRG_275) on chromosome 1

(SEQ ID NO: 5)
GTCCGATGGGGCTCTGGTGGCGTGATCTGCGCGCCCCAGGCGTCAAGCACCCAC
ACCCTAGAAGGTTTCCGCAGCGACGTCGAGGCGCTCATGGTTGCAGGCGGGCGC
CGCCGTTCAGTTCAGGGTCTGAGCCTGGAGGAGTGAGCCAGGCAGTGAGACTGG
CTCGGGCGGGCCGGGACGCGTCGTTGCAGCAGCGGCTCCCAGCTCCCAGCCAGG
ATTCCGCGCGCCCCTTCACGCGCCCTGCTCCTGAACTTCAGCTCCTGCACAGTCCT
CCCCACCGCAAGGCTCAAGGCGCCGCCGGCGTGGACCGCGCACGGCCTCTAGGT
CTCCTCGCCAGGACAGCAACCTCTCCCCTGGCCCTCATGGGCACCGTCAGCTCCA
GGCGGTCCTGGTGGCCGCTGCCACTGCTGCTGCTGCTGCTGCTGCTCCTGGGTCC
CGCGGGCGCCCGTGCGCAGGAGGACGAGGACGGCGACTACGAGGAGCTGGTGC
TAGCCTTGCGTTCCGAGGAGGACGGCCTGGCCGAAGCACCCGAGCACGGAACCA
CAGCCACCTTCCACCGCTGCGCCAAGGTGCGGGTGTAGGGATGGGAGGCCGGGG
CGAACCCGCAGCCGGGACGGTGCGGTGCTGTTTCCTCTCGGGCCTCAGTTTCCCC
CCATGTAAGAGAGGAAGTGGAGTGCAGGTCGCCGAGGGCTCTTCGCTTGGCACG
ATCTTGGGGACTGCAGGCAAGGCGGCGGGGGAGGACGGGTAGTGGGGAGCACG
GTGGAGAGCGGGGACGGCCGGCTCTTTGGGGACTTGCTGGGGCGTGCGGCTGCG
CTATTCAGTGGGAAGGTTCGCGGGGTTGGGAGACCCGGAGGCCGAGGAAGGGCG
AGCAGAGCACTGCCAGGATATCCTGCCCAGATTTCCCAGTTTCTGCCTCGCCGCG
GCACAGGTGGGTGAAGGAGTGAATGCCTGGAACGTACTGGGAACTGCACCAGGC
ACAGAGAAAGCGGGCTTGCCATTATAGTGGGTTCCGATTTGGTTTGGAAAACATG
GGCAGCGGAGGGTGGAGGGCCTGGAGAGAAGGCCCTACCCGAGACAGGGGCGG
GGTGGGAAGGACGGCAGATGCTGGGAGCACGAGGCAATTTCTTTATGACACAGA
ACTCATGCTCTAGTATTCCATCTGTTTCAGCCGAAGAAAAGAACCAGCTGAAGGG
GCAGGGGAGAAGGGGCGGAGGTATTCTCGAGGCCCATTGGCGTCCTTTAGGACT
CAGGCAGGGAAGGGCCCTTGGTGCTCTGGAGCCGGAGGTGGTGCGCCTGGTACT
GGGACCCCGGAGCTGAGCCCGGCGCCTCAGCCCACCTGGCTGTCTGCCGACCGT
GTGCGGGGCGAGTTTGCTCAACAACTCTGCCAGCTTCTGGCCCTCAGGCTGTGGG
AAGCTTCTTCCCGGGGCGAGACCACTAGCTTTTTCTAAGTATTACCAGCCCAGGA
CTTGGCTGAGGTTCTGTGTCCCCCAGCTTGGAGTCAGATGTGGGGTTGAATCTTG
GCTTCCTCTCACTAGCTGTGGTGCTTGACAAGTCACTTATCCTTGAGCCTCCATTG
CCTAATCTTTAAAAGGGAGGTGACAATCGTCCCTACGGCTCAGTGGCAGCAGAT
GGGGAGATGAAGGGAAAGTTCTGTTGACCATGAGTGAACTTACAATGCAAGCCC
CGGGGGGATCACTTGCAGTTTTGTCCCTGTCTGCAGTGTGACCTGTTGGTGACAT
TGTCTTTGCTCCAAACCACAGCTCCTGGGGCAGAGGGGAAAATTCTGCCACTCAC
AGCTGCCTGCCCACGCTTCTGTCTGAGTGTGCTGGGTGGCAGGATGGCAAGTCCT
TACTCAGCTCAGTATAGCCCTCTTCCTTGTTCCCTGAGCCTTTGACTTTCTCGAGG
GATGTTGTGGGGTTGTGGCCAGGATAAGAAAGGGCATTTCAAGTTACCACTGCTC
CAAAACAACTGTTCTGGAAATAGTGAGTACCCCATCCTGAGAGGTGAGTAAGCA
GAGGCTGTATGACCACCTGAACCAAGCCCTTGAGGATGTTTCTTCTCTGGTGGAA
GTTTGGAACAGGAGCCTCCTCAAGTTCATTTATTCATTCATTCAATGGTTATTTTG
TGGGAATCGAATTTAGAATGAAAATATTTTTTGGCAAGCAGAAAATAATTTTTAG
ACCAATCCTTTTCTTTTAGTCATGAGAAACTGAGGCCCAGAGAGAGGAGGTCACC
CCAGGTGCATTAGAACTGGGTTTCCAGAACTGACACTCCACTGCACAGAGTACTC
TCCCAATTCATTCAATTTTTATTTAGCGGAAGGCATTTTCAGATGGGTCTTTGAAG
CATTAGTAGGAGTTCAGCGATGATGGTGTCATGAGAATTTTATTCTAGGATTAGG
AGGTACCATGAACAAAGATACAGAGCTGGGAAAACCAGAGGTGGAAGATAAGG
AGCACATGTCCACAGTTCTTTTTCTTTTTTTTTTGAGATGGAGTTTCGCTCTTGTTG
CCCAGGCTGGAGTGCAATGGTGCAGTCTCAGCTCACTGCAACATCTGTCTCCCGG
GTTCAAGTGGTTCTCCTGCCTCAGCCTCCCAAGAAGCTGGGATTACAGGTACCTG
CCACCACGCCCGGCTAATTTTTGTATTTTTAGTAGAGAAGGGGTTTCACCACGTT
GGCCAGGCTAGTCGCAAACTCCTGACCTCCTCAGTGGATCCGAGGAGGTGATCCT
CCCGCCTCAGCCTCCCAAAGTGCTCGAATTACAGGTGTGAGCCACCACGCCTGGC
CTCCACAGTTCTTTATCCACCGTCTGAAATGTAAAATGTTACGAAAACCAAAAGT
TTTTTTTGTGATTTATTTGATGGTAGCACCTGACGTGAACTGACATGAGATTATTT
TTAATTTAGTTGTGTGAATATGCATATTCATATATTTTGCTGCATAGATTACAGTA
TGCAGCTCCAGATTCTTCCAAGCAGACTCTGATTGCCCATTACTGCCTTTCTAAA
ATCCAAACAAGTTCTGAGGTTCAAAACCGTTTTGGCCCTAAGGCTTTGGGTAAAG
GGGGTGGACTCTGTTCTACTCTGACTGGAGTCCAAGATGCATATATACAGAGATA
TGGGTGATGGGGCTGCAAGGTAGGTTGAGGTAGGGGCCAAGGAGGAGCATGGA
GTTTGGACTTGATTCATGAGGCTGTGGGGAGCCAGTGAAGGTTCTTAAGCAGGTA
TGTCTGCCTGAGAGCAGTTGGAGCAGACAAGAGCTAAAAACCAAACAAATCACC
ATAGATAGTGGCTGCTATAATTTGTTTGTCCCCTCCAAATCTCATGTGGAAATTTG
GTCCTCAGTGTTGGAAGTGGGGCCTAATGGGAGGTGTTTGGGTCATGGGGGAGG
AACCCCTGTGAAAGGCTTGGTGCCGTCCTTGTGATAATGAGTAAGTTCTCCCGCT
ATGATTTCCCTTGAAGGCTGATTATTAAAAAGAGCTTGGCACCTCCCTCTCTTCTC
TCTTGCTTCTTCTCTTGCCATGTGATTGATCTCTGCACATGTAGGCTCCCCTTCAC
CTTCTGCCATCAGTGAAAGCAGCTTAAGGCCCTCACCAGAAGCAGATGCTGGTG
CCATGCTTCCTGGAGAGCTTGCAGAATCATGAGCTGAATAAATCCCTTTTCCTTG
TAAATTACTCACCTTCAGGTATTCCTTTATATAGCAACACAAAAGGACTAAGACA
GTGGCCTTGACTTTTCTCTCTCTTTAAGAAGTGTTGCCTTTGCTCACTTAGTCATC
CCTTCTGCCTGCATTTGTAGAGCATCTGGATGGGAGATTTATATAACCGTCACTC
TTGACTTTCCCAGCAGGCCTATGTCATAGGTACTGTGGTCTCTACAATACAGCAG
AGGTATCTGAGGCTCCGAGAGGTTGAGTGACTTGCTCATGGCTGCACAACCAGT
AAATATTGGAGCTGGAATTCAGGTCCACGGTTTCCTGGCTCCAAAGCCCATGATT
TTTTCCCTCAATTTATTCTGACTGGGGCATGGGGGAGGGGGTGGCCTTTGGGCAG
GGCCACCAGGAGCGACCAGGCCCGTAGAGAGCTGGGTGCAGGTACAGAGGAAA
ACCTGTTGTCGAGTGTGGCCCGTAGTTCCCATTTTTGCCTGAATGGCACATTTGA
AAGTGTTATATAACCATGTGAATAATAATAGTTGGCCTATATGAGTTCTTTAATTT
GCTTTTTGGTCCGCATTTGGTAACTTCTTTATCATCTACTATACTCTGTTGTGTCTC
TTTTGTTGTAATTTGTAAGTAGGGGTGAGATAAAGTACACCTAGGGTTTGCTGGG
TTTCTTCCATGTCATCATGTTCCTCCTTGCATGGGGCCAGGATCCGTGGAGGTTGC
CTGGCACCTACGTGGTGGTGCTGAAGGAGGAGACCCACCTCTCGCAGTCAGAGC
GCACTGCCCGCCGCCTGCAGGCCCAGGCTGCCCGCCGGGGATACCTCACCAAGA
TCCTGCATGTCTTCCATGGCCTTCTTCCTGGCTTCCTGGTGAAGATGAGTGGCGAC
CTGCTGGAGCTGGTGAGCCACCCTTTTTGGGAATGGCACTTCCTGATAGGGCTGG
GCCACTGCATATACACTGGGGACTGTGCTTAGTAGGCCCATTGCTGAAAATCAGA
AGGGGACAGCAAGTATGTATTGAGCACTTATCGGGTACCAAGCACAGTAACTAC
TGGCTTTCTGTATAGAATTCCCTTTAAGCCTGGCCATGCCCCAGTGGTACGTCTAT
CTTCATTTGAAAGACGAGGAGACTGAAGTTCAGAGGGGACCACACAGACAGCTA
GGGGTAGAGCCTGGATCAAACCCATTGGTCTGCCTGCCAGCCATTCTTGTGCCAA
TGCATCTGCTGCCTACGGAAACCTGTAGGGACAAGGCCCTGGGATGTTCAGTGG
AGCCTGAGTCATTTTATAAAAAAGCATGACTCTAGGGTCCAAAATTCCTTTGAAG
CTGTTGCTATCCAGAGTGAAGTCCCTTCTTTAGGACAGGGTGGCCCTCCTCCCTC
CTGGATGTCACATCTTCGGTGGAGGGGCAGAAAGGGGACTGGGTATTCTCCTCA
CCCTGGCCCTAGTGCTTCAAATCTTAAAAAAACGTTTTTATTTGTGCTTCTGCACC
ACCTTCTAGCCCACCTCGTTTCCTGGCCTCTAACTTGATGAGAGCGTGTGTCATTT
TCACACTGATTCTCCACATGGCAGGCGGTGCTTCTTAGCCTCCTGCAGACAGTGA
GGCCCCACGGTCTTGTCCAAGGTCACACAGCGTGTAATGGGCAGGGTCAGAGTC
TGGAGTCTGGACCTGGGTCTCCTAGCTGCACTGCACTGCTGCCCCATGGGTTAAT
CAGCTCAGCATACCGTGGCTGAACAGCTACCTCATACCAAGGCCTGTGGCGCCAT
GACAGGGATTGACAGGGTCCCTGCCTTGGAAACCCGTAGTCTAAGTAGAGGAGA
CTGACAAGTCAATGCCTTCCATCAGTCTGCTCAACACACGTTTACCAAGTGCCTA
CTGTGTGCTGCAGAGGCGAAGATGACACAGCTCAGGCCTTTCCCTTGAGCTTACA
GTTCAGGAGGAGAGACTGACCAGTGACTGCCAGTACAGTTGACTATGGGACAAT
GTGCTCAGCCTTGGGGAGAGACGAAGAAGGTACCCGTATAGCACCAGATGACAG
GCACGAGCCCCACAGGCCAGGGCAGCTGCTCAGAGGAGAGTAGGCCAAGCAGA
AGGCAAACAGAAGGCTGCAGGCATTTGCCATCGAGAGCTGGACTTCAAACTGGG
CATCATACCAGCCTGGGTTCGAGTCCTGCCCAGCCCCTTATTGGCTGTCTAACCC
TGAGCAAATCCCTTCACCTCTCTGAGCCTCATTCCTCTATCTGTAAACCAGTTATA
ATAATTGGAACATTCATTTAAGGACTAAATGAGGTCGTGAAGCATTCAGCAGAT
GCTAGGTACGGAAACTCGCTGAAGTGGGGGCAGGTTAAGAAGCCTCTGGGGATA
CGAAGGCATCCAGGGACTAGTTGTGGCAGGAGGCTGTTACCACTTAGGTCTGAA
GGGTAAGGAGAGGGAATAGCTTTCCCTCTGCCCAGTTGGAGCCGGTGGCATGGA
GGAGAGGCTGCCTGTGGGGAATCACCCGAGGGTTCACCGCTGCCATGCGCAGGG
AGTCAGGAGGTAGGGAGGGAGTGGGGCAGATGCACACCATTTTTTTTTTTTTTTG
AGACTCTGTTGCCCAGACTGGAGTGCAGTGGTGCCATATCTGCACCTCTGCCTCC
CGGGTTCAAGCTCACTGCAACCTCTGCCTCCCGGGTTCAAGCGATTCTCCTGCCT
CAGCCTCCCGAGTAGCTGGGACTACAGGTGTGTGCCACCATGCCTGGCTAATTTT
TGTATTTTTAATAGAGATGGGGTTTCACCATGTTGGCCAGGCTGGTCTCGAACTC
TCGACCTCAGGTGATCCCCCACCTCGGCCTCCCAAAGTGCTGGGATTACAGGCGT
GAGTCACCGCTCCCAGCTGCTGATGCACTCTTGTCCTTCTAACTCCTGCTAGTGCC
TCCCATTGGCTGAGCCCAACTGGAAGCTTTGCAAGGGAGCTGGTGCTGCAGTTTG
CACTGAGCAGGCTGGAGAAGGCTGGAGAATAGACTAGGGGACAAACCGAATTG
CCAGTGCTGTTATGTCATGATTTAGGCATGGAGTCCAGGGCCTGAGCTTCACTCC
ATGTCCATCCTGCCCAGAGCCTTGGCACAGCCTGGCTCCCAGACAAGATGTCAAG
TTCAGAATCCTTCCTAAAAGGAATCCTCTATGCCAGACCGTGTTGCAGGGATATG
GGAGTGCTGGGCTCCCAGCCTGATCAAGGAGCGAGAAAACTCAGGCTCCTAGTC
TGTCCTCCGGGGCACTAGCAGGGACAAGGTGGGAGGCTGCTGGGCTGGGATGTG
GGGACAGGTTTGATCAGGTAAGGCCAGGCTGTGGCTGTGTTTGCTGCTGTCCAAA
TGGCTTAAGCAGAGTCCCCCGGCCTCTCTGGCTTCTGCAGGCCTTGAAGTTGCCC
CATGTCGACTACATCGAGGAGGACTCCTCTGTCTTTGCCCAGAGCATCCCGTGGA
ACCTGGAGCGGATTACCCCTCCACGGTACCGGGCGGATGAATACCAGCCCCCCG
GTAAGACCCCCATCTGTGCCCTGCCCCACCCCATCTGAGCTGAATCCATTTGCTC
TGCCCTGGCCTGGCCTCCCTGCTGGTGGTTTCCACTTCTCGGGGGGCTTTGGGACT
CAGCACCTCCACTGACCCCTTTTTTTCTGTCCCATCCCCATCCCCTGCAGCCCCCA
CTGCCTGCCTTCCTGTTGCCCCACAAATGCAAAAGTCTTGCCTTAAATGATCCTCT
TTTCCTTCTTTTCTCTTGTTTTCCTTTTCTCACCATTTGGAATGGCCCAGCAGGCTG
CACTTACCTTGGAAGGAGGGTTCATCTGATGGTGACTCTACCTAGGGCCCCCAGG
CCTCTATAACTCCCAGTGCCCTGCAGACTGGACCAGATCCTTTAATGGGATAGAC
ACAACCCTGTCTGGGATGCCTCTGCCTACCTTCCTGTTTTGCTGCTCCACCTGCCT
CCAGCTCCGTTTGGCTTCCTGGGGCTCCCTGCCTGGGCCACTTTGTGTCTTCCCTC
TAGGCCTTTCTTTCCACTGTTCCCTCTGCCTGGTGTGGCCTGGCTATGGAAGGGA
GGGAGGAGGAGCGGCCATGGAAAACGGTCTGCATTCTAGCAGGGACTTGCAGGT
GGCAATTCAGTCGGGGAAGACTCTAGATGCACCTGGCCTGAGGAGAGAATGAAG
GGTTCTAGTTGGACTGTGTTAAGTTTGAGGTGCCCATGGTGTGAGGTCTGGAGCT
CAGCGCAGAGATGATGCAATGTGGTGGGTCCATGCAACATGGTGCCAGGACGCA
GAGCTTGGGGTGAACTCAGCTTTCACCCCTTACCGGTTCTCGTGGGATCTTGGGA
AGCCACTTTCTTCTATGAGCTTTGTCGTTCTTGTCTGTAAAATGGGCACATAACCC
TGTCCCTGTCCTTCTCACAGGTTGCTGTGAGACTCCAATGAGTTGAAGGATGTGC
AGATGCTTTTGGAAGTGAAAAGTTGGGGGGCTACTGTGTGACTTTGCATACACCC
AAACTGTGTGACCTTGCATATGTCTGAGTTGCTGCCATTGCAACAGATCAGAGCT
GGTGGGCTGGGTGTGGAGAAAGGGTTTGTGTGGGGGACATCCTCTGGCAAGGGT
GGCAGCAGCAGAAGTGAGGGGCCTGGTCGGTCATGTGTGCTGACCCGGCCTGGG
CAGCCTGTGGCCAGGGAGAGGACAGCTCCTCTGTAGGAAGAGCCTGTTCCTTTCC
AACCAGGTGAGACCTCTTCAGTGGAGCCCTGGAGCCCCCTGTACTCCACATCAGT
GCCTCAGGGACCTCCCGGAGCAGGCTAATATCAGAGACCAAGAGGGACACTGGC
AGAGGATCACAGAGACCCCAGTCCAGGCAGGGACTGAGAAGATCTTGCCCCCTA
AGTTAGTTTCCTAGCACTGCTGTGACAAATTACCACCCCCTCGGTTGGAACAAGT
TGATTCTCTGCAGTCCTGGAGGCCAGAAGCCTGAATCAGTGTCGGCAGGACCACT
TTCTCCCGGGGGGCTCCAGGGAGAAGCTTCTCTTGCCTCTTCCGTGTCCCAACAG
CGGCAGCACACCAATCCCAGCCTCTGTCTTCACACAGCCTTCTCTGTGTCTCTCTC
CTCTTCATTGTCTCATAAGGACACTTGTCATTGGATTTAGGGCCCACTGGATCCTC
CAGGATGATCTCATGTGGGGAACCTTAACCACATCTGCAAGGACCCTTTTTCCAA
ATAAGGTCACAGCCACAGGTTGTGGGGGTTAGGATGTGAGTGTATCTCTTTGGCA
GCCACTGTTCCCTCCTCTCCCTTGGGCCAGAAGCAGACGTGGGGCCCTTTCTTCC
CCATAGGATGCCCATGGATTGCCCCCCTTCCCGCTTCCCCCGAGTGTCTGTGGGA
GGTGGCAGGAATGGCAGGCAGGGGTGTGGAACCCCTTCTGGAGTCATATCAAGG
GCTTGGCTGGAGGAAGTCCTCCTGGAGCTGTTGGGCTGGCATGGGGCAGGCTGG
CTGGGCCCAGCAGCAGCTTCTTCATTCATGGGGAGGCCACAAGCATGGGCCCTA
GAGCTGGCTGCCGCCCTCAAACCCAGACCCTGCACTCTTAACTGTGTGACCTTGC
ATACGTCACTCACCCTCTCTGATCTTCAGGTTCCTCTGCAAAAGGGAGGTAATGA
TAACCCTCACTCTGGGGGGCTGTTTGGAGGGTTAAATCAGTTATTGCTGTAGCAT
GCATTTCTCTGTCAGGTATTGAGTGAGGTGCTGTGATTTTAGCCCTGCATTTTTCT
TTTCTTACCATTCAATAATAACGTTTTGAGCACCCACTGTGCGCCAGGCACCATA
TTAGGTGCTGGGGATACAAATGTGAATGAAATGAATGTGGTCTCTTCCCCCAACA
GTGTATCCAGAAGATTAATCCATTCCTTAAACAAATGCTACTTGACACAGATTAG
TTCTGGATAGGCTGAGAGCTCTGAAGGAGTGCAGGCAGCTGCGAGCCTGTGTAT
CCAGCAGAAGGATCAGGAAAGGATTCCTGGAGGAAGCGCTGTTCTAGCCAAGAC
CTACGGGGGCATTATTAACCAGGCAAAGGGGACGGTGTCCAAGCAGTGGAATGA
ACGTGGATTGAAGCTGTGAGGCAGGAGGGAGTGTGGCCTGTGCAGAAGGGACCG
AGGCTGGTGAGACCAGGAGGGCCTGGGTGGCCTCCAGGTCAGATGTGAAAGGAA
GAACTTGGCCACAGTCTGAGCTTCTCAGGCGTATGGCAGGGCTGCCTGGTGAGA
GGGAATGAGCTCCCTGCTCTGGAGGTATGCAAGCAGGACTGGGCTCTCACCTGC
CAGAGGCCACAGAGCTTTCCAGAGGCTGGAAGAGGCCACTCCAAGGCCTCTTTG
CCCCTGAGAGTGGTGGCTCTTCTTGAGGCCACCTTGCCACGCTGTCACAGGGAAC
TAGCAGCCCCTGCCTCACCCGGGGGTTTGGAAGATAGAGGGAGGCCTAGGAAGG
GCCCTGTGTCTCATCCGAGCTGGGCCCCTTTCCAGCCTCTCACTGGAAGGAAGCC
CAAGGATGTTCCTGTGGGGGCTTTTACCAGGCCCACCTGCCCTCTGCTGGCCATG
CTTGCAGCCTCCTGACCCTGTCCCAGCAGGACAGTGGGCTGGTGTGAGCGGGCA
GGAACCGCCTGCACTTAGAAGGTGTGGGGCTGCCTCCCCGAGCTTCCATCTGCCG
CTGGGGCCACACCCCAGGCCCAGGGATGGGACCCCACAGTGGTCACATCATCTT
GCAGCAGAACCCAGGTACAGCTCCTGGAGCAGATGGTGGTCCCAAGCACGGGTG
GGACCAGAAAGGACTCTCACCTGGGCTAACTCAGCTGCAGCCTCAGTTCCCTCCT
CACACACGACGAGGAACATGGACTGGAAGCCTGCCCAGCAGGCCTTCTGCTCGA
TGTGCGTTGTGTGGCTTACGTCCAGGGAGGGAAGCAGCCTCTGTGCTGTCTTCTA
GATAAGCCTGTATTCCCCGGGCTGTCTGCCAATGTATCCAGTTGTCCCGTCAGCC
TGGAAGCTCTGAGGGAAAACCTTGGGCTGCTTCCTGAGCACCTGTATCCCCTGCA
GCCAGCCCGGGGCCTCTGCTAGGAGCAGACTGAGCATGGCTTATGGGCCTGGCA
CCATCTGGCCTCTGCCCACCTTGCTGGCCTTGTCTTGTGTCTGCCCCTTCGACATT
CCATAGCCCAGCTCAATATCTAGTGGTTCCTCTAGGGTGGCGAGCACTGTTTGGT
CTCCAGATGTCTTCAGGTCGGAGCTCACAGCGCTCTCAGCCACCCCTTCCCAGTG
TAGCACCGGGCACATGGTAGATGCCTATTGATGAGTGAAAGCTCCTAACACACT
CAGAGAGCAAGGACTCCGCCTCATCCCACAGCCTGGGAGGAGAGGCAGACTGCC
AAGGACCTGCTCAGCATGCTACAGAAGAAACCAAAGTGCCCACGGGACTGATCA
GTGGAGCTTCCTGCCGAGACTGGAGGCCTTAGGGCAGGGTAGACAGTGTGTGTG
CAGGCTGGGGACTCACAGTTCGGACTGTGCCCAGACCTACTAGCATAGTGGGTG
GGTGGGAGGATGCGGGACTGGGGGCCGACCTTGCCTGAAATTCATGTGGGATCT
CAGAGCAGCCACTGAATTGCTCTGTAGGGGGCTAAATAGTGGCCCCCACAGATA
CACACACCCAGACAGAGCCTGTGAGCCAGACCTTATTTGGAGAAAAGGTCTTTG
TAGATGTAATTAAGCATCTCAAGATGGCATCATCTGGATTATGCGGTGGGCTGTA
AGTCCTGTGATGTGTCTTTATGAGAGAAAGGCAGAGGGAGATTTGACACACACA
GGAGGGGCCACGTGGAGACAGAGGTGGAGATTGGAGAAATGTGGCCACAAGCC
AGGGAACACCAGCAGCCACCAGAAGCCGGAAGACGTGAGGCAGGGTTCTTCCCA
GAGCCTTCGCTGCTGAGTCTGGGAATTTGTGACCGAAGCCATAAGAAGTGGGTA
CACGCCCTGAGCCTCCCACACTTGCTCACCTGTCCTGAGATGAGAATCTCTACTC
TGCAGCATATTTGGAGGATCACTGCGGGGGCCACAGAGGTGCTGTTCAGATGGC
ACTTCAGAAGACTCAGGAGACCCTGGGGCAGGAGCAGTTTGACTGACAGCCCAG
AGGGCTGCCCTCTGATTCCACCTGAGGCCCTGCTTTTCCTGGCTGCAGGGGTTCC
AGGGCCAGGCCATTTCCGCTGGCGCAGGACTCTGCTAGCAGCAACCTGCCTGAA
GTCTTCCTTTGGCCTGGCTGAGAGTTTCTGAGACCTGCGCTGGAGCGGAGGTGCT
TCCTTCCTTGCTTCCTTTCTTCCTCTCTCCCTTCTCCATCCAGCAGGCTGGACCTGC
CTGGCATCTGTGAGCTCTCCCTACTTTCTCCTATACCCTAACCTTTGTCCTGCATG
GGCGACTCCCCCAGTGAGTCTCTTGCAGCTTTTACCCCAGTGCCTGCTTCTTGGA
GAATCCAAACTGATCCAGTTAGGGATGATAAAGTGTAGGGTAGGCGCTCGGTGA
CTGTTTTCTCTGAGGTTGTGACTCGTGTGAGGCAGAAGCAGTCCCCGTGAGCCCT
CCTGGTATCTTGTGGAGTGGAGAACGCTTGGACCTGGAGCCAGGAGGCCCAGAC
ATACATCCTGTCCGAGCTGCAGCTTCCTGTCTCTAAAATGAGCCGGCCAGCGCAG
GTGGCCAGACATCACTGTTATTCTCCTTTGAGTCTTTAAATCTTGTTGTCTTTCTTG
CAGACTCGGTGAGCTGTGAAAGGCTATAATAGGGGCTTTATTTTACACTTTGATA
CTATTTTTTGAACATTCATATTATTGTTAGATATTGATATTCATATGAAGGAGCAG
GATGACTTGGGTCCTTCTTGGCAGTAGCATTGCCAGCTGATGGCCTTGGACAGTT
ACCTGCCCTCTCTAGGCCTCCCTTTCCTTGTCTATGAAATACATTATAGAATAGGA
TGTAGTGTGTGAGGATTTTTTGGAGGTTAAACGAGTGAATATATTTAAGGCGCTT
TCACCAGTGCCTGGGATGTGCTCTGTAGTTTCTGTGTGTTAACTATAAGGTTGACT
TTATGCTCATTCCCTCCTCTCCCACAAATGTCGCCTTGGAAAGACGGAGGCAGCC
TGGTGGAGGTGTATCTCCTAGACACCAGCATACAGAGTGACCACCGGGAAATCG
AGGGCAGGGTCATGGTCACCGACTTCGAGAATGTGCCCGAGGAGGACGGGACCC
GCTTCCACAGACAGGTAAGCACGGCCGTCTGATGGGAGGGCTGCCTCTGCCCAT
ATCCCCATCCTGGAGGTGGGTGGGGACTGCCACCCCAGAGCGTTGCAGCTGTACT
CCTGGGTTGCACCCCCCCCAGCTGTCACTGTCCCCTCCCTGCCATCAGTTGTGGG
AAGGGCGTTCATCCATCCAGCCACCTGCTGATTTGTTATAGGGTGGAGGGGGGGT
CTTTCTCATGTGGTCCTTGTGTTCGTCGAGCAGGCCAGCAAGTGTGACAGTCATG
GCACCCACCTGGCAGGGGTGGTCAGCGGCCGGGATGCCGGCGTGGCCAAGGGTG
CCAGCATGCGCAGCCTGCGCGTGCTCAACTGCCAAGGGAAGGGCACGGTTAGCG
GCACCCTCATAGGTAAGTGATGGCCCCAGACGCTGGTCTCTCTCCATCTGGACCT
GGCCTGGGAGGTGGCTTGGGCTGGGCCCAGGGAGAGCTAATGTCTCCTAACCAA
GAATGCTGTGGCAGCCTCTGCCGCAGAGCCAGAGAACCAGAGTGCCAAGGCTGG
CAGGGTTCCCAGTGGCCACGAGTGCAGATGAAGAAACCCAGGCCCCAAGAGGGT
CATGCAGGTAGCCCAGGGAGTTCAGCCTTGACCCTGGGTCAATGACCTTTCCACA
GTTCCACACTGCTCCCCTTTTAAAATCCGGTGATGTCTTTATGTCTTTTGTTATGTT
ATCTTCAATGTGGAGGGACTCGAGGTGATCTAAGCAAACTTTTTCTATCTTCTGCT
TGCATACCTCTGAGACCAGGGGACTCACTCACTTGCATGACTGGGCCCTGCAGGT
CACACTGGCCAGGCAGATGTGGTGGAGGAACTGGCAGAGGACTTTTTCTAGACT
GTGACTACATTTAGTCCACCCAGCGGCCCCCCTATGAAGTCCAGTTGAGAACTAG
GACTCTGGGGGCCGGTGGACAGAGAAGAGGGAGGGTTCTCTCCCTTACTGACTT
CCTTCTGTGGCCAGACATTGAGCAAGGCCTCTGTACAGCATGTCCTGGGGCTGGC
CTTGCCGTAGCTGCTAAATAGTTGACGAAACCAGTCCAGAGAGGGGAGGTGACT
GCCAGGGTCGCACAGCTCAAGCTGGGGAACTCGCTGGGAAAACTGTCAGCTCTG
GGCAGCAGCTTGACTTCCACTGTAAGCCCCAGCCCCCAGGGTCAAACACTGGCTC
TGGTGCTGGCAGAGGCAGCCCACTAGCCTGTTTCAAAGGCTGAGAAGGCCCAGG
AGTCTGCCCTGTGCTCCACCAGTTCTGCCCTGAGACTTTCCTACAGAGTACAGGT
TTTGATGTTCAGTTTTAAAGGCAAGAATCAATAACCTTCTGCCCCATCAGGTGAC
CCCTTGTGCCTGTCCCACCCCTTTATTGACTGACCTCGGCTCAGTCAGGTCAGTTC
CTGAAGGTCAGTGTGTGGAGGGGAGGCTGTTCTTTCCCAGAAAGGCCTTCCCCAG
GCCTGGTGCTCTGGCCTCTGGAGGACTTCCTGGAGAAGTCCCTTCTTTGGGGTCC
CAGTCAGTGTATGGGAAGCCCTTATTGCATGACCTGGCACGGGGCAGGGGCTCA
ACAGTCACTATTGCCTTCCTTGCCACTGCCATTTCCTCCTCTGTAAGCAGGTGATT
GTGTGTCCAGTCTGAGCACAGAGATAAGCACACAGCAGGTGCTTAATAACTAGC
AGCTGTAGGCTGGGCGCGGTGGCTCATGCCTGTAATCCCAGCACTTTGGGAGGCC
GAGGTGGGCAGATCACCTGAGGTCAGGAGTTCGAGACCAGCCTGTTCAACATGG
TGAAACCCCGTCTCTACTAAAAATACAAAAATTAGCCAGGCATGGTGGTGGGTG
TCTGTATCCCAGCTACTTGGGAGGCTAAGGCAGGAGAATCGCTTGAACCCAGGA
GGTGGAGGTTGCAGTGAGCTGAGATCGTGCCACTGCAATCCAGCCTGAGTGATA
GAGCGAGATTCCATCTCAAAAATAAATAAGTAAATAACTAGCAGCTGTAAATGT
GGCTGTTGTTCTTCACCTCCACACTCAGTGCCACTCCACTCCCTCCCTCCGTGGTG
TGAGGGGCCTCACTAGCTGTCTCCTAGGAGGAGCATGGCTGTGAGATTCCAGCTC
CATCCTTGGCCACGGCTCCTGGAGACATCTTAGAGGCCAGGATCCAGAAGGCTC
CCACACCTCATTTGACAGGGGAGAAGCTGTCAGTTCCAGGTCCCCTTGCACATCA
GGGCCAGAGCTGCGTTAGGCCTCCAGTCTCCAGGCCACTGGGCCAGAGCTCACA
GGCTGGCAGAGGGTTAGAACTGTTACTGGTGGCTGGGTGCAGTGGCTCACGCCT
GTAATCTTAGCACTTTGGGAGGGCAAGGCGGGAGGATCATGAGGTCAGGACATC
GAGACCATCCTTGCTAACACGGTGAAGCCCCGTCTCTACTAAAACTACAAAAAA
TTAGCCGGGCGTGGTGGCAGGCGCCTGTAGTCCCAGCTACTCAGGAGGCTGAGG
CAGGAGAATGGCGTGAACCCGGGAGGCGGAGCTTGCAGTGAGCCGAGATTGCGC
CACTGCACTCCAGCCTGGGCAATAGAGCGAGACTCCGTCTGGAAAGAAAAAAAA
AAAAAAGAGCTGTTACTGTTGACAGTAGCATGAGGTAGACCATGGCCTGCACCA
AAATGGGGGAGTGGAGTGCCACTGAGGCCAGAAGGAACCACACCCTCAAGGGT
GGGGAGTTATGGTATGGGGGGTCCTAGGCATGGAGTCTTTTAATTCTTTAGACAA
TCCTGGGAGCAACTGTCCCTGTTTCACAGAGGGCGGGGCCACACAGCTGGTGAG
TGGGCAGCCAAGACTCTGTTCAAGTTTGTGTGGGTCCAACACTTGCGGCCACGGT
GGAGGGGCATCTGAGCCAGGCCTCAGAGAGTGGCGGGGGAAGTTGGGTGGGGA
AGTGTGCCCTTCTCATTCCTCTGAGGCTCATCCTCTTGGTGCCTCTCTTTCATGGA
AAGGGATAATAAGGTTATTGTGAGGATCCCCTGAGTTCGTATATTCAGACGCTTA
GACAGAGCCAGGCACAGAGAAGGGCCCGGGGTTGGCTAGTTTGATTGCTGGTGT
AATTGCTAATATCTTCCAGTTTGTATTGGTCAAGGTTCTGCAGAGAAGCAGAACC
AGTAGGATGTATATATTAAGAGTTTCAAGCTCATGTGACCGTGCGGGCTGGCAAG
TCTGAAATCCGCAGGGCAGGCCAGGCAGGCTGGCAATTCCTGCAGAATTTGATG
TTGCAATACTGAGTCCTAAGGCAGTCCTGGGGCAGAATTCCTTCTTCCCTGGGAG
GCCTCAGTCTGTTCTCTTAAGGCCTTCAACTGATTAAATGAGGCCTGCCCAAGTT
ATAGAGAGTAACCTGCCTTACTCCGTCTTCTGATTTAAATGTTAGTCACATCTAA
AAAATATTTTCGCAGCAGCATTTCCACTGGCTTTTGACCAAACATCAGGCCACAA
AGTTGATCCCCAAAATTAACCATCACTCTGTGCCTGTAAGGGAGGGGCTGGGAA
AGGGGAGCAGGTCTCCCCAAGGGGTGACCTTGGCTTTGTTCCTCCCAGGCCTGGA
GTTTATTCGGAAAAGCCAGCTGGTCCAGCCTGTGGGGCCACTGGTGGTGCTGCTG
CCCCTGGCGGGTGGGTACAGCCGCGTCCTCAACGCCGCCTGCCAGCGCCTGGCG
AGGGCTGGGGTCGTGCTGGTCACCGCTGCCGGCAACTTCCGGGACGATGCCTGC
CTCTACTCCCCAGCCTCAGCTCCCGAGGTAGGTGCTGGGGCTGCTGCCCCAAGGC
GCGGGTAGGGGGCGGAGGGCGGAGGGCGGAGGGAGGGCGGGCGGGCAGGCGG
GCTTCTTGTGGCACGTGGGCTTCTTGTGGCACGTTCCTGGAGGCCGAACCCTTCT
GGCTTTGGAAGGAGTCGTCAGAGACCCCCGCCATGCGGGAGGCTGGGGAGGAAG
GGGCTCGAAACCTCCATCATCGCAGAGTCTGAATAGCAGTGGCCCCGCCATGCG
CCCACGTAGCGGCGCCTACGTAGCCACGCCCCCACACCCCGTCCTGGCCACTCTC
CCTCCTGAAGGTCTTCTGGTACCCGCCCCCTCCCCATCTCCATCCCCAGGCCCTGC
GTCCTCTGCCCAATACTCTTTGGGCCTCCCTGTTGTCCAGCTCTCTCCGCGGCTCC
ATGACTGACAACTTGAGCAAGGCTAATGTGAATGGGAGCGGTTGAGGGCTCAGA
CCTCTCACCCGAGGAACATCCACAGAGTGTGCCGCATGCCCGGTGCAGTGTGGCT
GCGGGGACACAGACACGGAGCCTCGGCCCTGAGGAGCTGGGGGGCAGTGACCG
TCCCTCCTCTGACCCACCACTCCTCCAGTGTCAGGACACTGCGGGTATCTAGGGG
AAGGAATCTTGTTCCACTTCAAGTCTGGAACTTCAAGTCTGTGTGTGTGCGTGCG
CGCGCGCGCGTTGGGGGTGGGGGTTGCAGAGCAGATGCGTACCTGACAGCGGTA
ACCTAGGTCCCCCCTGGCCTATCAAGGCTTCCCTGGCGGCCGAATTTAAAGGCAT
CAAGCAAACAAAGCCCAACACATCTCTGCCTTGTCCTCTCAGTTTCCCCCCGTGG
CACTTAGAACCACTTGATACACCGAATAGTTTCCTATCTCCCCCACTAGGATGTA
AACTCCACAGGGGCATTGGGAATGCTGCCTGGCTATGGTAGGGACAGAGGGGAG
CACCAGGGCGGGGCAGGGGTGCCAGAGTTCTGCCTGGGCAGTCAGATTTTCCTT
AGGAGGGGACATTTGAGTGGGACCCAAACAGGTGTATAGCAGTTGTCCAGCCCA
GCTGGCAAGGCCTGAGTCTGCCTCTGCAACCCCTCTCTTGGGCTCCTTTCTCTGCC
ACCCACCTCCTCACCTTTCCAGGTCATCACAGTTGGGGCCACCAATGCCCAAGAC
CAGCCGGTGACCCTGGGGACTTTGGGGACCAACTTTGGCCGCTGTGTGGACCTCT
TTGCCCCAGGGGAGGACATCATTGGTGCCTCCAGCGACTGCAGCACCTGCTTTGT
GTCACAGAGTGGGACATCACAGGCTGCTGCCCACGTGGCTGGTAAGTCACCACC
CCACTGCCTCGGCCACCGTGATGCTAACAGCCCCTTTGGCAGTCAGGGTCTGTGC
CGGGACCTCCAGTGCCAGGCTCTGTGCAGGGGGACCAGAGATGAAGTAGGCCTG
ATGGTGCCTTCAAGGACACTCAGTCTGATGAGGGAGGCGAGTGCACAGAGGAAA
CACGAGGTCAGGGCTGTATTAGAGGGAGCCCAGAGGAGGCACCTGCCCAGCCCG
AGGGTCAGAGAAGGCATCTTGGAGGAGGGACATTTGATCGGGAGCTTGATGGAT
GAATAGGAGTTCACCTGGCCGATAAGACAGCAACTACCAAGGCTTAGAGGTGTG
AGAGGAGGCTGTCTTACCTCACTGAGTAAGGACTGCAGGCGGCTTACCTTCGAG
AAGAGAGCTTAGTGTCTGTGTGCACGTGTGTTTGTGTGTATGTGTGTGCGTGTGT
GCACTGGCAGGAGTCCCCTGCTGGGGCAGGAGGGCCGGGCCATCACCATCTTTC
ACCATTCACCCCTGCACCAGGCATTGCAGCCATGATGCTGTCTGCCGAGCCGGAG
CTCACCCTGGCCGAGTTGAGGCAGAGACTGATCCACTTCTCTGCCAAAGATGTCA
TCAATGAGGCCTGGTTCCCTGAGGACCAGCGGGTACTGACCCCCAACCTGGTGG
CCGCCCTGCCCCCCAGCACCCATGGGGCAGGTAAGCAGGATGGCAGGGTGGGCA
AGTCCAGGCTGGGGCTTGGGAGGTCTGTGTGACCTTGACAGTCTCTCCCTTCTCC
CTTGTCTGTGTAAGGAGGATGACGCCACCTTAAATAGGATTAAATGAGAATGGG
GCTCTGAAAGGGCTGTGCAATATTTTCATAACGTGTTTTTATAGAGACAGTTGAG
TATGTTCTTTAAGCCCTCCTCTCTCCTACCATGAACTAAAGATTTCTGTGGAGGTC
CCCTCACTCCCAGCACCCCCTCCTCATCCCAGGCCCTTTTTGCAGGTTGGCAGCTG
TTTTGCAGGACTGTATGGTCAGCACACTCGGGGCCTACACGGATGGCCACAGCC
GTCGCCCGCTGCGCCCCAGATGAGGAGCTGCTGAGCTGCTCCAGTTTCTCCAGGA
GTGGGAAGCGGCGGGGCGAGCGCATGGAGGTGACTGTACCCCTCCTTCGTGTGT
GTGTGTGTGTGTGTGTGTGTGTGTGTGTGTGTGTGTGTGTGTGTGTCAGTGCTGGG
CCCTCAGGGACCCCCAGCAAGCCCCTCCATCCTCCAGACTCCAGCTCTTCTGTAA
GCTTACAGGGCTGGCCAGACCAGGAGTGGGGCACTCCTCACTTCACGCGGCTGG
GGGCTGCTGGAGAGAGCCACAGCGGGAAGGGTTTCCTAGAGGCTGCAGGACAGT
GCTGGATGGATTTTCAATGCTCACCTGGGTGTGAGCGTGCGGCAGGGCCGCGTG
AGGGTCAGCGATCTGCTACTCTGGACTCAGCCATCTCTAGGCCCCTCTCACTCAG
GTGCTCCATGGTTCTGGGAGCTGAGAAATCTCAAACCAGCAAAAAAGTGGAATT
GATGTTGATGCTACAGGATAGTGCACAGATGCCATCTGGTTGCAGCATTTTGGTG
GAAGGGCAGTGCCCAGCTAGGAGAGTGAGGAGGGGCAGGCATTTCTGGCTTGAG
GAGATGGGGTCTTAATGCTCGTGTGAGAGGCAGAGTGGGTGGAGTGGAGCTGGC
TGGATCCTTGCTTTGGCCTCCTGGATTTCTCTCTATCTCCATTTTGAAACCACTCT
GTGTTTGGAAGAACTTTTGAGTATTCAGAGCTGCCCACTGGCAGAACAGTCTTCC
TTGGGCAGGAGTGAGCTCCTTGTCCCCAGAAGGCTGGGTCTGGCTGGCCCCTGGC
AGGGACACTGATGAGGGTGCTTGAGTTGATCCTGTCTAGTCCCTTTCTGTGTTTTC
AAAGCCCATTCTAAAGCAGATTCCCATTTCCGTCTTTGACTCTAAGGCCCAAGGG
GGCAAGCTGGTCTGCCGGGCCCACAACGCTTTTGGGGGTGAGGGTGTCTACGCC
ATTGCCAGGTGCTGCCTGCTACCCCAGGCCAACTGCAGCGTCCACACAGCTCCAC
CAGCTGAGGCCAGCATGGGGACCCGTGTCCACTGCCACCAACAGGGCCACGTCC
TCACAGGTAGGAGGCTGGGCTTGCCCTGGGGTGAGGAGGGGTCTCTTTCTCCTTA
TGCACCCACTGCCCGCGAGGCTTGGTCCTCACAAGTGTGATCCATGAGACTCAAG
CCTGACTTGCAGTTCCATACTCTGGTTCTGCCACTTCCATGCCCTTTGAGCCTGGG
CAGGTGACCTTACTTCTCCTCATCTCAGCTTCCTCCTCCATAAGAGGGAAAAAGG
TATTACCTGCCTCATTGTGTTGCAAGGAGATGGGCAGCATCTAGGGCACTGGCCT
GGAGTATCGCAGGTGCTTTGCCTAAGGTGGTGCAGTCCAGGAGAGGCAGCTCCA
GAGAGAGGCCCCCGGCTGGGGCTGAAAGGAGGGCAGACCTCGGTTTGAATTTCA
CCCTGCCGCTCTATAGCTGTGTGACTTGGGCAAATTACTTAACATCTCTGTATGA
GGAAATGATGAGTGCTAAGCACTTAGCTTAGTGCCGGGACAATATAAATTCTAG
CTATCGTTACTATTGTTTTCATCACCCGTTGCTTTAAAATCCAGCCTCTGGTATAG
GCAACTATTGACGGGCTACCCTGTGTCGAAAACATGCCCAGGCAGGTAGCAGGA
AGTCACAGATGGGGACCTCTTGGGGCATCAAGGGATGGTGCCCTGAGGCTGAGC
TGTTCTGGTTGGGTGGAGCATGAGAGGTCTGGGAAGACAGTGGGACTCCAGCCT
GGAATAAGAGGCTCAGAGTTGATTCTCGTCTGAGCACGTCCAGGGGAACCACTG
AGGGTTTGGGAACAGGAGAGTGAGGGTGAGAACCTGGTTCTGGGCACAGCAGGC
TGGCATGTAGGATGGATGTTCAGGAAAGATGAGCATAGTCAGGTGGCTGGTGCC
CTTGTCCAGGGGAGAGGCTCCGTCAGGTTCAGGGGTCCTGGCTTGGAGGGAAGT
CCGCCATGCTCTAATCACGCTCCCCTTTGGAAGTGCTCAGCCGATGAGCTCACAG
GCACATGTCAGTTTGAAGTCATGGAATCTGACTCCATGAAGCGCACCTCAAAGA
GCACCATTTTGCAGCTAAGGGAACTGCAGGCTGGACATGCTGAGTGGCTGCCCC
GAGCCCTTGCAGCTAGGACATAGAGAATGCTAGTAACCACAACCCTACCATGTT
CAGAGCACATGCCAGGCTCCATGCTGGGGCTTCGCACGTGTCATCTTCACAGTGT
CCCTGTGAGTAGGTGTGGTTTCTCTTTCCATCTTACAAATGAGTAAACAGAGCCT
CAGTGTAGCTAAGTAACCACTATTTTAGGTTTCTTAGCCAATGGGTGTGTCTGAC
TCCTAAGCCCATGGAGGGCATTCTGAGGTGGTTCAGACAGACCCCGGCTTACCCT
TGAACTTCTGCCTGCTGGCTGCATAGGGAGGGGCTGGGGGGAGTTTGAGCATCTC
AGGCCATAGAGCCCCTGCCTCACTGTCTCCATCTCTGGGTGGAAAGATGGTGTTT
TCCCTGAGAAACTAAGGCTCAGAGAGGTTGAATGGCTCTCCCAAGGTCACACAG
CTGGTCAGCTGCAGAGTTGAGAACACAGGAGTCCTGGTGCTCAGGCCAGCATCT
CTTTTTTTCTTTGAGTTGTTTCTAGGTTTCCTAGCTCTTGCCTCAGACCTTAAAGAG
AGAGGGTCTGATGGGGATGGGCACTGGAGACGGAGCATCCCAGCATTTCACATC
TGAGCTGGCTTTCCTCTGCCCCAGGCTGCAGCTCCCACTGGGAGGTGGAGGACCT
TGGCACCCACAAGCCGCCTGTGCTGAGGCCACGAGGTCAGCCCAACCAGTGCGT
GGGCCACAGGGAGGCCAGCATCCACGCTTCCTGCTGCCATGCCCCAGGTCTGGA
ATGCAAAGTCAAGGAGCATGGAATCCCGGCCCCTCAGGAGCAGGTGAAGAGGCC
CGTGAGGCCGGGTGGGTGGGGTGCTGCGTGTCTCTCCTGCACAGCTTTTCTGTGT
CAGTTTGTGCCACCACCATACCGCCATGCATCAGGGTGGCGGTTTGCCAGGTAGA
TGCTGTGGGCAGCTTCCGCCATTGTGTGGACAGCATGTATATGTGTCTCTGTGTG
GCTGGGTCTGTTTTTGCTTTTGTCCAGATCAGTAAGGTTTGCTACCTGGGTACCCC
ACTCCACTTGGAGTAGAATGTGCATAAATATGGCATAAAGAAATGCAATATGCA
TGCATTTATTGATTGATCTATTTTTTTCTGAGATGGGGTCTTGCTGTGTTGCCCAG
GCTGGTCTCAAATTCCTGGGCTCAAGCAATCCTCTGGTCTCAGCCTCCCCAAGTG
TTGGGATTATAGGCATGAGCCGCTGCACCTGGCCTCTCTGATCTATTTAACAAAC
CTGCTGGGAGGGTCTCAGGGTCAGGAGCAGCACTGGGCTCTGAGGACACAGAGC
TCACTCAGCCGTGACCCAGAGGGGGTGCCTGAGCTGCATGCTGAAGGTTGTTAG
CATGACCAGCAAGGCAAGAAAAGGCCCTGCCGAGATTAGCAAGGCATGTGCCAA
GCCCTGGAATGTGACAGCCGGGCCTTCTAGAAACCTGAGTGTATAACTCTCCTTA
AAAGCCAGTAGGAGCTCCTCAAAAGGCAGCCCTAAGGAGTCCACTCTTAAATGA
ACTCAGAGTCAGTTTTAAAATGCAAGTCTGTGTTGATTCTGGTCTGGATGGTGCA
TTCCTCGAGAGCAAAAGACAGTCTTGGTCTTGGATCCACTTGCCCTGGGTACACT
GAGGGCTGCTAGGTTCCAGGTGCTCTTCCTGGCACTGGGGAGGGATACAGGCCC
AAGAGACATGCTGTTCTCCCTCCTGGAGCATCTATTTTAGTGGAGGAAGACAGAA
AACAAACCATTAATATAGAGTACTGAAAAGATGCGATGGAGAAAACTATAGCAA
GGAAGGGAATGGGGTGGGAGAGAGGTCAGGAGAGGTCTCGCTGACAAGGTGGA
CGAAACAGGCCATGAGGCAGAGAACATGTTCCAGGCAAAGCAAAGGCCCCCAG
GTGGGGATGTGCAGGGAGTACCAGGAAACCAGAGAGGTGGGAATAGTTATGAG
ATGGGGGGTGCCTCAGAGGGGACAGGGCCAAGTCAGGTGAGACCTGAGGGTCA
CAGTCAGCAGTGAGCTGGGGCCATGCAGGGGTCTGGCCTCAGAGGAGTGTGGTC
TGGCCTGGATCTGAACCTCTCACTGTGGCCTAGCTGCTGAGCTGAGAAGAGATGA
CAAGGACCTTGGGCAGAAGCAGGGAGACTGGAGGGAGGCGGTGGAGGGTCCAG
GCGTTGGGGCGGGGCTCAGGCTGGAGTCTGAAGGGAGCCTGCAGGCCTGGTGGG
TGGATGTGGGTGGGAGAGGGGGAGGATGGCACCAAGGCTCGGGCCCCTGGACA
GATGGAGTTGCCATTAAGTGGGATGGGGCAGGCTATGGGGCCATCAGTTTCAGA
GGGATGAGTTTGGCACTGGCATGGTAGGCATCTGTCTATCTCCACGGCCCTCAAA
CCAGGCATGAAGCAGGAGCTCACGTGTTTGGTCAGCCATGGTGCAGAACCGCCT
GGGTGGGAGGTGCGGGGTGGGAGATACACGGTTGTGTCCCAAATGGGCTCTGAG
CCAGCGAGGGCCGTCTGCACTTTGGCCTCACAGAAGGATGTCGGAGGGAGAAAT
GAAGTGTGGGTGGGGGTCCCGGGCCACGCTAGACATGTGCTTTCTTTTCCTCGGG
CTCTGGCAGGTGACCGTGGCCTGCGAGGAGGGCTGGACCCTGACTGGCTGCAGT
GCCCTCCCTGGGACCTCCCACGTCCTGGGGGCCTACGCCGTAGACAACACGTGTG
TAGTCAGGAGCCGGGACGTCAGCACTACAGGCAGCACCAGCGAAGGGGCCGTG
ACAGCCGTTGCCATCTGCTGCCGGAGCCGGCACCTGGCGCAGGCCTCCCAGGAG
CTCCAGTGACAGCCCCATCCCAGGATGGGTGTCTGGGGAGGGTCAAGGGCTGGG
GCTGAGCTTTAAAATGGTTCCGACTTGTCCCTCTCTCAGCCCTCCATGGCCTGGC
ACGAGGGGATGGGGATGCTTCCGCCTTTCCGGGGCTGCTGGCCTGGCCCTTGAGT
GGGGCAGCCTCCTTGCCTGGAACTCACTCACTCTGGGTGCCTCCTCCCCAGGTGG
AGGTGCCAGGAAGCTCCCTCCCTCACTGTGGGGCATTTCACCATTCAAACAGGTC
GAGCTGTGCTCGGGTGCTGCCAGCTGCTCCCAATGTGCCGATGTCCGTGGGCAGA
ATGACTTTTATTGAGCTCTTGTTCCGTGCCAGGCATTCAATCCTCAGGTCTCCACC
AAGGAGGCAGGATTCTTCCCATGGATAGGGGAGGGGGCGGTAGGGGCTGCAGG
GACAAACATCGTTGGGGGGTGAGTGTGAAAGGTGCTGATGGCCCTCATCTCCAG
CTAACTGTGGAGAAGCCCCTGGGGGCTCCCTGATTAATGGAGGCTTAGCTTTCTG
GATGGCATCTAGCCAGAGGCTGGAGACAGGTGCGCCCCTGGTGGTCACAGGCTG
TGCCTTGGTTTCCTGAGCCACCTTTACTCTGCTCTATGCCAGGCTGTGCTAGCAAC
ACCCAAAGGTGGCCTGCGGGGAGCCATCACCTAGGACTGACTCGGCAGTGTGCA
GTGGTGCATGCACTGTCTCAGCCAACCCGCTCCACTACCCGGCAGGGTACACATT
CGCACCCCTACTTCACAGAGGAAGAAACCTGGAACCAGAGGGGGCGTGCCTGCC
AAGCTCACACAGCAGGAACTGAGCCAGAAACGCAGATTGGGCTGGCTCTGAAGC
CAAGCCTCTTCTTACTTCACCCGGCTGGGCTCCTCATTTTTACGGGTAACAGTGA
GGCTGGGAAGGGGAACACAGACCAGGAAGCTCGGTGAGTGATGGCAGAACGAT
GCCTGCAGGCATGGAACTTTTTCCGTTATCACCCAGGCCTGATTCACTGGCCTGG
CGGAGATGCTTCTAAGGCATGGTCGGGGGAGAGGGCCAACAACTGTCCCTCCTT
GAGCACCAGCCCCACCCAAGCAAGCAGACATTTATCTTTTGGGTCTGTCCTCTCT
GTTGCCTTTTTACAGCCAACTTTTCTAGACCTGTTTTGCTTTTGTAACTTGAAGAT
ATTTATTCTGGGTTTTGTAGCATTTTTATTAATATGGTGACTTTTTAAAATAAAAA
CAAACAAACGTTGTCCTAAC
Human PCSK9 Amino Acid Sequence (NP_777596.2)
(SEQ ID NO: 6)
MGTVSSRRSWWPLPLLLLLLLLLGPAGARAQEDEDGDYEELVLALRSEEDGLAEAP
EHGTTATFHRCAKDPWRLPGTYVVVLKEETHLSQSERTARRLQAQAARRGYLTKIL
HVFHGLLPGFLVKMSGDLLELALKLPHVDYIEEDSSVFAQSIPWNLERITPPRYRADE
YQPPDGGSLVEVYLLDTSIQSDHREIEGRVMVTDFENVPEEDGTRFHRQASKCDSHG
THLAGVVSGRDAGVAKGASMRSLRVLNCQGKGTVSGTLIGLEFIRKSQLVQPVGPL
VVLLPLAGGYSRVLNAACQRLARAGVVLVTAAGNFRDDACLYSPASAPEVITVGAT
NAQDQPVTLGTLGTNFGRCVDLFAPGEDIIGASSDCSTCFVSQSGTSQAAAHVAGIA
AMMLSAEPELTLAELRQRLIHFSAKDVINEAWFPEDQRVLTPNLVAALPPSTHGAGW
QLFCRTVWSAHSGPTRMATAVARCAPDEELLSCSSFSRSGKRRGERMEAQGGKLVC
RAHNAFGGEGVYAIARCCLLPQANCSVHTAPPAEASMGTRVHCHQQGHVLTGCSSH
WEVEDLGTHKPPVLRPRGQPNQCVGHREASIHASCCHAPGLECKVKEHGIPAPQEQ
VTVACEEGWTLTGCSALPGTSHVLGAYAVDNTCVVRSRDVSTTGSTSEGAVTAVAI
CCRSRHLAQASQELQ

### Apolipoprotein C3 (APOC3)

[0437] In some embodiments, the target gene for modification using the compositions and methods disclosed herein is gene encoding APOC3. The LDL-R mediated cholesterol clearance pathway involves multiple players. Non-limiting examples of protein factors involved in this pathway include: Apolipoprotein C3 (APOC3), LDL receptor (LDL-R), and Increased Degradation of LDL Receptor Protein (IDOL). These protein factors and their respective function are described in the art. Further, loss-of-function variants of these factors have been identified and characterized, and are determined to have cardio protective functions. See, e.g., Jorgensen et al., N Engl J Med 2014; 371:32-41 Jul. 3, 2014; Scholtzl et al, Hum. Mol. Genet. (1999) 8 (11): 2025-2030; De Castro-Oros et al., BMC Medical Genomics, 20147: 17; and Gu et al., J Lipid Res. 2013, 54(12):3345-57, each of which are incorporated herein by reference. Thus, some aspects of the present disclosure provide the generation of loss-of-function variants of APOC3 (e.g., A43T and R19X), LDL-R, and IDOL (e.g., R266X) using the methods and compositions disclosed herein.

[0438] Apolipoprotein C-III (APOC3) is a protein that in humans is encoded by the APOC3 gene. APOC3 is a component of very low density lipoproteins (VLDL). APOC3 inhibits lipoprotein lipase and hepatic lipase. It is also thought to inhibit hepatic uptake of triglyceride-rich particles. An increase in APOC3 levels induces the development of hypertriglyceridemia. Recent evidence suggests an intracellular role for APOC3 in promoting the assembly and secretion of triglyceride-rich VLDL particles from hepatic cells under lipid-rich conditions. However, two naturally occurring point mutations in human apoC3 coding sequence, A23T and K58E have been shown to abolish the intracellular assembly and secretion of triglyceride-rich VLDL particles from hepatic cells.

[0439] Loss-of-function mutations that may be made in APOC3 gene using the methods and compositions described herein are also provided. The strategies to generate loss-of-function mutation are similar to that used for PCSK9 or ANGPTL3 (e.g., premature stop codons, destabilizing mutations, altering splicing, etc.).

[0440] In some embodiments, the gene modification methods and compositions described herein reduces expression of functional APOC3 protein encoded by the APOC3 gene in the cell. In some embodiments, the modification reduces expression of functional APOC3 protein encoded by at least 5%, at least 10%, at least 15%, at least 20%, at least 25%, at least 30%, at least 35%, at least 40%, at least 45%, at least 50%, at least 55%, at least 60%, at least 65%, at least 70%, at least 75%, at least 80%, at least 85%, at least 90%, at least 95%, at least 97%, at least 98%, at least 99%, at least 99.5%, at least 99.9%, or 100%. In some embodiments, the modification reduces expression of functional ANGPTL3 protein encoded by the APOC3 or ANGPTL3 gene in the cell by at least 2 fold, at least 3 fold, at least 4 fold, at least 5 fold, at least 10 fold, at least 20 fold, at least 25 fold, at least 30 fold, at least 40 fold, at least 50 fold, at least 60 fold, at least 70 fold, at least 80 fold, at least 90 fold, at least 100 fold, at least 200 fold, at least 300 fold, at least 400 fold, at least 500 fold, at least 600 fold, at least 700 fold, at least 800 fold, at least 900 fold, at least 1000 fold, at least 2000 fold, at least 3000 fold, at least 4000 fold, at least 5000 fold, at least 6000 fold, at least 7000 fold, at least 8000 fold, at least 9000 fold, or at least 10000 fold. In some embodiments, the modification abolishes expression of functional APOC3 protein encoded by the APOC3 gene in the cell.

[0441] The protein sequence of human APOC3 can be found, for example, at Deposit No. NP_000031.1, which reference is incorporated herein in its entirety. Human nucleic acid sequences can be found at e.g., GenBank Accession Nos.: NG_008949.1, which sequence is incorporated herein in its entirety. Mouse, rat and monkey APOC3 nucleic acid sequences have been deposited; see, e.g., Ensembl accession number ENSMUSG00000032081, ENSRNOGO00000047503, and ENSMFAG00000001837 respectively, each of which sequences is incorporated herein in its entirety.

[0442] The polypeptide and coding nucleic acid sequences of APOC3 and of other members of the family of human origin and those of a number of animals are publicly available, e.g., from the NCBI website or ENSEMBL website. Examples include, but are not limited to the following sequences, each of which sequences are incorporated herein in their entireties;

NG_008949.1:5000-8165 Homo sapiens
apolipoprotein C3 (APOC3), RefSeqGene
on chromosome 11
(SEQ ID NO: 62)
CTGCTCAGTTCATCCCTAGAGGCAGCTGCTCCAGGTAATGCCCTCTGGGG
AGGGGAAAGAGGAGGGGAGGAGGATGAAGAGGGGCAAGAGGAGCTCCCTG
CCCAGCCCAGCCAGCAAGCCTGGAGAAGCACTTGCTAGAGCTAAGGAAGC
CTCGGAGCTGGACGGGTGCCCCCCACCCCTCATCATAACCTGAAGAACAT
GGAGGCCCGGGAGGGGTGTCACTTGCCCAAAGCTACACAGGGGGTGGGGC
TGGAAGTGGCTCCAAGTGCAGGTTCCCCCCTCATTCTTCAGGCTTAGGGC
TGGAGGAAGCCTTAGACAGCCCAGTCCTACCCCAGACAGGGAAACTGAGG
CCTGGAGAGGGCCAGAAATCACCCAAAGACACACAGCATGTTGGCTGGAC
TGGACGGAGATCAGTCCAGACCGCAGGTGCCTTGATGTTCAGTCTGGTGG
GTTTTCTGCTCCATCCCACCCACCTCCCTTTGGGCCTCGATCCCTCGCCC
CTCACCAGTCCCCCTTCTGAGAGCCCGTATTAGCAGGGAGCCGGCCCCTA
CTCCTTCTGGCAGACCCAGCTAAGGTTCTACCTTAGGGGCCACGCCACCT
CCCCAGGGAGGGGTCCAGAGGCATGGGGACCTGGGGTGCCCCTCACAGGA
CACTTCCTTGCAGGAACAGAGGTGCCATGCAGCCCCGGGTACTCCTTGTT
GTTGCCCTCCTGGCGCTCCTGGCCTCTGCCCGTAAGCACTTGGTGGGACT
GGGCTGGGGGCAGGGTGGAGGCAACTTGGGGATCCCAGTCCCAATGGGTG
GTCAAGCAGGAGCCCAGGGCTCGTCCAGAGGCCGATCCACCCCACTCAGC
CCTGCTCTTTCCTCAGGAGCTTCAGAGGCCGAGGATGCCTCCCTTCTCAG
CTTCATGCAGGGTTACATGAAGCACGCCACCAAGACCGCCAAGGATGCAC
TGAGCAGCGTGCAGGAGTCCCAGGTGGCCCAGCAGGCCAGGTACACCCGC
TGGCCTCCCTCCCCATCCCCCCTGCCAGCTGCCTCCATTCCCACCCGCCC
CTGCCCTGGTGAGATCCCAACAATGGAATGGAGGTGCTCCAGCCTCCCCT
GGGCCTGTGCCTCTTCAGCCTCCTCTTTCCTCACAGGGCCTTTGTCAGGC
TGCTGCGGGAGAGATGACAGAGTTGAGACTGCATTCCTCCCAGGTCCCTC
CTTTCTCCCCGGAGCAGTCCTAGGGCGTGCCGTTTTAGCCCTCATTTCCA
TTTTCCTTTCCTTTCCCTTTCTTTCTCTTTCTATTTCTTTCTTTCTTTCT
TTCTTTCTTTCTTTCTTTCTTTCTTTCTTTCTTTCTTTCTTTCTTTCTTT
CCTTTCTTTCTTTCCTTTCTTTCTTTCCTTTCTTTCTTTCTTTCCTTTCT
TTCTCTTTCTTTCTTTCTTTCCTTTTTCTTTCTTTCCCTCTCTTCCTTTC
TCTCTTTCTTTCTTCTTCTTTTTTTTTTAATGGAGTCTCCCTCTGTCACC
TAGGCTGGAGTGCAGTGGTGCCATCTCGGCTCACTGCAACCTCCGTCTCC
CGGGTTCAACCCATTCTCCTGCCTCAGCCTCCCAAGTAGCTGGGATTACA
GGCACGCGCCACCACACCCAGCTAATTTTTGTATTTTTAGCAGAGATGGG
GTTTCACCATGTTGGCCAGGTTGGTCTTGAATTCCTGACCTCAGGGGATC
CTCCTGCCTCGGCCTCCCAAAGTGCTGGGATTACAGGCATGAGCCACTGC
GCCTGGCCCCATTTTCCTTTTCTGAAGGTCTGGCTAGAGCAGTGGTCCTC
AGCCTTTTTGGCACCAGGGACCAGTTTTGTGGTGGACAATTTTTCCATGG
GCCAGCGGGGATGGTTTTGGGATGAAGCTGTTCCACCTCAGATCATCAGG
CATTAGATTCTCATAAGGAGCCCTCCACCTAGATCCCTGGCATGTGCAGT
TCACAATAGGGTTCACACTCCTATGAGAATGTAAGGCCACTTGATCTGAC
AGGAGGCGGAGCTCAGGCGGTATTGCTCACTCACCCACCACTCACTTCGT
GCTGTGCAGCCCGGCTCCTAACAGTCCATGGACCAGTACCTATCTATGAC
TTGGGGGTTGGGGACCCCTGGGCTAGGGGTTTGCCTTGGGAGGCCCCACC
TGACCCAATTCAAGCCCGTGAGTGCTTCTGCTTTGTTCTAAGACCTGGGG
CCAGTGTGAGCAGAAGTGTGTCCTTCCTCTCCCATCCTGCCCCTGCCCAT
CAGTACTCTCCTCTCCCCTACTCCCTTCTCCACCTCACCCTGACTGGCAT
TAGCTGGCATAGCAGAGGTGTTCATAAACATTCTTAGTCCCCAGAACCGG
CTTTGGGGTAGGTGTTATTTTCTCACTTTGCAGATGAGAAAATTGAGGCT
CAGAGCGATTAGGTGACCTGCCCCAGATCACACAACTAATCAATCCTCCA
ATGACTTTCCAAATGAGAGGCTGCCTCCCTCTGTCCTACCCTGCTCAGAG
CCACCAGGTTGTGCAACTCCAGGCGGTGCTGTTTGCACAGAAAACAATGA
CAGCCTTGACCTTTCACATCTCCCCACCCTGTCACTTTGTGCCTCAGGCC
CAGGGGCATAAACATCTGAGGTGACCTGGAGATGGCAGGGTTTGACTTGT
GCTGGGGTTCCTGCAAGGATATCTCTTCTCCCAGGGTGGCAGCTGTGGGG
GATTCCTGCCTGAGGTCTCAGGGCTGTCGTCCAGTGAAGTTGAGAGGGTG
GTGTGGTCCTGACTGGTGTCGTCCAGTGGGGACATGGGTGTGGGTCCCAT
GGTTGCCTACAGAGGAGTTCTCATGCCCTGCTCTGTTGCTTCCCCTGACT
GATTTAGGGGCTGGGTGACCGATGGCTTCAGTTCCCTGAAAGACTACTGG
AGCACCGTTAAGGACAAGTTCTCTGAGTTCTGGGATTTGGACCCTGAGGT
CAGACCAACTTCAGCCGTGGCTGCCTGAGACCTCAATACCCCAAGTCCAC
CTGCCTATCCATCCTGCGAGCTCCTTGGGTCCTGCAATCTCCAGGGCTGC
CCCTGTAGGTTGCTTAAAAGGGACAGTATTCTCAGTGCTCTCCTACCCCA
CCTCATGCCTGGCCCCCCTCCAGGCATGCTGGCCTCCCAATAAAGCTGGA
CAAGAAGCTGCTATGA
NP_000031.1 Human apolipoprotein C-III
precursor
(SEQ ID NO: 63)
MQPRVLLVVALLALLASARASEAEDASLLSFMQGYMKHATKTAKDALSSV
QESQVAQQARGWVTDGFSSLKDYWSTVKDKFSEFWDLDPEVRPTSAVAA

### Angiopoietin-Like 3 (ANGPTL3)

[0443] In some embodiments, the target gene for modification using the compositions and methods disclosed herein is gene encoding ANGPTL3. ANGPTL3 has been associated with diseases and disorders such as, but not limited to, Arteriosclerosis, Atherosclerosis, Cardiovascular Diseases, Coronary heart disease, Diabetes, Diabetes Mellitus, Non-Insulin-Dependent Diabetes Mellitus, Fatty Liver, Hyperinsulinism, Hyperlipidemia, Hypertriglyceridemia, Hypobetalipoproteinemias, Inflammation, Insulin Resistance, Metabolic Diseases, Obesity, Malignant neoplasm of mouth, Lipid Metabolism Disorders, Lip and Oral Cavity Carcinoma, Dyslipidemias, Metabolic Syndrome X, Hypotriglyceridemia, Opitz trigonocephaly syndrome, Ischemic stroke, Hypertriglyceridemia result, Hypobetalipoproteinemia Familial 2, Familial hypobetalipoproteinemia, and Ischemic Cerebrovascular Accident. Editing the ANGPTL3 gene using any of the methods described herein may be used to treat, prevent and/or mitigate the symptoms of the diseases and disorders described herein.

[0444] The ANGPTL3 gene encodes the Angiopoietin-Like 3 protein, which is a determinant factor of high density lipoprotein (HDL) level in human. It positively correlates with plasma triglyceride and HDL cholesterol. The activity of ANGPTL3 is expressed predominantly in the liver. ANGPTL3 is associated with Dyslipidemias. Dyslipidemias is a genetic disease characterized by elevated level of lipids in the blood that contributes to the development of clogged arteries (atherosclerosis). These lipids include plasma cholesterol, triglycerides, or high-density lipoprotein. Dyslipidemia increases the risk of heart attacks, stroke, or other circulatory concerns. Current management includes lifestyle changes such as exercise and dietary modifications as well as use of lipid-lowering drugs such as statins. Non-statin lipid-lowering drugs include bile acid sequestrants, cholesterol absorption inhibitors, drugs for homozygous familial hypercholesteremia, fibrates, nicotinic acid, omega-3 fatty acids and/or combination products. Treatment options usually depend on the specific lipid abnormality, although different lipid abnormalities often coexist. Treatment of children is more challenging as dietary changes may be difficult to implement and lipid-lowering therapies have not been proven effective.

[0445] ANGPTL3 is also known to cause hypobetalipoproteinemia.

Hypobetalipoproteinemia is an inherited disease (autosomal recessive) that affects between 1 in 1000 and 1 in 3000 people worldwide. Common symptoms of hypobetalipoproteinemia include plasma levels of LDL cholesterol or apolipoprotein B below the 5th percentile which impairs the body's ability to absorb and transport fats and can lead to retinal degeneration, neuropathy, coagulopathy, or abnormal buildup of fats in the liver called hepatic steatosis. In severely affected patients, hepatic steatosis may progress to chronic liver disease (cirrhosis). Current treatment of hypobetalipoproteinemia includes severe restriction of long-chain fatty acids to 15 grams per day to improve fat absorption. In infants with hypobetalipoproteinemia, brief supplementation with medium-chain triglycerides may be effective but amount must be closely monitored to avoid liver toxicity. Another option for treating hypobetalipoproteinemia is administration high doses of vitamin E to prevent neurologic complications. Alternatively, vitamin A (10,000-25,000 IU/d) supplementation may be effective if an elevated prothrombin time suggests vitamin K depletion.

[0446] In one example, the target tissue for the compositions and methods described herein is liver tissue. In one example, the gene is ANGPTL3 which may also be referred to as Angiopoietin 5, ANGPT5, ANG-5, Angiopoietin-Like Protein 3, Angiopoietin-5, FHBL2, and ANL3. ANGPTL3 has a cytogenetic location of lp31.3 and the genomic coordinate are on Chromosome 1 on the forward strand at position 62,597,487-62,606,159.

[0447] Loss-of-function mutations that may be made in ANGPTL3 gene using the methods and compositions described herein are also provided. The strategies to generate loss-of-function mutation are similar to that used for PCSK9 (e.g., include, but are not limited to premature stop codons, destabilizing mutations, altering splicing, etc.).

[0448] In some embodiments, the modification reduces expression of functional ANGPTL3 protein encoded by the ANGPTL3 gene in the cell. In some embodiments, the modification reduces expression of functional ANGPTL3 protein encoded by at least 5%, at least 10%, at least 15%, at least 20%, at least 25%, at least 30%, at least 35%, at least 40%, at least 45%, at least 50%, at least 55%, at least 60%, at least 65%, at least 70%, at least 75%, at least 80%, at least 85%, at least 90%, at least 95%, at least 97%, at least 98%, at least 99%, at least 99.5%, at least 99.9%, or 100%. In some embodiments, the modification reduces expression of functional ANGPTL3 protein encoded by the ANGPTL3 gene in the cell by at least 2 fold, at least 3 fold, at least 4 fold, at least 5 fold, at least 10 fold, at least 20 fold, at least 25 fold, at least 30 fold, at least 40 fold, at least 50 fold, at least 60 fold, at least 70 fold, at least 80 fold, at least 90 fold, at least 100 fold, at least 200 fold, at least 300 fold, at least 400 fold, at least 500 fold, at least 600 fold, at least 700 fold, at least 800 fold, at least 900 fold, at least 1000 fold, at least 2000 fold, at least 3000 fold, at least 4000 fold, at least 5000 fold, at least 6000 fold, at least 7000 fold, at least 8000 fold, at least 9000 fold, or at least 10000 fold. In some embodiments, the modification abolishes expression of functional ANGPTL3 protein encoded by the ANGPTL3 gene in the cell.

[0449] In some embodiments, a splice site disruption generated by a base editor system disclosed herein can result in the inclusion of intronic sequences in messenger RNA (mRNA) encoded by the ANGPTL3 gene. In some embodiments, the splice site disruption generates a nonsense, frameshift, or an in-frame indel mutation that result in premature stop codons or in insertion/deletion of amino acids that disrupt protein activity. In some embodiments, the splice site disruption generates exclusion of exonic sequences. In some embodiments, the splice site disruption generates exclusion of exonic sequences that results in nonsense, frameshift, or in-frame indel mutations in the ANGPTL3 transcript. Canonical splice donors comprise the DNA sequence GT on the sense strand, whereas canonical splice acceptors comprise the DNA sequence AG. Alteration of the sequence disrupts normal splicing. Splice donors can be disrupted by adenine base editing of the complementary base in the second position in the antisense strand (GT to GC), and splice acceptors can be disrupted by adenine base editing of the first position in the sense strand (AG to GG).

[0450] In some embodiments, a base editor system provided herein effects an A•T to G•C alteration in a ANGPTL3 gene when contacted with the ANGPTL3 gene. In some embodiments, the A•T to G•C alteration is at a splice donor site of the ANGPTL3 gene. In some embodiments, the A•T to G•C alteration is at a splice acceptor site of the ANTPTL3 gene. In some embodiments, the A•T to G•C alteration results in an aberrant ANGPTL3 transcript encoded by the ANGPTL3 gene. In some embodiments, the A•T to G•C alteration results in a non-functional ANGPTL3 polypeptide encoded by the ANGPTL3 gene. In some embodiments, the A•T to G•C alteration is at a 5′ end of a splice donor site of an intron 6 of the ANGPLT3 gene.

[0451] The nucleotide sequence of human ANGPTL3 is provided, for example, in NG_028169.1, which is incorporated herein in its entirety. The protein sequence of human ANGPTL3 is provided, for example, AAD34156.1, which is incorporated herein in its entirety.

[0452] Mouse, rat, and monkey ANGPTL3 nucleic acid sequences have been deposited; see, e.g., Ensembl accession number ENSMUSG00000028553, ENSRNOG00000008638, and ENSMFAG00000007083 respectively, each of which sequences are incorporated herein its entirety.

[0453] The polypeptide and coding nucleic acid sequences of ANGPTL3 and of other members of the family of human origin and those of a number of animals are publicly available, e.g., from the NCBI website or ENSEMBL website. Examples include, but are not limited to the following sequences, each of which sequences are incorporated herein in their entireties;

NG_028169.1 Human angiopoietin like 3 (ANGPTL3),
RefSeqGene on chromosome 1
(SEQ ID NO: 7)
AATGACAAACTGAAAAAATCTATTGTTTGTTATATATATAACAAAGAATTAGTATCCACAATA
TGTAAATAATTCCTAAAATTAGTCAGAAAGAGACAAACTTAAAAAGAGGGTAACAAGGAGGGG
AGCAAATTATGTACATAACCAGATGATTCGCAAAGACGGCAACAGAGATGGCCAGCAAAACAA
ACTAGATATATACTTGTCTATTAGATTTATCAACATTTTTTGCCTTTTTCATTAAAAGCATTT
GTAAAAGGATATAGGAAAAGAGGAACTCTCATATACTCCTGGCAGGGATGTAAATTGGTACAA
CCCTTTTGAAGGACAATCTGACAAAAGCAATCGTAAGTTACAAGTCAACATCTATGAATGTAT
ATGAAAATATTTATATACATACATCACCACCATAAAAGCATTTTCTATACATACTGTTTATAA
TTAGAAAATTGGAAACAAATGATTAAAAGGGGGCTGATTAAATTAAGGTTCATCTATATAACA
GGATTATGCAGCTATTAAAAAGGACGTGGTAACTCTATAGACATTCATAGGAAAATAAATTTT
AAAATACTAAGATCCTGAATGATATATATATCATGAGCTATTATACATAACAAGATCCCACTT
GTGTTATAAAAAATTATGTTTAGTCATTCAAAGGGTCTGGTATGATAGACCCAAAATGTTAAT
AGAGTCGAGATTTTTATTTTTTATAGGTTTTTGAAATACCTGAATTTTCACAATAAGTACTTT
GCACATTAAAAATCTTAGCTGGGCATGGTGGCTCACGCTTGTAATCCCAGCACTCTGGGAGGC
CAAGGTAGGCAGATCACCTGAGGTCAGGAGTTCGAGACCAGTCTGGCCAACATGGTGAAACCC
CGTCTCTACTAAAAATACAAAAATTAGCCAGGCTTGGTTGGGGGTGCCTGTAATTCCAGATAC
TCGGGAAGCTGAGACAGGAGAATCGCTTGAACCCAGGAGGGGGAAGTTGCAGTGAGCTGAGAT
CACGACGCTGCACTCCAGCCTGGGCAACAAAGAGCAAAACTCCGTCTCAAAAATAAATAAAGA
AAAAATCTTTACATGTCCAAAGATACGGCTGTTCAACTAAAAAATATATATGTATAAAACTTA
ACATGTTAATAGTGAACACACAAAACAGTAAGATAGATAAAATTATTCCTTCAAAGCTCACTT
AACCTCTGGATCTACACTGTCCAAAAAGACGGTCTAATGAGACAATTGAGCACTTGATAGGTG
AGTGGTTCTAACTGAGATATGTTCTCAGTATAAAACATACAATAGGATCTTCCTATACAACAT
TAATTAAAAAACAAACTATTGTAGTTAAAAAGGAAAAAATTAGAGATACTATGTAAAAAAGAG
CCAAAATACCTTGTATTTTATTTGAAAGACATATCTCCATAAGATTACACAACCTCGTGTAGG
ATAAAGGACTTTGCTTTGCTTGGAATTTAAACAATTTAGGCTCTTAAATGTCCTAAAATTCTC
TGTAGCTAAGAAATTTTTATATTGGTTCCTAGGAACTAGGAATCCTTAAATTAGGCCCTACAT
TTGCTTACAAGTTTATTTTCCTTGGCATAAAATTTTTTAGTTTTTACATTACTGGTTATATTT
GATCAGGGTTCTATTTAAATAGGCACAAGTTCAAGCAAAGATCAGATTCTGCTTTTAGCAGTG
TGTACTCAGACAGGAAGTATTAAAAGGCAGGCAGAAAATCCTTTATAAAATTACTACTTTCAA
TGCATTTTCCCACGTTGAAATGCTTCTGCAGTTTATAATTAGGCAAATTACTTTAATTATAAT
CAATAATGCTGTTCAAATTACTATAAGAATTATACAGATATTTATACCAAGAGACAATATACT
AGAAACCAAGACTACGTGACCATTACCTCTACTCTGTCAGTGTTATTTGTGAGAAATTGCACA
AATTTTGCAAAAAGTGTTAGTATCCTACTACAGTAGGATATAATATAGAAGGAAATAATTTCA
TAAAGCCTGTCTTTGGTACTAGTGCTCAGTTACTTTCATTAACTAAAAAAGGGGCTACTCTTC
AAATTCCCTTCTCTAAAAAGAATGTACTATATCAAAAGGGGGTAAACACTACTACGTATACAT
TCTGCACTTAGAAATCCCTATATGTTGATTTTATCATTCTCTTATTCAATAAATATTGTTTCT
ACAATGTGTAAGGCATTACTGTACTAAAGCATTATAAGGAATATAAGTTAAAAACACATACAA
ATCTTGCCAATCAACAGCTTATAGTGTAATAGGGGAGAGAAGCTGGCCCATCTATATTCTCCC
TCAACTAGCAAGTGGATGAAATATCAGGGTCAATAGTTATAAGCCACAAAAGCTGACAGCTTA
ATTAAGAGAAGTTTTGAAATATGTATTTCATGACCAATAATTACAACTGTAACTTTTCTATTT
AAAGAAGGAGAAAATTTGAATTTCTTCTCTAGCTCAACATACACTTCTATAATTCCATTACAT
GAACCAGAGTAAAGGGTAAGATGGAAATGAAGAATATTTTCTTACCCTTTTGTGGTTCTATAT
TGGACACTTAAAAATCATACACAACCTAATCAAAAGATGTAATTCTTTAAAAAGGTACGAGAC
CAAAATTCAGAAAATCTAGACTATAACAAAATTTCTCAATTTACATTATCTTAATATGCAATT
AATTTTCACCAGTAAAATACTATAGTATGGGTACAAATGCATTGATTAGTTCTAATTACAAAA
ATGGCTAATATATAATACTGTGTAGTGTTTATGATACATCAGATAATGTTCTAAGTGCTCTGA
AAATATAAACTTTTAATCTTTTATACGACCCTATAAAATAGGTGTTATTCTCACTGGAGAGAT
GAGAAAACAGGGGTTCAGAGATGTGAAGTAATTTGACCAAAGGTCACAAAGCTGAAGAATATG
AAATCCGGGATTCTGATTCAGGCAGTCTTATTCCAGAATCATGCTCTTAACCACTATGGAATA
CTGCCTCTACTGTAACTATTATACCCAAAACCCTTAATCCTAAGTCATCAAAAGGAAGAGCCT
CTATTTTACACAATGAAGAGGCATTTCTAAGAATAGAAATTTAGGGACGAGCACAGTGGCTTA
CTCCTTTAATATCAGCACTTTGAGAGGCTGATATGGGAGGTTCACTTGAAGTCAGGAGTTCAA
GGTCAGCTTGGGCAACATAGTGAAACACAGTCTCTACAAAATATTTAAAAATTAGCTGGGTGT
GGTGGCATGCATCTATAGTCTCAGCTACTTGGGAGACAGAGGGAGGAGGCTTGCTCGAGCCCA
GGAGTTCGTGGCTATAGTGAGCTATGATCATGCCACTGCACTCCAGCCTGGACAACAGAGCAA
GACCCTGTCTCTAAAAAAGAAAAGAAATTTGGAAATGGTTTATTTTGTATTAACAATTTATAA
TTTACACTGAAATTTATTATGATAAAACTTTTCCCTGTGTTAAAAAGCTATTAACTTTATGAA
AAATTTCTTTTAGGTAAGGTTGATTATATATACCCACACACATACACAGGTTAAAAGTTAGTT
TCATGTGACATAATAACTAGCATTTTGAGCACTACCTGTTTGCCCAGCACTGTTCTAAGTGCT
CTACATGTATTATTGTTAAATTATCATAACACTATGAATTATGTACTATAATTACCCCAGCTT
TACAGATGAGGAGACTAATCCATGGGGAGGTTAAGTAACTTGTCCAAGGCCAGACAGCTAGAG
CCGGCTTTTGGACCCACACCACAGTCTGACTCCAGCACCCATATTCTTAACAATTTCACCATA
TTAATATGTCAAGATTAAGCAGTTTTAAAGGATGCTATTTTCTCACAAATTTCTTAATATGAA
CACTCAATAAGAATAATCACTAATATAAGCATTTAGTATTTTTTTAACACTAAGTTGGAAGCA
TAGTGGAACATTTATTTTTAGAAATATTATTAATTGGCTGGGCTCACGCTTGTAATCGGCTGG
GCTCATGCCTGTAAATTTTGGGAGGCCAAGGTAAAAGAATTGCTTGAGCCCAGTATTTCCAGA
CCAGCATGGGCAATACATTAAGACATCATCTTTAAAAAAAAAATGTTATTAATCTCCTCTTTT
TGTTAAATGTATATTATCAAAATTGTTACTAAGCTAACAAACTTCAGAAAAACTTATGATGGG
CAAGCTGCTTGTGACATTGAAGGTATTTAAGATTCAATTCTAGTTTGGTCCTAGATGACCACA
TATCCATTGTTCCTTCAACGAGCACATGGTAAAGAGCCTAGAACACAGAGACACAGAACACAG
TGGAGAAAAGGGAGTGAAATGTCTTTAATGACACTTACTATATATGGGATTTTGTGACAATAT
ACAAGGATGGTTAAGACATATAAGGTGATGCAAAAAAACATATTAACAATTATAGTGACAAAA
AATGAGGAGCATATAATTATACATTGATTTATACAGAGTACCAGAGGAACACAGCATTGAGAG
CCGTAACACCACCTGAGGGAGTGGAGAAAGGCTTCAGAGAGAAAGTGTTTTTTGGAATGGATC
ACTGTTTCCAAAAGAACTAAAGTACAGTTTGAGAAATGCATACTTAATTCATTACTTTTTTCC
CCTCAACTTTAATAATAAATTTACCCAACAAAAAAGTTTATTTTTGACTTGTAAATCTCTTAA
AATCATAAAAAAGTAAAATTAGCTTTTAAAAACAGGTAGTCACCATAGCATTGAATGTGTAGT
TTATAATACAGCAAAGTTAAATACAATTTCAAATTACCTATTAAGTTAGTTGCTCATTTCTTT
GATTTCATTTAGCATTGATCTAACTCAATGTGGAAGAAGGTTACATTCGTGCAAGTTAACACG
GCTTAATGATTAACTATGTTCACCTACCAACCTTACCTTTTCTGGGCAAATATTGGTATATAT
AGAGTTAAGAAGTCTAGGTCTGCTTCCAGAAGAAAACAGTTCCACGTTGCTTGAAATTGAAAA
TCAAGATAAAAATGTTCACAATTAAGCTCCTTCTTTTTATTGTTCCTCTAGTTATTTCCTCCA
GAATTGATCAAGACAATTCATCATTTGATTCTCTATCTCCAGAGCCAAAATCAAGATTTGCTA
TGTTAGACGATGTAAAAATTTTAGCCAATGGCCTCCTTCAGTTGGGACATGGTCTTAAAGACT
TTGTCCATAAGACGAAGGGCCAAATTAATGACATATTTCAAAAACTCAACATATTTGATCAGT
CTTTTTATGATCTATCGCTGCAAACCAGTGAAATCAAAGAAGAAGAAAAGGAACTGAGAAGAA
CTACATATAAACTACAAGTCAAAAATGAAGAGGTAAAGAATATGTCACTTGAACTCAACTCAA
AACTTGAAAGCCTCCTAGAAGAAAAAATTCTACTTCAACAAAAAGTGAAATATTTAGAAGAGC
AACTAACTAACTTAATTCAAAATCAACCTGAAACTCCAGAACACCCAGAAGTAACTTCACTTA
AAGTAAGTAGAAAATAAAGAGGGTTCATGTTTATGTTTTCAATGTGGATCTTTTAAAAAAAAT
ATTTCTAAGGCATGCCATTTGAAATACTTTGTTGCATTGTTGAAATACTTTTTTTTCCAAGAA
AAATAATCTCCAGAAAATAAAATTTCCTATTATAATTTCAAGTTAGTTTTTTGTTTCCCTAAT
GTTATATATGAAAACACTGAAAATTTGCATTTTATATGAAAATTACAAATCGGTTAAATTATA
CAATCTAGAACACTATGTCATTACACTATTGTAAATTACTGAAGGTAAGTAAAAAGTTAAAAA
AAATTTAAAACTATTCTCCAGTGTTTAAAACAGATTAAATAATACAGTAAATGGAAAAGATTT
ATTCATATGAAAATATGCTGGGCTTTTTCTTTTAATTGAAGTTCAGAAAATCAAATTTTAGAG
ATAGTACAATTTAAATAAAATGTTAAGGACAAAAATATGTGCTATTTGAAAGAAGCATACAAG
GGGAAGGAATTGCCAATATTCATTTTTCAAATCCATTATTAGTTTAAAAATTTAGATTATGAT
AGTGTTACAGGAAATTAATAGAAAAGAAAGAGGAAAGCAACTTATAACCAACCTACTCTCTAT
ATCCAGACTTTTGTAGAAAAACAAGATAATAGCATCAAAGACCTTCTCCAGACCGTGGAAGAC
CAATATAAACAATTAAACCAACAGCATAGTCAAATAAAAGAAATAGAAAATCAGGTAAGTCAG
TATTTTAATGGTATGTCCCATCTTTCACACAGGTCTGTAAAAACACTGAATCCTAAAATTATT
TACAAGCTTTAACTGGATCATGAGTAAAATTATCACATCAGCATAACTGTTAAAATTGCAGGC
TCTGAAGCTAATAAACTACCTGCATTTAAACCATGGCTCTAAAACTTTGTGTGACCTTGAATA
AATTACTTCACCCCTTTATCTCTCAGTTTCCTCACATATACTACAAAGATAATAACAGAACTT
ATAGGATTATTGTAAGAAAAAAAATTAATTCATAGCAGCCAATGTCATCTTACTAAAATTCAA
ATTAGATCATGTTTCTCTTTGCTCAAAACCACACAATAGCTTTCCATTTCACTCATATTGGCT
CTTTAGACCAAGATTACCCAACCCTTCGTCATCTCACTGACTTCACCTCCTCTACTCTAGTTA
TTCTGACCGCTTTACCAGTATTCAAACACATCAAACATACTGCCACCTCAAAGCCTTTGCCCT
TGTTGTTTCCTCTAACTGGAACGCTCTTCTGCCCTGGTATCTACGTGGCCCACTCTCTGATTT
CCCTTAGGGTCGTTATCAAACAAAAAATTCCCAATGAAGACTTACAAGGTCACTTAACCAAAA
ATCACAACCGCCTGGTCCCATCCCTGAAAACTTCTACTTCCTTAGCTACTTTTCTCCTGCACA
CTCACCTTTATTTAACATAACATAAATTTTAGTTATTTATCTCTTCTATTCCTGCACTAAAAT
GTAAGCTCTGTGAATACAGGGATTTTTTCCATTATCTTCATATTTTCCATTATTTGTATATAC
TCCAGAATATAGAATACTGTATGGCACACAGTAGGCATTTCTGTTGAATTAATAAATGTAATG
TCATATTCACACAGAAGCGTGTGCTATGATTATTATTACTTGGATTACTAGAAATAGTGTGCC
TCATAATTAAAGGTCAACATTCAACAATGTAATTAATCTACAATGTAAACATCTGGTGAAGTG
ACAGAGGGAAGCACTTGTTTAGAAAAAAGCTATGTCAGAATCCATGTATTCTAATATGCAGTA
CAATAGTTTAAAAATATTAATAATACTCTCAAACAGCTATTCAAGAGGATTCAAAAAACATAA
TATAAACTCAGAGAAACTGGTAAACAAAATCATTTTCAAGAGATATAAAACAAATATTATTAC
CAATTTCCACTAAACAAACATAATGTTAGTAGTGCTGCTAAAAGGTTTTTTATCAACTACTTT
TGGTTTCCATACTTTCCTTCTTATGATGTTATTATTCTAAATTCTTTTCAATTATATCTTTTA
CTATGATTAAATGAACCTGCTCCCCAAAGCAAAATGTTACTATAGTAATATACATTGTGTCTA
AAAATAAAAATGTGTGAAGAAACCAAAACAATGAATTTCTGAGTTGGAAGAAGAGTTAGATCA
TTTAACTTTCTCATATTTAAATTAAAAAAACAAAACTCTAAAAATTTAAGTAACTTTAAGATC
ACATAGTTACTTAGTAGAAAAGAGTAATACCCAGCAAGCAAACTTTACAATAGATCCTTTTAA
ATAAGGTCCTAGGAAATATCATTCATGCCAGCATCAAAAAACTAACACTAATAATGCAAGATA
TTATATATTCTGCTTTTCTTACTGTCAATGAGAAAAACTATCATTCAATAAATTGCAAACCCA
ACACACTTAAATAAAAATAAAATGTTACTGCTAAACTAACGATAAACTACTGAATATATAGAA
AGTAAGCAAACAAACTTGCCAACCTGCCAACATCTACAGATATGTTTACAGGTCAAAAATTAT
CAAATTATCAAGAAAGCCTGGTTCAAATTATGTATTATGTCTTTATCACAGGTCTGAAGATCA
GTAAGACCTAAAACTGAAAATTATTAAACTTAAAATCTGAACAGAATATCAAATATATTTTAT
TCATATAAATAAAAGAATACATTACAATATTCTAAGCAAAGCAGTCTCTACTTTTGGCCTTGC
TCTGTTTTCCGACCAATGTCTGCTTTTTTGCCTTGCTTTATTTTTTTATCTTATTAAATAATG
TCCCTGATTAAATATTTTGAGAACAGGTAATCTGTACAATCTGAATAACACTGTTTATCTAAA
TATCAAACACCGTTATAACATTATGAACTGAAAGACAAACTGTACTTCTGACATCCTTACTCA
GATTTCCCCTAATTGTATATTCAGTATCATTTTAAAAAACAGATTTATATTCTTTTATCAGCT
CAGAAGGACTAGTATTCAAGAACCCACAGAAATTTCTCTATCTTCCAAGCCAAGAGCACCAAG
AACTACTCCCTTTCTTCAGTTGAATGAAATAAGAAATGTAAAACATGATGGTAAGACACTTTG
GTGGGTTTCCTTCTTGAAGCTATTATTATCAAATTCCCTATTCTTAGGACTTGTTCTAGACTA
AAAGATAGTTAAGAGATATCCATCAAATACAATGTATCAACCTAAACTGGATGCTGGGGTTCT
TTTTACACCCTATAAAAGACATACCTAAGACAATCAGAGAAATACAAATATGGACTTGATTAT
TAGATAATATAGAAGGTTTATTAATTTTCTTAGATGTGATCATGGTATTGCAGTTTTAAAGGA
GAACAATCTCCTGTTTAAGAGATACATGCTGAAATATTTACGGAGTTAAAGGTCACTGGACTC
CAGACTGGTGATAGAACAAGACTCTGTCTCTAAAAAATAATTAATTTTTTAAAAGAAAATAGT
TTGGTAAGATGATTCTTACATTCTTAAATAACACGCCATCTAAGAAAAATGCTTTAACATAAA
CATTACTGAAAAAATGCTACATTTGCCACAACTTCATAAAATGTCAAGTGAAATCTCAAGCTC
CAAAGATATTATTCCTATTACTAAATCTGATGTAATAACATTTTATTGATTCTAGGCATTCCT
GCTGAATGTACCACCATTTATAACAGAGGTGAACATACAAGTGGCATGTATGCCATCAGACCC
AGCAACTCTCAAGTTTTTCATGTCTACTGTGATGTTATATCAGGTAAAACCTGTCTAAGGAGA
ATAGACAGTAGTTAGTTCAACTTACTCATTACGTATTAGGAAGATTAACCTGGTTATCATTGT
TTTATACATATATATATGAAATATATATGAGTATTCGTATAAATATAATACTTTTACCTTGTT
TATGTATTTACTCAATATTCTCCTTTTCCTCTAAAATAATCTGAAGTGACTATTATCAATAAG
TTTACTATGCCAAAATTCATTAATTGCCTTTCACTTAACTTTTGGGACCATAATAAATAATAA
AATGTATTGCCATAACATTAATAAACTACCTTACAAAACCACCAATTAAAATCAAACAAACAA
AAAAGTGTTATTTACATCTGTCAACATAAATCTACTAAAAATACATGATTTCATTCATTATAT
TCAGGTAGTCCATGGACATTAATTCAACATCGAATAGATGGATCACAAAACTTCAATGAAACG
TGGGAGAACTACAAATATGGTTTTGGGAGGCTTGATGGTAAGGGGACTACATTCAATCATTCA
TTCACTTGCTAATCTACAAATATTTACTGAGAACCTCTTATGGACCAGGTATTAGGAAAAGTA
GTAACGAACGAGAAGCAGTCTCAGCCTTCATATAATTTATTATCAAACAATTACACATTTGTT
AGTAAATTACACTTATTACAACTGTTATTATTTGAATTATATTTATCACAATTACATGTCTGT
TCTTAAATATACTTATCACAATTTAATTCCACGGCTTACAATGATCATAACTATAATTATTAA
AGACAATTTTGATTAAATGTTATGTCATAAGTAGTAACTGTTACAAATAAGCTGTGAAAAGAA
CCACTCCTAGCATTAGTCACTCTATTCTCTCATTAACGTTTTACATATCAATTAATTGGAAGT
TAAAAGGACCAGGAAACTCAGACATACAGTATACATTTTAAAATTTCAATTATTTAAATATAA
TATATAGAATGTATGGCTTATAATGAATTAGTTAACTCAATGCAAATTATTCTATTTTGATTA
CAAATAGTAAAATAAGCAAGATAAAATAACAGATGTTTAAAATCCAAAAAGCACATACAAAAA
TCCATGAATGATGTCTAAGTACTCACTTATAAAGTAGAAGACATTCATTATTATATCAAATTT
TTAAATGCTCAGTACTATTTGACCATTTAAAAATTTTGTATTCAAACTACCAGTGAAAGCCCT
ACCTAGAAGGTATACTCAGTGATAAGTTTTGTAGCTCCAAATCTTCTAATAGTGAGTGTAACC
CCAAAATAAAAGGCTGACAGGTAAGTCGAGAATACTCACTTAATTCTGGTAAGAAAGCAACCC
ATTTGTACTTGTATTTACCAGCAATCCTTAAAATGAAGCTTCCTACTAACTCAATAGCAATAA
GACAATAGTGAATGTTTAATGAAAACAGTATTTTATAAATACTTTAATAAAAAGGATTGTGAT
GAAGAACAATCTATTTATATTTGTTATTTGTTTTTAATTCCAATAAAAATAATTTTTAAAATT
ACAGAAAAAAGTTATTAAGAACCATGCTTTTAAATTTAAAATGATTTTTTAAATTTATTCCTG
TCTTTTTCTACAAAGAAAGCATACATTAAGCAAATACCAAAGGCCAGGTTTACATTTGAAGAA
AGTGACATTATTATTACTCAAGTCTCTAGGAATACTTAACACATCTCTTGACTGTATATGGAT
GTTAATAAATAGCTGACAGTAAAGTTTATCCATATAAAGACTTGCAAATATTCCTCTACCAAT
GACGAGACTTTAAAATATCTATAATAATGTAACACATTTCACTGGTGAAACATGTCTTGTCAT
ATGCATTATAGAAAGGATAATCAGACTTTCAGTTATATTAATATTTTTAACATTTTTGTGCAC
ATAGCTATCTTCAATAAAATTGTTTTAAAAGGTATTATTTTAAGATACACTAAAATGATCAAG
GGATTCAAGACTAAACAACTCAATTAGTTGCACCAATAAAAAACACTTAAAAAAACTGTCAGT
GTCCAACCTGTACTTAATAACTCACAGATTTTTAAAACTTTTCTTTTCAGGAGAATTTTGGTT
GGGCCTAGAGAAGATATACTCCATAGTGAAGCAATCTAATTATGTTTTACGAATTGAGTTGGA
AGACTGGAAAGACAACAAACATTATATTGAATATTCTTTTTACTTGGGAAATCACGAAACCAA
CTATACGCTACATCTAGTTGCGATTACTGGCAATGTCCCCAATGCAATCCCGGAAAACAAAGA
TTTGGTGTTTTCTACTTGGGATCACAAAGCAAAAGGACACTTCAACTGTCCAGAGGGTTATTC
AGGTATCTTTTTCTGATACCAATACTTTATTTTCATATCTTCAAAGTATCTTCCCACATTATT
AGCTATTATCTGCAATGACAACTTTTAAAAATCCGAATCCCAAATAAGCGTTTTCTCTCTAGA
CGAAAACCTCTTAACTATAATGAAAGTGTTCATTCTAGTTCAATCAGGTATTTTACCTCTAAT
CTTCCTCAGATTTTCTATTTTTTGGTAGTGTATAGATTATTTATACAGATTATTTAAAATTGG
GACTTATACAGATTATTTAAAACTGGGATACATGCATCTAAAACACTGTAATATTTATAAGAA
AGGAAGATAAACTTACGGGGAAATACAGTAACAGTAACTACATACGAGTCTGTACCCATTAAA
TTGCATATCTATCTCCTTTAGGAGGCTGGTGGTGGCATGATGAGTGTGGAGAAAACAACCTAA
ATGGTAAATATAACAAACCAAGAGCAAAATCTAAGCCAGAGAGGAGAAGAGGATTATCTTGGA
AGTCTCAAAATGGAAGGTTATACTCTATAAAATCAACCAAAATGTTGATCCATCCAACAGATT
CAGAAAGCTTTGAATGAACTGAGGCAAATTTAAAAGGCAATAATTTAAACATTAACCTCATTC
CAAGTTAATGTGGTCTAATAATCTGGTATTAAATCCTTAAGAGAAAGCTTGAGAAATAGATTT
TTTTTATCTTAAAGTCACTGTCTATTTAAGATTAAACATACAATCACATAACCTTAAAGAATA
CCGTTTACATTTCTCAATCAAAATTCTTATAATACTATTTGTTTTAAATTTTGTGATGTGGGA
ATCAATTTTAGATGGTCACAATCTAGATTATAATCAATAGGTGAACTTATTAAATAACTTTTC
TAAATAAAAAATTTAGAGACTTTTATTTTAAAAGGCATCATATGAGCTAATATCACAACTTTC
CCAGTTTAAAAAACTAGTACTCTTGTTAAAACTCTAAACTTGACTAAATACAGAGGACTGGTA
ATTGTACAGTTCTTAAATGTTGTAGTATTAATTTCAAAACTAAAAATCGTCAGCACAGAGTAT
GTGTAAAAATCTGTAATACAAATTTTTAAACTGATGCTTCATTTTGCTACAAAATAATTTGGA
GTAAATGTTTGATATGATTTATTTATGAAACCTAATGAAGCAGAATTAAATACTGTATTAAAA
TAAGTTCGCTGTCTTTAAACAAATGGAGATGACTACTAAGTCACATTGACTTTAACATGAGGT
ATCACTATACCTTATTTGTTAAAATATATACTGTATACATTTTATATATTTTAACACTTAATA
CTATGAAAACAAATAATTGTAAAGGAATCTTGTCAGATTACAGTAAGAATGAACATATTTGTG
GCATCGAGTTAAAGTTTATATTTCCCCTAAATATGCTGTGATTCTAATACATTCGTGTAGGTT
TTCAAGTAGAAATAAACCTCGTAACAAGTTACTGAACGTTTAAACAGCCTGACAAGCATGTAT
ATATGTTTAAAATTCAATAAACAAAGACCCAGTCCCTAAATTATAGAAATTTAAATTATTCTT
GCATGTTTATCGACATCACAACAGATCCCTAAATCCCTAAATCCCTAAAGATTAGATACAAAT
TTTTTACCACAGTATCACTTGTCAGAATTTATTTTTAAATATGATTTTTTAAAACTGCCAGTA
AGAAATTTTAAATTAAACCCATTTGTTAAAGGATATAGTGCCCAAGTTATATGGTGACCTACC
TTTGTCAATACTTAGCATTATGTATTTCAAATTATCCAATATACATGTCATATATATTTTTAT
ATGTCACATATATAAAAGATATGTATGATCTATGTGAATCCTAAGTAAATATTTTGTTCCAGA
AAAGTACAAAATAATAAAGGTAAAAATAATCTATAATTTTCAGGACCACAGACTAAGCTGTCG
AAATTAACGCTGATTTTTTTAGGGCCAGAATACCAAAATGGCTCCTCTCTTCCCCCAAAATTG
GACAATTTCAAATGCAAAATAATTCATTATTTAATATATGAGTTGCTTCCTCTATTTGGTTTC
CTTAAAAAAAAAAAAAACTCTCATAGGACATGTTTCATTTTGTTCCTTTCAGGAGTAGTAAAT
TAGACGTTTTCCCCATATAAAGCTTTTTTCTACCAGAAAGATACTTCTGGTAGAAGAAGAGAA
AGGAGCTCTTTATGGTTCACACGACTGTCTCCTGTCCTAACTACTTTGCTTAAAGTGCTCAAA
TTCCATCACTACTCACAGTTGTCTAATCTAAGTCTAATCCCCTTTGATCTCTCAGACTACCTT
CCCTTTTATCTCTCTACTACTTAATAATAAGAATATCTTTTTTTCAAACTTGACCTTCATTTT
GCTTTCACAATACTATACTCTCCATGGATTATCCCTTATCTGAATCCATCTTTATAACCCTAT
TCCTTTCTCATATTTAGTACTGTGGGCCAATGGACAACCTTCAATCATCTTTTCTACACTGAC
CCTCAGACATTCTATCTGCTCTCACGGACTCCTTTATTTACCATGAATAAAGTTCCAAAATCT
ACATATTCATCCCAAGTCTCTTTCCAGTTCCCCTTCTTACATTGCCTATTTGCCATTTCTCCC
TTCAATACCCTATACTTCACTCAAATTCAACATACCAAAAATAAAAGGCCAGGCACGGTGGCT
CACACCTGTAATCCCAGGACTTTGGGAGGCTGAGGCAGGTGGATCACCTGAGGTCAGGAGTCT
GACCAGCCTGACCAATATGGTGAAACCCCGTCTCTACCTAAAATACAAAAATTAGCCAGGCGT
GGTGGCATGTGCCTACAGTCCCAGCTACTCAAGAGGCTGAGACAGGAGAATCGCTTGAACCCA
GGAGGCGGAGGTTGCAGTGAGCTGAGATCACACCAATGCACTGGGTGACAGAACAAGACTGAC
TCAAAAAAAAATAAATAACAAATTCCCCAGCCCCTTACTGCTACTGCTATCCCTTTCTACCCA
CCTTTCCCTCCTTTATACTCTTTCACACCATCTTCCTCACTTCTTTATATCCATTAATATGAC
CAGCATGTTCCCAGTCACAGAAGCCTGGAACCCGGAAGACATCTCTGGCTTTTCACTCAACTT
TGTAAACTACCTCTTTTGTATCATAAGCCACCAAGTTCAATACAATCTTCTCTTGAAACGTCT
CTTAATCTTATAAGCTTTCTTCCCCAAAGACTGTCTTTAACTTCAGTGCTAGATTATATAAGT
AAD34156.1 human angiopoietin-related protein 3
(SEQ ID NO: 8)
MFTIKLLLFIVPLVISSRIDQDNSSFDSLSPEPKSRFAMLDDVKILANGLLQLGHGLKDFVHK
TKGQINDIFQKLNIFDQSFYDLSLQTSEIKEEEKELRRTTYKLQVKNEEVKNMSLELNSKLES
LLEEKILLQQKVKYLEEQLTNLIQNQPETPEHPEVTSLKTFVEKQDNSIKDLLQTVEDQYKQL
NQQHSQIKEIENQLRRTSIQEPTEISLSSKPRAPRTTPFLQLNEIRNVKHDGIPAECTTIYNR
GEHTSGMYAIRPSNSQVFHVYCDVISGSPWTLIQHRIDGSQNFNETWENYKYGFGRLDGEFWL
GLEKIYSIVKQSNYVLRIELEDWKDNKHYIEYSFYLGNHETNYTLHLVAITGNVPNAIPENKD
LVFSTWDHKAKGHFNCPEGYSGGWWWHDECGENNLNGKYNKPRAKSKPERRRGLSWKSQNGRL
YSIKSTKMLIHPTDSESFE

### Lipoprotein (a) (LPA)

[0454] In some embodiments, the target gene for modification using the compositions and methods disclosed herein is gene encoding lipoprotein a (LPA). LPA is a low-density lipoprotein variant. Genetic and epidemiologic studies have identified LPA as a risk factor for atherosclerosis and related diseases, such as coronary heart disease and stroke. LPA concentrations vary more than one thousand times between individuals: from <0.2 to >200 mg/dL. This range of concentrations is observed in all populations studied by scientists so far. The mean and median concentrations between different world populations show distinct particularities, the main being the two to threefold higher LPA plasma concentration of populations of African descent compared to Asian, Oceanic, or European populations. High LPA in blood correlates with coronary heart disease (CHD), cardiovascular disease (CVD), atherosclerosis, thrombosis, and stroke. Individuals without LPA or with very low LPA levels seem to be healthy. Thus, plasma LPA is not vital, at least under normal environmental conditions. Since apo(a)/LPA appeared rather recently in mammalian evolution—only old world monkeys and humans have been shown to harbor LPA—its function might not be vital, but just evolutionarily advantageous under certain environmental conditions, e.g. in case of exposure to certain infectious diseases.

[0455] An exemplary LPA amino acid sequence encoded by Human reference sequence NG_016147.1 is provided below:

>sp|P08519|APOA_HUMAN Apolipoprotein(a)
OS = Homo sapiens OX = 9606 GN = LPA
PE = 1 SV = 1
(SEQ ID NO: 64)
MEHKEVVLLLLLFLKSAAPEQSHVVQDCYHGDGQSYRGTYSTTVTGRTCQAWSSMTPHQHNRT
TENYPNAGLIMNYCRNPDAVAAPYCYTRDPGVRWEYCNLTQCSDAEGTAVAPPTVTPVPSLEA
PSEQAPTEQRPGVQECYHGNGQSYRGTYSTTVTGRTCQAWSSMTPHSHSRTPEYYPNAGLIMN
YCRNPDAVAAPYCYTRDPGVRWEYCNLTQCSDAEGTAVAPPTVTPVPSLEAPSEQAPTEQRPG
VQECYHGNGQSYRGTYSTTVTGRTCQAWSSMTPHSHSRTPEYYPNAGLIMNYCRNPDAVAAPY
CYTRDPGVRWEYCNLTQCSDAEGTAVAPPTVTPVPSLEAPSEQAPTEQRPGVQECYHGNGQSY
RGTYSTTVTGRTCQAWSSMTPHSHSRTPEYYPNAGLIMNYCRNPDAVAAPYCYTRDPGVRWEY
CNLTQCSDAEGTAVAPPTVTPVPSLEAPSEQAPTEQRPGVQECYHGNGQSYRGTYSTTVTGRT
CQAWSSMTPHSHSRTPEYYPNAGLIMNYCRNPDAVAAPYCYTRDPGVRWEYCNLTQCSDAEGT
AVAPPTVTPVPSLEAPSEQAPTEQRPGVQECYHGNGQSYRGTYSTTVTGRTCQAWSSMTPHSH
SRTPEYYPNAGLIMNYCRNPDAVAAPYCYTRDPGVRWEYCNLTQCSDAEGTAVAPPTVTPVPS
LEAPSEQAPTEQRPGVQECYHGNGQSYRGTYSTTVTGRTCQAWSSMTPHSHSRTPEYYPNAGL
IMNYCRNPDAVAAPYCYTRDPGVRWEYCNLTQCSDAEGTAVAPPTVTPVPSLEAPSEQAPTEQ
RPGVQECYHGNGQSYRGTYSTTVTGRTCQAWSSMTPHSHSRTPEYYPNAGLIMNYCRNPDAVA
APYCYTRDPGVRWEYCNLTQCSDAEGTAVAPPTVTPVPSLEAPSEQAPTEQRPGVQECYHGNG
QSYRGTYSTTVTGRTCQAWSSMTPHSHSRTPEYYPNAGLIMNYCRNPDAVAAPYCYTRDPGVR
WEYCNLTQCSDAEGTAVAPPTVTPVPSLEAPSEQAPTEQRPGVQECYHGNGQSYRGTYSTTVT
GRTCQAWSSMTPHSHSRTPEYYPNAGLIMNYCRNPDAVAAPYCYTRDPGVRWEYCNLTQCSDA
EGTAVAPPTVTPVPSLEAPSEQAPTEQRPGVQECYHGNGQSYRGTYSTTVTGRTCQAWSSMTP
HSHSRTPEYYPNAGLIMNYCRNPDAVAAPYCYTRDPGVRWEYCNLTQCSDAEGTAVAPPTVTP
VPSLEAPSEQAPTEQRPGVQECYHGNGQSYRGTYSTTVTGRTCQAWSSMTPHSHSRTPEYYPN
AGLIMNYCRNPDAVAAPYCYTRDPGVRWEYCNLTQCSDAEGTAVAPPTVTPVPSLEAPSEQAP
TEQRPGVQECYHGNGQSYRGTYSTTVTGRTCQAWSSMTPHSHSRTPEYYPNAGLIMNYCRNPD
AVAAPYCYTRDPGVRWEYCNLTQCSDAEGTAVAPPTVTPVPSLEAPSEQAPTEQRPGVQECYH
GNGQSYRGTYSTTVTGRTCQAWSSMTPHSHSRTPEYYPNAGLIMNYCRNPDAVAAPYCYTRDP
GVRWEYCNLTQCSDAEGTAVAPPTVTPVPSLEAPSEQAPTEQRPGVQECYHGNGQSYRGTYST
TVTGRTCQAWSSMTPHSHSRTPEYYPNAGLIMNYCRNPDAVAAPYCYTRDPGVRWEYCNLTQC
SDAEGTAVAPPTVTPVPSLEAPSEQAPTEQRPGVQECYHGNGQSYRGTYSTTVTGRTCQAWSS
MTPHSHSRTPEYYPNAGLIMNYCRNPDAVAAPYCYTRDPGVRWEYCNLTQCSDAEGTAVAPPT
VTPVPSLEAPSEQAPTEQRPGVQECYHGNGQSYRGTYSTTVTGRTCQAWSSMTPHSHSRTPEY
YPNAGLIMNYCRNPDAVAAPYCYTRDPGVRWEYCNLTQCSDAEGTAVAPPTVTPVPSLEAPSE
QAPTEQRPGVQECYHGNGQSYRGTYSTTVTGRTCQAWSSMTPHSHSRTPEYYPNAGLIMNYCR
NPDAVAAPYCYTRDPGVRWEYCNLTQCSDAEGTAVAPPTVTPVPSLEAPSEQAPTEQRPGVQE
CYHGNGQSYRGTYSTTVTGRTCQAWSSMTPHSHSRTPEYYPNAGLIMNYCRNPDAVAAPYCYT
RDPGVRWEYCNLTQCSDAEGTAVAPPTVTPVPSLEAPSEQAPTEQRPGVQECYHGNGQSYRGT
YSTTVTGRTCQAWSSMTPHSHSRTPEYYPNAGLIMNYCRNPDAVAAPYCYTRDPGVRWEYCNL
TQCSDAEGTAVAPPTVTPVPSLEAPSEQAPTEQRPGVQECYHGNGQSYRGTYSTTVTGRTCQA
WSSMTPHSHSRTPEYYPNAGLIMNYCRNPDAVAAPYCYTRDPGVRWEYCNLTQCSDAEGTAVA
PPTVTPVPSLEAPSEQAPTEQRPGVQECYHGNGQSYRGTYSTTVTGRTCQAWSSMTPHSHSRT
PEYYPNAGLIMNYCRNPDAVAAPYCYTRDPGVRWEYCNLTQCSDAEGTAVAPPTVTPVPSLEA
PSEQAPTEQRPGVQECYHGNGQSYRGTYSTTVTGRTCQAWSSMTPHSHSRTPEYYPNAGLIMN
YCRNPDAVAAPYCYTRDPGVRWEYCNLTQCSDAEGTAVAPPTVTPVPSLEAPSEQAPTEQRPG
VQECYHGNGQSYRGTYSTTVTGRTCQAWSSMTPHSHSRTPEYYPNAGLIMNYCRNPDAVAAPY
CYTRDPGVRWEYCNLTQCSDAEGTAVAPPTVTPVPSLEAPSEQAPTEQRPGVQECYHGNGQSY
RGTYSTTVTGRTCQAWSSMTPHSHSRTPEYYPNAGLIMNYCRNPDAVAAPYCYTRDPGVRWEY
CNLTQCSDAEGTAVAPPTVTPVPSLEAPSEQAPTEQRPGVQECYHGNGQSYRGTYSTTVTGRT
CQAWSSMTPHSHSRTPEYYPNAGLIMNYCRNPDAVAAPYCYTRDPGVRWEYCNLTQCSDAEGT
AVAPPTVTPVPSLEAPSEQAPTEQRPGVQECYHGNGQSYRGTYSTTVTGRTCQAWSSMTPHSH
SRTPEYYPNAGLIMNYCRNPDAVAAPYCYTRDPGVRWEYCNLTQCSDAEGTAVAPPTVTPVPS
LEAPSEQAPTEQRPGVQECYHGNGQSYRGTYSTTVTGRTCQAWSSMTPHSHSRTPEYYPNAGL
IMNYCRNPDAVAAPYCYTRDPGVRWEYCNLTQCSDAEGTAVAPPTVTPVPSLEAPSEQAPTEQ
RPGVQECYHGNGQSYRGTYSTTVTGRTCQAWSSMTPHSHSRTPEYYPNAGLIMNYCRNPDAVA
APYCYTRDPGVRWEYCNLTQCSDAEGTAVAPPTVTPVPSLEAPSEQAPTEQRPGVQECYHGNG
QSYRGTYSTTVTGRTCQAWSSMTPHSHSRTPEYYPNAGLIMNYCRNPDPVAAPYCYTRDPSVR
WEYCNLTQCSDAEGTAVAPPTITPIPSLEAPSEQAPTEQRPGVQECYHGNGQSYQGTYFITVT
GRTCQAWSSMTPHSHSRTPAYYPNAGLIKNYCRNPDPVAAPWCYTTDPSVRWEYCNLTRCSDA
EWTAFVPPNVILAPSLEAFFEQALTEETPGVQDCYYHYGQSYRGTYSTTVTGRTCQAWSSMTP
HQHSRTPENYPNAGLTRNYCRNPDAEIRPWCYTMDPSVRWEYCNLTQCLVTESSVLATLTVVP
DPSTEASSEEAPTEQSPGVQDCYHGDGQSYRGSFSTTVTGRTCQSWSSMTPHWHQRTTEYYPN
GGLTRNYCRNPDAEISPWCYTMDPNVRWEYCNLTQCPVTESSVLATSTAVSEQAPTEQSPTVQ
DCYHGDGQSYRGSFSTTVTGRTCQSWSSMTPHWHQRTTEYYPNGGLTRNYCRNPDAEIRPWCY
TMDPSVRWEYCNLTQCPVMESTLLTTPTVVPVPSTELPSEEAPTENSTGVQDCYRGDGQSYRG
TLSTTITGRTCQSWSSMTPHWHRRIPLYYPNAGLTRNYCRNPDAEIRPWCYTMDPSVRWEYCN
LTRCPVTESSVLTTPTVAPVPSTEAPSEQAPPEKSPVVQDCYHGDGRSYRGISSTTVTGRTCQ
SWSSMIPHWHQRTPENYPNAGLTENYCRNPDSGKQPWCYTTDPCVRWEYCNLTQCSETESGVL
ETPTVVPVPSMEAHSEAAPTEQTPVVRQCYHGNGQSYRGTFSTTVTGRTCQSWSSMTPHRHQR
TPENYPNDGLTMNYCRNPDADTGPWCFTMDPSIRWEYCNLTRCSDTEGTVVAPPTVIQVPSLG
PPSEQDCMFGNGKGYRGKKATTVTGTPCQEWAAQEPHRHSTFIPGTNKWAGLEKNYCRNPDGD
INGPWCYTMNPRKLFDYCDIPLCASSSFDCGKPQVEPKKCPGSIVGGCVAHPHSWPWQVSLRT
RFGKHFCGGTLISPEWVLTAAHCLKKSSRPSSYKVILGAHQEVNLESHVQEIEVSRLFLEPTQ
ADIALLKLSRPAVITDKVMPACLPSPDYMVTARTECYITGWGETQGTFGTGLLKEAQLLVIEN
EVCNHYKYICAEHLARGTDSCQGDSGGPLVCFEKDKYILQGVTSWGLGCARPNKPGVYARVSR
FVTWIEGMMRNN

### Base Editor Protein-gRNA Complexes

[0456] In another aspect, provided herein is a complex comprising the single guide RNA as provided herein in complex with the base editor fusion protein, e.g. the adenosine base editor fusion protein, wherein the complex comprises increased stability as compared to a complex with an unmodified single guide RNA and a base editor protein, wherein the stability is measured by half life of the complex ex vivo or in vitro.

[0457] In some embodiments, the complex comprises increased stability as compared to a complex with an unmodified single guide RNA and a Cas9 protein. In some embodiments, the complex comprises increased stability by at least 5%, at least 10%, at least 20%, at least 30%, at least 40%, at least 50%, at least 60%, at least 70%, at least 80%, at least 90%, at least 100%, at least 200%, at least 300%, at least 400%, at least 500%, at least 600%, at least 700%, at least 800%, at least 900%, at least 1000%, at least 2000%, at least 3000%, at least 4000%, at least 5000%, at least 6000%, at least 7000%, at least 8000%, at least 9000%, at least 10000%, at least 20000%, at least 30000%, at least 40000%, at least 50000%, at least 60000%, at least 70000%, at least 80000%, at least 90000%, or at least 100000% as compared to a complex with an unmodified single guide RNA and a Cas9 protein. In some embodiments, the complex comprises increased stability by at least 2 fold, at least 3 fold, at least 4 fold, at least 5 fold, at least 10 fold, at least 20 fold, at least 25 fold, at least 30 fold, at least 40 fold, at least 50 fold, at least 60 fold, at least 70 fold, at least 80 fold, at least 90 fold, at least 100 fold, at least 200 fold, at least 300 fold, at least 400 fold, at least 500 fold, at least 600 fold, at least 700 fold, at least 800 fold, at least 900 fold, at least 1000 fold, at least 2000 fold, at least 3000 fold, at least 4000 fold, at least 5000 fold, at least 6000 fold, at least 7000 fold, at least 8000 fold, at least 9000 fold, or at least 10000 fold as compared to a complex with an unmodified single guide RNA and a Cas9 protein.

[0458] In some embodiments, wherein the stability of the complex is measured by half life of the complex. In some embodiments, wherein the stability of the complex is measured by half life of the complex ex vivo. In some embodiments, wherein the stability of the complex is measured by half life of the complex in vitro.

[0459] In some embodiments, the complex comprises increased half life by at least 5%, at least 10%, at least 20%, at least 30%, at least 40%, at least 50%, at least 60%, at least 70%, at least 80%, at least 90%, at least 100%, at least 200%, at least 300%, at least 400%, at least 500%, at least 600%, at least 700%, at least 800%, at least 900%, at least 1000%, at least 2000%, at least 3000%, at least 4000%, at least 5000%, at least 6000%, at least 7000%, at least 8000%, at least 9000%, at least 10000%, at least 20000%, at least 30000%, at least 40000%, at least 50000%, at least 60000%, at least 70000%, at least 80000%, at least 90000%, or at least 100000% as compared to a complex with an unmodified single guide RNA and a Cas9 protein wherein half life of the complex is measured ex vivo. In some embodiments, the single guide RNA exhibits increased half life of the complex by at least 2 fold, at least 3 fold, at least 4 fold, at least 5 fold, at least 10 fold, at least 20 fold, at least 25 fold, at least 30 fold, at least 40 fold, at least 50 fold, at least 60 fold, at least 70 fold, at least 80 fold, at least 90 fold, at least 100 fold, at least 200 fold, at least 300 fold, at least 400 fold, at least 500 fold, at least 600 fold, at least 700 fold, at least 800 fold, at least 900 fold, at least 1000 fold, at least 2000 fold, at least 3000 fold, at least 4000 fold, at least 5000 fold, at least 6000 fold, at least 7000 fold, at least 8000 fold, at least 9000 fold, or at least 10000 fold as compared to a complex with an unmodified single guide RNA and a Cas9 protein, wherein half life of the complex is measured ex vivo.

[0460] In some embodiments, the complex comprises increased half life when measured in vitro by at least 5%, at least 10%, at least 20%, at least 30%, at least 40%, at least 50%, at least 60%, at least 70%, at least 80%, at least 90%, at least 100%, at least 200%, at least 300%, at least 400%, at least 500%, at least 600%, at least 700%, at least 800%, at least 900%, at least 1000%, at least 2000%, at least 3000%, at least 4000%, at least 5000%, at least 6000%, at least 7000%, at least 8000%, at least 9000%, at least 10000%, at least 20000%, at least 30000%, at least 40000%, at least 50000%, at least 60000%, at least 70000%, at least 80000%, at least 90000%, or at least 100000% as compared to a complex with an unmodified single guide RNA and a Cas9 protein, wherein half life of the complex is measured in vitro. In some embodiments, the single guide RNA exhibits increased half life of the complex by at least 2 fold, at least 3 fold, at least 4 fold, at least 5 fold, at least 10 fold, at least 20 fold, at least 25 fold, at least 30 fold, at least 40 fold, at least 50 fold, at least 60 fold, at least 70 fold, at least 80 fold, at least 90 fold, at least 100 fold, at least 200 fold, at least 300 fold, at least 400 fold, at least 500 fold, at least 600 fold, at least 700 fold, at least 800 fold, at least 900 fold, at least 1000 fold, at least 2000 fold, at least 3000 fold, at least 4000 fold, at least 5000 fold, at least 6000 fold, at least 7000 fold, at least 8000 fold, at least 9000 fold, or at least 10000 fold as compared to a complex with an unmodified single guide RNA and a Cas9 protein, wherein half life of the complex is measured in vitro.

[0461] In another aspect, provided herein is a cell comprising the complex as provided herein. In some embodiments, the cell may be an in vitro cell. In some embodiments, the cell may be an ex vivo cell. In some embodiments, the cell may be an in vivo cell. In some embodiments, the cell may be an isolated cell.

### Gene Modification Compositions

[0462] In another aspect, provided herein is a composition for gene modification comprising the single guide RNA as provided herein and a base editor protein or a nucleic acid sequence encoding the base editor protein. In some embodiments, the composition further comprises a vector that comprises the nucleic acid sequence encoding the base editor protein.

[0463] In some embodiments, the nucleic acid sequence may be a DNA, an RNA or mRNA, or a modified nucleic acid sequence. In some embodiments, the vector may be an expression vector. In some embodiments, the nucleic acid is operatively linked to a promoter of the vector. In some embodiments, the vector is a plasmid or a viral vector.

### Therapeutics and Methods of Treatment

[0464] In some aspects, provided herein is a method for treating or preventing a condition in a subject in need thereof, the method comprising administering to the subject a therapeutically effective amount of (i) a guide polynucleotide or a nucleic acid encoding same, and (ii) a base editor fusion protein comprising a programmable DNA binding domain and a deaminase, or a nucleic acid encoding same. In some embodiments, the base editor system comprises a guide polynucleotide. In some embodiments, the base editor system comprises a nucleic acid encoding a guide polynucleotide. In some embodiments, the base editor system comprises a base editor fusion protein comprising a programmable DNA binding domain and a deaminase. In some embodiments, the base editor system comprises a nucleic acid encoding a base editor fusion protein comprising a programmable DNA binding domain and a deaminase.

[0465] In some embodiments, the guide polynucleotide directs the base editor system to effect a nucleobase alteration in a ANGPTL3 gene in the subject. In some embodiments, the guide polynucleotide directs the base editor system to effect a nucleobase alteration in a PCSK9gene in the subject.

[0466] In some embodiments, the base alteration occurs in at least 35% of whole liver cells in the subject as measured by next generation sequencing or Sanger sequencing, thereby treating or preventing the condition in the subject.

[0467] In some aspects, provided herein is a method for treating or preventing a condition in a subject in need thereof, the method comprising administering to the subject a therapeutically effective amount of a first composition, comprising (i) a guide polynucleotide or a nucleic acid encoding same, and (ii) a base editor fusion protein comprising a programmable DNA binding domain and a deaminase, or a nucleic acid encoding same, wherein the guide polynucleotide directs the base editor system to effect a nucleobase alteration in a PCSK9 gene in the subject, wherein the base alteration occurs in at least 35% of whole liver cells in the subject as measured by next generation sequencing or Sanger sequencing; and a second composition, comprising (i) a guide polynucleotide or a nucleic acid encoding same, and (ii) a base editor fusion protein comprising a programmable DNA binding domain and a deaminase, or a nucleic acid encoding same, wherein the guide polynucleotide directs the base editor system to effect a nucleobase alteration in a ANGPTL3 gene in the subject, wherein the base alteration occurs in at least 35% of whole liver cells in the subject as measured by next generation sequencing or Sanger sequencing.

[0468] In some embodiments, the first composition and the second composition are administered sequentially. In some embodiment, the first composition is administered for one or more doses, then the second composition is administered for one or more doses. In some embodiments, the first composition and the second composition interspersed. In some embodiments, the first composition and the second composition are administered concurrently. In some embodiments, the first composition and the second composition are administered for one or more doses. In some embodiments, the first composition and the second composition are administered over and interval of over an interval of 1, 2, 3, 4, 5, 6, 7, 8, 9, 10, 11, 12, 13, 14, 15, 16, 17, 18, 19, 20, 21, 22, 23, 24, 25, 26, 27, 28, 29, or 30 hours. In some embodiments, the first composition and the second composition are administered over and interval of over an interval of 1, 2, 3, 4, 5, 6, 7, 8, 9, 10, 11, 12, 13, 14, 15, 16, 17, 18, 19, 20, 21, 22, 23, 24, 25, 26, 27, 28, 29, or 30 days. In some embodiments, the first composition and the second composition are administered over and interval of over an interval of 1, 2, 3, 4, 5, 6, 7, 8, 9, 10, 11, 12, 13, 14, 15, 16, 17, 18, 19, 20, 21, 22, 23, 24, 25, 26, 27, 28, 29, or 30 weeks.

[0469] In some embodiments, the base alteration occurs in at least 1%, 2%, 3%, 4%, 5%, 6%, 7%, 8%, 9%, 10%, 15%, 20%, 25%, 30%, 35%, 40%, 45%, 50%, 55%, 60%, 65%, 70%, 75%, 80%, 85%, 90%, 95%, 97%, 98%, 99%, 99.3%, 99.5%, 99.7%, 99.8%, or 99.9% of whole liver cells in the subject as measured by next generation sequencing or Sanger sequencing. In some embodiments, the base alteration occurs in at most 1%, 2%, 3%, 4%, 5%, 6%, 7%, 8%, 9%, 10%, 15%, 20%, 25%, 30%, 35%, 40%, 45%, 50%, 55%, 60%, 65%, 70%, 75%, 80%, 85%, 90%, 95%, 97%, 98%, 99%, 99.3%, 99.5%, 99.7%, 99.8%, or 99.9% of whole liver cells in the subject as measured by next generation sequencing or Sanger sequencing. In some embodiments, the base alteration occurs in 1%-99.9%, 2%-99.9%, 3%-99.9%, 4%-99.9%, 5%-99.9%, 6%-99.9%, 7%-99.9%, 8%-99.9%, 9%-99.9%, 10%-99.9%, 15%-99.9%, 20%-99.9%, 25%-99.9%, 30%-99.9%, 35%-99.9%, 40%-99.9%, 45%-99.9%, 50%-99.9%, 55%-99.9%, 60%-99.9%, 65%-99.9%, 70%-99.9%, 75%-99.9%, 80%-99.9%, 85%-99.9%, 90%-99.9%, or 95-99.9% of whole liver cells in the subject as measured by next generation sequencing or Sanger sequencing. In some embodiments, the base alteration occurs in 1%-99.5%, 1%-99%, 1%-98%, 1%-97%, 1%-96%, 1%-95%, 1%-90%, 1%-85%, 1%-80%, 1%-75%, 1%-70%, 1%-65%, 1%-60%, 1%-55%, 1%-50%, 1%-45%, 1%-40%, 1%-35%, 1%-30%, 1%-25%, 1%-20%, 1%-15%, 1%-10%, 1%-9%, 1%-8%, 1%-7%, 1%-6%, 1%-5%, 1%-4%, 1%-3%, or 1%-2% of whole liver cells in the subject as measured by next generation sequencing or Sanger sequencing. In some embodiments, the base alteration occurs in 1%-90%, 5%-85%, 10%-80%, 15%-75%, 20%-70%, 25%-65%, 30%-60%, 35%-55%, or 40%-50% of whole liver cells in the subject as measured by next generation sequencing or Sanger sequencing. In some embodiments, the base alteration occurs in 100% of whole liver cells in the subject as measured by next generation sequencing or Sanger sequencing.

[0470] In some embodiments, the base alteration occurs in hepatocytes in the subject. In some embodiments, the base alteration occurs in at least 30% of hepatocytes in the subject as measured by next generation sequencing or Sanger sequencing. In some embodiments, the base alteration occurs in hepatocytes in the subject. In some embodiments, the base alteration occurs in at least 35% of hepatocytes in the subject as measured by next generation sequencing or Sanger sequencing. In some embodiments, the base alteration occurs in at least 1%, 2%, 3%, 4%, 5%, 6%, 7%, 8%, 9%, 10%, 15%, 20%, 25%, 30%, 35%, 40%, 45%, 50%, 55%, 60%, 65%, 70%, 75%, 80%, 85%, 90%, 95%, 97%, 98%, 99%, 99.3%, 99.5%, 99.7%, 99.8%, or 99.9% of hepatocytes in the subject as measured by next generation sequencing or Sanger sequencing. In some embodiments, the base alteration occurs in at most 1%, 2%, 3%, 4%, 5%, 10%, 15%, 20%, 25%, 30%, 35%, 40%, 45%, 50%, 55%, 60%, 65%, 70%, 75%, 80%, 85%, 90%, 95%, 97%, 98%, 99%, 99.3%, 99.5%, 99.7%, 99.8%, or 99.9% of hepatocytes in the subject as measured by next generation sequencing or Sanger sequencing. In some embodiments, the base alteration occurs in 1%-99.9%, 2%-99.9%, 3%-99.9%, 4%-99.9%, 5%-99.9%, 6%-99.9%, 7%-99.9%, 8%-99.9%, 9%-99.9%, 10%-99.9%, 15%-99.9%, 20%-99.9%, 25%-99.9%, 30%-99.9%, 35%-99.9%, 40%-99.9%, 45%-99.9%, 50%-99.9%, 55%-99.9%, 60%-99.9%, 65%-99.9%, 70%-99.9%, 75%-99.9%, 80%-99.9%, 85%-99.9%, 90%-99.9%, or 95-99.9% of hepatocytes in the subject as measured by next generation sequencing or Sanger sequencing. In some embodiments, the base alteration occurs in 1%-99.5%, 1%-99%, 1%-98%, 1%-97%, 1%-96%, 1%-95%, 1%-90%, 1%-85%, 1%-80%, 1%-75%, 1%-70%, 1%-65%, 1%-60%, 1%-55%, 1%-50%, 1%-45%, 1%-40%, 1%-35%, 1%-30%, 1%-25%, 1%-20%, 1%-15%, 1%-10%, 1%-9%, 1%-8%, 1%-7%, 1%-6%, 1%-5%, 1%-4%, 1%-3%, or 1%-2% hepatocytes in the subject as measured by next generation sequencing or Sanger sequencing. In some embodiments, the base alteration occurs in 1%-90%, 5%-85%, 10%-80%, 15%-75%, 20%-70%, 25%-65%, 30%-60%, 35%-55%, or 40%-50% of hepatocytes in the subject as measured by next generation sequencing or Sanger sequencing. In some embodiments, the base alteration occurs in 100% of hepatocytes in the subject as measured by next generation sequencing or Sanger sequencing.

[0471] In some embodiments, the base alteration occurred in whole liver cells in the subject is measured by next generation sequencing. In some embodiments, the base alteration occurred in whole liver cells in the subject is measured by Sanger sequencing. In some embodiments, the base alteration occurred in hepatocytes in the subject is measured by next generation sequencing. In some embodiments, the base alteration occurred in hepatocytes in the subject is measured by Sanger sequencing.

[0472] In some embodiments, the method for treating or preventing a condition in a subject in need thereof as described herein comprises administering (i) the guide polynucleotide and (ii) the nucleic acid encoding the base editor fusion protein to the subject. In some embodiments, the base editor system comprises a guide polynucleotide. In some embodiments, the base editor system comprises a nucleic acid encoding a guide polynucleotide.

[0473] In some embodiments, the nucleic acid encoding the base editor fusion protein is a mRNA. In some embodiments, the mRNA generates the base editor fusion protein upon translation in the subject after the administration. In some embodiments, the base editor fusion protein forms a RNP complex in the subject.

[0474] In some embodiments, the method for treating or preventing a condition in a subject in need thereof as described herein further comprises administering a lipid nanoparticle (LNP) enclosing a guide polynucleotide or a nucleic acid encoding the guide polynucleotide (i). In some embodiments, the method for treating or preventing a condition in a subject in need thereof as described herein further comprises administering a second LNP enclosing a base editor fusion protein comprising a programmable DNA binding domain and a deaminase, or a nucleic acid encoding same (ii). In some embodiments, the method for treating or preventing a condition in a subject in need thereof as described herein further comprises administering a LNP enclosing a guide polynucleotide or a nucleic acid encoding the guide polynucleotide (i) and a base editor fusion protein comprising a programmable DNA binding domain and a deaminase, or a nucleic acid encoding same (ii). In some embodiments, the RNP complex is formed upon uptake of the LNP or the second LNP by a liver cell in the subject.

[0475] In some embodiments, the ratio of a guide polynucleotide or a nucleic acid encoding the guide polynucleotide (i) and a base editor fusion protein comprising a programmable DNA binding domain and a deaminase, or a nucleic acid encoding same (ii) is about 1:10 to about 10:1 by weight. In some embodiments, the ratio of the guide polynucleotide and the nucleic acid encoding the base editor fusion protein is about 1:1, 1.5:1, 2:1, 3:1, 4:1, 1:1.5, 1:2, 1:3, or 1:4 by weight. In some embodiments, the molar ratio of the guide polynucleotide and the nucleic acid encoding the base editor fusion protein is about 500:1 to about 1:500.

[0476] In some embodiments, the ratio of the guide polynucleotide and the nucleic acid encoding the base editor fusion protein is about 1000:1 to about 1:1000 by weight. In some embodiments, the ratio of the guide polynucleotide and the nucleic acid encoding the base editor fusion protein is about 1000:1, 950:1, 900:1, 850:1, 800:1, 750:1, 700:1, 650:1, 600:1, 550:1, 500:1, 450:1, 400:1, 350:1, 300:1, 250:1, 200:1, 100:1, 95:1, 90:1, 85:1, 80:1, 75:1, 70:1, 65:1, 60:1, 55:1, 50:1, 45:1, 40:1, 35:1, 30:1, 25:1, 20:1, 19:1, 18:1, 17:1, 17:1, 15:1, 14:1, 13:1, 12:1, 11:1, 10:1, 9:1, 8:1, 7:1, 6:1, 5:1, 4:1, 3:1, 2.1, 1.9:1, 1.8:1, 1.7:1, 1.6:1, 1.5:1, 1.4:1, 1.3:1, 1.2:1, 1.1:1, 1.0:1, 0.9:1, 0.8:1, 0.7:1, 0.6:1, 0.5:1, 0.4:1, 0.3:1, 0.2:1, or 0.1 by weight. In some embodiments, the ratio of the guide polynucleotide and the nucleic acid encoding the base editor fusion protein is about 1:0.1, 1:0.2, 1:0.3, 1:0.4, 1:0.5, 1:0.6, 1:0.7, 1:0.8, 1:0.9, 1:1.0, 1:1.1, 1:1.2, 1:1.3, 1:1.4, 1:1.5, 1:1.6, 1:1.7, 1:1.8, 1:1.9, 1:2, 1:3, 1:4, 1:5, 1:6, 1:7, 1:8, 1:9, 1:10, 1:11, 1:12, 1:13, 1:14, 1:15, 1:16, 1:17, 1:18, 1:19, 1:20, 1:25, 1:30, 1:35, 1:40, 1:45, 1:50, 1:55, 1:60, 1:65, 1:70, 1:75, 1:80, 1:85, 1:90, 1:95, 1:100, 1:150, 1:200, 1:250, 1:300, 1:350, 1:400, 1:450, 1:500, 1:550, 1:600, 1:650, 1:700, 1:750, 1:800, 1:850, 1:900, 1:950, or 1:1000 by weight. In some embodiments, the ratio of the guide polynucleotide and the nucleic acid encoding the base editor fusion protein is at least about 1000:1, 950:1, 900:1, 850:1, 800:1, 750:1, 700:1, 650:1, 600:1, 550:1, 500:1, 450:1, 400:1, 350:1, 300:1, 250:1, 200:1, 100:1, 95:1, 90:1, 85:1, 80:1, 75:1, 70:1, 65:1, 60:1, 55:1, 50:1, 45:1, 40:1, 35:1, 30:1, 25:1, 20:1, 19:1, 18:1, 17:1, 17:1, 15:1, 14:1, 13:1, 12:1, 11:1, 10:1, 9:1, 8:1, 7:1, 6:1, 5:1, 4:1, 3:1, 2.1, 1.9:1, 1.8:1, 1.7:1, 1.6:1, 1.5:1, 1.4:1, 1.3:1, 1.2:1, 1.1:1, 1.0:1, 0.9:1, 0.8:1, 0.7:1, 0.6:1, 0.5:1, 0.4:1, 0.3:1, 0.2:1, or 0.1 by weight. In some embodiments, the ratio of the guide polynucleotide and the nucleic acid encoding the base editor fusion protein is at least about 1:0.1, 1:0.2, 1:0.3, 1:0.4, 1:0.5, 1:0.6, 1:0.7, 1:0.8, 1:0.9, 1:1.0, 1:1.1, 1:1.2, 1:1.3, 1:1.4, 1:1.5, 1:1.6, 1:1.7, 1:1.8, 1:1.9, 1:2, 1:3, 1:4, 1:5, 1:6, 1:7, 1:8, 1:9, 1:10, 1:11, 1:12, 1:13, 1:14, 1:15, 1:16, 1:17, 1:18, 1:19, 1:20, 1:25, 1:30, 1:35, 1:40, 1:45, 1:50, 1:55, 1:60, 1:65, 1:70, 1:75, 1:80, 1:85, 1:90, 1:95, 1:100, 1:150, 1:200, 1:250, 1:300, 1:350, 1:400, 1:450, 1:500, 1:550, 1:600, 1:650, 1:700, 1:750, 1:800, 1:850, 1:900, 1:950, or 1:1000 by weight. In some embodiments, the ratio of the guide polynucleotide and the nucleic acid encoding the base editor fusion protein is at most about 1000:1, 950:1, 900:1, 850:1, 800:1, 750:1, 700:1, 650:1, 600:1, 550:1, 500:1, 450:1, 400:1, 350:1, 300:1, 250:1, 200:1, 100:1, 95:1, 90:1, 85:1, 80:1, 75:1, 70:1, 65:1, 60:1, 55:1, 50:1, 45:1, 40:1, 35:1, 30:1, 25:1, 20:1, 19:1, 18:1, 17:1, 17:1, 15:1, 14:1, 13:1, 12:1, 11:1, 10:1, 9:1, 8:1, 7:1, 6:1, 5:1, 4:1, 3:1, 2.1, 1.9:1, 1.8:1, 1.7:1, 1.6:1, 1.5:1, 1.4:1, 1.3:1, 1.2:1, 1.1:1, 1.0:1, 0.9:1, 0.8:1, 0.7:1, 0.6:1, 0.5:1, 0.4:1, 0.3:1, 0.2:1, or 0.1 by weight. In some embodiments, the ratio of the guide polynucleotide and the nucleic acid encoding the base editor fusion protein is at most about 1:0.1, 1:0.2, 1:0.3, 1:0.4, 1:0.5, 1:0.6, 1:0.7, 1:0.8, 1:0.9, 1:1.0, 1:1.1, 1:1.2, 1:1.3, 1:1.4, 1:1.5, 1:1.6, 1:1.7, 1:1.8, 1:1.9, 1:2, 1:3, 1:4, 1:5, 1:6, 1:7, 1:8, 1:9, 1:10, 1:11, 1:12, 1:13, 1:14, 1:15, 1:16, 1:17, 1:18, 1:19, 1:20, 1:25, 1:30, 1:35, 1:40, 1:45, 1:50, 1:55, 1:60, 1:65, 1:70, 1:75, 1:80, 1:85, 1:90, 1:95, 1:100, 1:150, 1:200, 1:250, 1:300, 1:350, 1:400, 1:450, 1:500, 1:550, 1:600, 1:650, 1:700, 1:750, 1:800, 1:850, 1:900, 1:950, or 1:1000 by weight.

[0477] In some embodiments, the molar ratio of the guide polynucleotide and the nucleic acid encoding the base editor fusion protein is about 10000:1 to about 1:10000. In some embodiments, the molar ratio of the guide polynucleotide and the nucleic acid encoding the base editor fusion protein is about 10000:1, 9500:1, 9000:1, 8500:1, 8000:1, 7500:1, 7000:1, 6500:1, 6000:1, 5500:1, 5000:1, 4500:1, 4000:1, 3500:1, 3000:1, 2500:1, 2000:1, 1500:1, 1000:1, 950:1, 900:1, 850:1, 800:1, 750:1, 700:1, 650:1, 600:1, 550:1, 500:1, 450:1, 400:1, 350:1, 300:1, 250:1, 200:1, 190:1, 180:1, 170:1, 160:1, 150:1, 140:1, 130:1, 120:1, 110:1, 100:1, 95:1, 90:1, 85:1, 80:1, 75:1, 70:1, 69:1, 68:1, 67:1, 66:1, 65:1, 64:1, 63:1, 62:1, 61:1, 60:1, 59:1, 58:1, 57:1, 56:1, 55:1, 54:1, 53:1, 52:1, 51:1, 50:1, 49:1, 48:1, 47:1, 46:1, 45:1, 44:1, 43:1, 42:1, 41:1, 40:1, 39:1, 38:1, 37:1, 36:1, 35:1, 34:1, 33:1, 32:1, 31:1, 30:1, 29:1, 28:1, 27:1, 26:1, 25:1, 24:1, 23:1, 22:1, 21:1, 20:1, 19:1, 18:1, 17:1, 16:1, 15:1, 14:1, 13:1, 12:1, 11:1, 10:1, 9:1, 8:1, 7:1, 6:1, 5:1, 4:1, 3:1, 2:1, 1:1, 0.9:1, 0.8:1, 0.7:1, 0.6:1, 0.5:1, 0.4:1, 0.3:1, 0.2:1, or 0.1:1. In some embodiments, the molar ratio of the guide polynucleotide and the nucleic acid encoding the base editor fusion protein is at least about 1:10000, 1:9500, 1:9000, 1:8500, 1:8000, 1:7500, 1:7000, 1:6500, 1:6000, 1:5500, 1:5000, 1:4500, 1:4000, 1:3500, 1:3000, 1:2500, 1:2000, 1:1500, 1:1000, 1:950, 1:900, 1:850, 1:800, 1:750, 1:700, 1:650, 1:600, 1:550, 1:500, 1:450, 1:400, 1:350, 1:300, 1:250, 1:200, 1:190, 1:180, 1:170, 1:160, 1:150, 1:140, 1:130, 1:120, 1:110, 1:100, 1:95, 1:90, 1:85, 1:80, 1:75, 1:70, 1:69, 1:68, 1:67, 1:66, 1:65, 1:64, 1:63, 1:62, 1:61, 1:60, 1:59, 1:58, 1:57, 1:56, 1:55, 1:54, 1:53, 1:52, 1:51, 1:50, 1:49, 1:48, 1:47, 1:46, 1:45, 1:44, 1:43, 1:42, 1:41, 1:40, 1:39, 1:38, 1:37, 1:36, 1:35, 1:34, 1:33, 1:32, 1:31, 1:30, 1:29, 1:28, 1:27, 1:26, 1:25, 1:24, 1:23, 1:22, 1:21, 1:20, 1:19, 1:18, 1:17, 1:16, 1:15, 1:14, 1:13, 1:12, 1:11, 1:10, 1:9, 1:8, 1:7, 1:6, 1:5, 1:4, 1:3, 1:2, 1:1, 1:0.9, 1:0.8, 1:0.7, 1:0.6, 1:0.5, 1:0.4, 1:0.3, 1:0.2, or 1:0.1. In some embodiments, the molar ratio of the guide polynucleotide and the nucleic acid encoding the base editor fusion protein is at least about 10000:1, 9500:1, 9000:1, 8500:1, 8000:1, 7500:1, 7000:1, 6500:1, 6000:1, 5500:1, 5000:1, 4500:1, 4000:1, 3500:1, 3000:1, 2500:1, 2000:1, 1500:1, 1000:1, 950:1, 900:1, 850:1, 800:1, 750:1, 700:1, 650:1, 600:1, 550:1, 500:1, 450:1, 400:1, 350:1, 300:1, 250:1, 200:1, 190:1, 180:1, 170:1, 160:1, 150:1, 140:1, 130:1, 120:1, 110:1, 100:1, 95:1, 90:1, 85:1, 80:1, 75:1, 70:1, 69:1, 68:1, 67:1, 66:1, 65:1, 64:1, 63:1, 62:1, 61:1, 60:1, 59:1, 58:1, 57:1, 56:1, 55:1, 54:1, 53:1, 52:1, 51:1, 50:1, 49:1, 48:1, 47:1, 46:1, 45:1, 44:1, 43:1, 42:1, 41:1, 40:1, 39:1, 38:1, 37:1, 36:1, 35:1, 34:1, 33:1, 32:1, 31:1, 30:1, 29:1, 28:1, 27:1, 26:1, 25:1, 24:1, 23:1, 22:1, 21:1, 20:1, 19:1, 18:1, 17:1, 16:1, 15:1, 14:1, 13:1, 12:1, 11:1, 10:1, 9:1, 8:1, 7:1, 6:1, 5:1, 4:1, 3:1, 2:1, 1:1, 0.9:1, 0.8:1, 0.7:1, 0.6:1, 0.5:1, 0.4:1, 0.3:1, 0.2:1, or 0.1:1. In some embodiments, the molar ratio of the guide polynucleotide and the nucleic acid encoding the base editor fusion protein is at least about 1:10000, 1:9500, 1:9000, 1:8500, 1:8000, 1:7500, 1:7000, 1:6500, 1:6000, 1:5500, 1:5000, 1:4500, 1:4000, 1:3500, 1:3000, 1:2500, 1:2000, 1:1500, 1:1000, 1:950, 1:900, 1:850, 1:800, 1:750, 1:700, 1:650, 1:600, 1:550, 1:500, 1:450, 1:400, 1:350, 1:300, 1:250, 1:200, 1:190, 1:180, 1:170, 1:160, 1:150, 1:140, 1:130, 1:120, 1:110, 1:100, 1:95, 1:90, 1:85, 1:80, 1:75, 1:70, 1:69, 1:68, 1:67, 1:66, 1:65, 1:64, 1:63, 1:62, 1:61, 1:60, 1:59, 1:58, 1:57, 1:56, 1:55, 1:54, 1:53, 1:52, 1:51, 1:50, 1:49, 1:48, 1:47, 1:46, 1:45, 1:44, 1:43, 1:42, 1:41, 1:40, 1:39, 1:38, 1:37, 1:36, 1:35, 1:34, 1:33, 1:32, 1:31, 1:30, 1:29, 1:28, 1:27, 1:26, 1:25, 1:24, 1:23, 1:22, 1:21, 1:20, 1:19, 1:18, 1:17, 1:16, 1:15, 1:14, 1:13, 1:12, 1:11, 1:10, 1:9, 1:8, 1:7, 1:6, 1:5, 1:4, 1:3, 1:2, 1:1, 1:0.9, 1:0.8, 1:0.7, 1:0.6, 1:0.5, 1:0.4, 1:0.3, 1:0.2, or 1:0.1. In some embodiments, the molar ratio of the guide polynucleotide and the nucleic acid encoding the base editor fusion protein is at most about 10000:1, 9500:1, 9000:1, 8500:1, 8000:1, 7500:1, 7000:1, 6500:1, 6000:1, 5500:1, 5000:1, 4500:1, 4000:1, 3500:1, 3000:1, 2500:1, 2000:1, 1500:1, 1000:1, 950:1, 900:1, 850:1, 800:1, 750:1, 700:1, 650:1, 600:1, 550:1, 500:1, 450:1, 400:1, 350:1, 300:1, 250:1, 200:1, 190:1, 180:1, 170:1, 160:1, 150:1, 140:1, 130:1, 120:1, 110:1, 100:1, 95:1, 90:1, 85:1, 80:1, 75:1, 70:1, 69:1, 68:1, 67:1, 66:1, 65:1, 64:1, 63:1, 62:1, 61:1, 60:1, 59:1, 58:1, 57:1, 56:1, 55:1, 54:1, 53:1, 52:1, 51:1, 50:1, 49:1, 48:1, 47:1, 46:1, 45:1, 44:1, 43:1, 42:1, 41:1, 40:1, 39:1, 38:1, 37:1, 36:1, 35:1, 34:1, 33:1, 32:1, 31:1, 30:1, 29:1, 28:1, 27:1, 26:1, 25:1, 24:1, 23:1, 22:1, 21:1, 20:1, 19:1, 18:1, 17:1, 16:1, 15:1, 14:1, 13:1, 12:1, 11:1, 10:1, 9:1, 8:1, 7:1, 6:1, 5:1, 4:1, 3:1, 2:1, 1:1, 0.9:1, 0.8:1, 0.7:1, 0.6:1, 0.5:1, 0.4:1, 0.3:1, 0.2:1, or 0.1:1. In some embodiments, the molar ratio of the guide polynucleotide and the nucleic acid encoding the base editor fusion protein is at most about 1:10000, 1:9500, 1:9000, 1:8500, 1:8000, 1:7500, 1:7000, 1:6500, 1:6000, 1:5500, 1:5000, 1:4500, 1:4000, 1:3500, 1:3000, 1:2500, 1:2000, 1:1500, 1:1000, 1:950, 1:900, 1:850, 1:800, 1:750, 1:700, 1:650, 1:600, 1:550, 1:500, 1:450, 1:400, 1:350, 1:300, 1:250, 1:200, 1:190, 1:180, 1:170, 1:160, 1:150, 1:140, 1:130, 1:120, 1:110, 1:100, 1:95, 1:90, 1:85, 1:80, 1:75, 1:70, 1:69, 1:68, 1:67, 1:66, 1:65, 1:64, 1:63, 1:62, 1:61, 1:60, 1:59, 1:58, 1:57, 1:56, 1:55, 1:54, 1:53, 1:52, 1:51, 1:50, 1:49, 1:48, 1:47, 1:46, 1:45, 1:44, 1:43, 1:42, 1:41, 1:40, 1:39, 1:38, 1:37, 1:36, 1:35, 1:34, 1:33, 1:32, 1:31, 1:30, 1:29, 1:28, 1:27, 1:26, 1:25, 1:24, 1:23, 1:22, 1:21, 1:20, 1:19, 1:18, 1:17, 1:16, 1:15, 1:14, 1:13, 1:12, 1:11, 1:10, 1:9, 1:8, 1:7, 1:6, 1:5, 1:4, 1:3, 1:2, 1:1, 1:0.9, 1:0.8, 1:0.7, 1:0.6, 1:0.5, 1:0.4, 1:0.3, 1:0.2, or 1:0.1.

[0478] In some embodiments, the ratio of a nucleic acid encoding the guide polynucleotide and the nucleic acid encoding the base editor fusion protein is about 10:1 to about 1:10 by weight. In some embodiments, the ratio of a nucleic acid encoding the guide polynucleotide and the nucleic acid encoding the base editor fusion protein is about 4:1, 3.1, 2:1, 1.5:1, 1:1, 1:1.5, 1:2, 1:3, or 1:4 by weight. In some embodiments, the molar ratio of a nucleic acid encoding the guide polynucleotide and the nucleic acid encoding the base editor fusion protein is about 500:1 to about 1:500.

[0479] In some embodiments, the ratio of a nucleic acid encoding the guide polynucleotide and the nucleic acid encoding the base editor fusion protein is about 1000:1 to about 1:1000 by weight. In some embodiments, the ratio of a nucleic acid encoding the guide polynucleotide and the nucleic acid encoding the base editor fusion protein is about 1000:1, 950:1, 900:1, 850:1, 800:1, 750:1, 700:1, 650:1, 600:1, 550:1, 500:1, 450:1, 400:1, 350:1, 300:1, 250:1, 200:1, 100:1, 95:1, 90:1, 85:1, 80:1, 75:1, 70:1, 65:1, 60:1, 55:1, 50:1, 45:1, 40:1, 35:1, 30:1, 25:1, 20:1, 19:1, 18:1, 17:1, 17:1, 15:1, 14:1, 13:1, 12:1, 11:1, 10:1, 9:1, 8:1, 7:1, 6:1, 5:1, 4:1, 3:1, 2.1, 1.9:1, 1.8:1, 1.7:1, 1.6:1, 1.5:1, 1.4:1, 1.3:1, 1.2:1, 1.1:1, 1.0:1, 0.9:1, 0.8:1, 0.7:1, 0.6:1, 0.5:1, 0.4:1, 0.3:1, 0.2:1, or 0.1 by weight. In some embodiments, the ratio of a nucleic acid encoding the guide polynucleotide and the nucleic acid encoding the base editor fusion protein is about 1:0.1, 1:0.2, 1:0.3, 1:0.4, 1:0.5, 1:0.6, 1:0.7, 1:0.8, 1:0.9, 1:1.0, 1:1.1, 1:1.2, 1:1.3, 1:1.4, 1:1.5, 1:1.6, 1:1.7, 1:1.8, 1:1.9, 1:2, 1:3, 1:4, 1:5, 1:6, 1:7, 1:8, 1:9, 1:10, 1:11, 1:12, 1:13, 1:14, 1:15, 1:16, 1:17, 1:18, 1:19, 1:20, 1:25, 1:30, 1:35, 1:40, 1:45, 1:50, 1:55, 1:60, 1:65, 1:70, 1:75, 1:80, 1:85, 1:90, 1:95, 1:100, 1:150, 1:200, 1:250, 1:300, 1:350, 1:400, 1:450, 1:500, 1:550, 1:600, 1:650, 1:700, 1:750, 1:800, 1:850, 1:900, 1:950, or 1:1000 by weight. In some embodiments, the ratio of a nucleic acid encoding the guide polynucleotide and the nucleic acid encoding the base editor fusion protein is at least about 1000:1, 950:1, 900:1, 850:1, 800:1, 750:1, 700:1, 650:1, 600:1, 550:1, 500:1, 450:1, 400:1, 350:1, 300:1, 250:1, 200:1, 100:1, 95:1, 90:1, 85:1, 80:1, 75:1, 70:1, 65:1, 60:1, 55:1, 50:1, 45:1, 40:1, 35:1, 30:1, 25:1, 20:1, 19:1, 18:1, 17:1, 17:1, 15:1, 14:1, 13:1, 12:1, 11:1, 10:1, 9:1, 8:1, 7:1, 6:1, 5:1, 4:1, 3:1, 2.1, 1.9:1, 1.8:1, 1.7:1, 1.6:1, 1.5:1, 1.4:1, 1.3:1, 1.2:1, 1.1:1, 1.0:1, 0.9:1, 0.8:1, 0.7:1, 0.6:1, 0.5:1, 0.4:1, 0.3:1, 0.2:1, or 0.1 by weight. In some embodiments, the ratio of a nucleic acid encoding the guide polynucleotide and the nucleic acid encoding the base editor fusion protein is at least about 1:0.1, 1:0.2, 1:0.3, 1:0.4, 1:0.5, 1:0.6, 1:0.7, 1:0.8, 1:0.9, 1:1.0, 1:1.1, 1:1.2, 1:1.3, 1:1.4, 1:1.5, 1:1.6, 1:1.7, 1:1.8, 1:1.9, 1:2, 1:3, 1:4, 1:5, 1:6, 1:7, 1:8, 1:9, 1:10, 1:11, 1:12, 1:13, 1:14, 1:15, 1:16, 1:17, 1:18, 1:19, 1:20, 1:25, 1:30, 1:35, 1:40, 1:45, 1:50, 1:55, 1:60, 1:65, 1:70, 1:75, 1:80, 1:85, 1:90, 1:95, 1:100, 1:150, 1:200, 1:250, 1:300, 1:350, 1:400, 1:450, 1:500, 1:550, 1:600, 1:650, 1:700, 1:750, 1:800, 1:850, 1:900, 1:950, or 1:1000 by weight. In some embodiments, the ratio of a nucleic acid encoding the guide polynucleotide and the nucleic acid encoding the base editor fusion protein is at most about 1000:1, 950:1, 900:1, 850:1, 800:1, 750:1, 700:1, 650:1, 600:1, 550:1, 500:1, 450:1, 400:1, 350:1, 300:1, 250:1, 200:1, 100:1, 95:1, 90:1, 85:1, 80:1, 75:1, 70:1, 65:1, 60:1, 55:1, 50:1, 45:1, 40:1, 35:1, 30:1, 25:1, 20:1, 19:1, 18:1, 17:1, 17:1, 15:1, 14:1, 13:1, 12:1, 11:1, 10:1, 9:1, 8:1, 7:1, 6:1, 5:1, 4:1, 3:1, 2.1, 1.9:1, 1.8:1, 1.7:1, 1.6:1, 1.5:1, 1.4:1, 1.3:1, 1.2:1, 1.1:1, 1.0:1, 0.9:1, 0.8:1, 0.7:1, 0.6:1, 0.5:1, 0.4:1, 0.3:1, 0.2:1, or 0.1 by weight. In some embodiments, the ratio of a nucleic acid encoding the guide polynucleotide and the nucleic acid encoding the base editor fusion protein is at most about 1:0.1, 1:0.2, 1:0.3, 1:0.4, 1:0.5, 1:0.6, 1:0.7, 1:0.8, 1:0.9, 1:1.0, 1:1.1, 1:1.2, 1:1.3, 1:1.4, 1:1.5, 1:1.6, 1:1.7, 1:1.8, 1:1.9, 1:2, 1:3, 1:4, 1:5, 1:6, 1:7, 1:8, 1:9, 1:10, 1:11, 1:12, 1:13, 1:14, 1:15, 1:16, 1:17, 1:18, 1:19, 1:20, 1:25, 1:30, 1:35, 1:40, 1:45, 1:50, 1:55, 1:60, 1:65, 1:70, 1:75, 1:80, 1:85, 1:90, 1:95, 1:100, 1:150, 1:200, 1:250, 1:300, 1:350, 1:400, 1:450, 1:500, 1:550, 1:600, 1:650, 1:700, 1:750, 1:800, 1:850, 1:900, 1:950, or 1:1000 by weight.

[0480] In some embodiments, the molar ratio of a nucleic acid encoding the guide polynucleotide and the nucleic acid encoding the base editor fusion protein is about 10000:1 to about 1:10000. In some embodiments, the molar ratio of a nucleic acid encoding the guide polynucleotide and the nucleic acid encoding the base editor fusion protein is about 10000:1, 9500:1, 9000:1, 8500:1, 8000:1, 7500:1, 7000:1, 6500:1, 6000:1, 5500:1, 5000:1, 4500:1, 4000:1, 3500:1, 3000:1, 2500:1, 2000:1, 1500:1, 1000:1, 950:1, 900:1, 850:1, 800:1, 750:1, 700:1, 650:1, 600:1, 550:1, 500:1, 450:1, 400:1, 350:1, 300:1, 250:1, 200:1, 190:1, 180:1, 170:1, 160:1, 150:1, 140:1, 130:1, 120:1, 110:1, 100:1, 95:1, 90:1, 85:1, 80:1, 75:1, 70:1, 69:1, 68:1, 67:1, 66:1, 65:1, 64:1, 63:1, 62:1, 61:1, 60:1, 59:1, 58:1, 57:1, 56:1, 55:1, 54:1, 53:1, 52:1, 51:1, 50:1, 49:1, 48:1, 47:1, 46:1, 45:1, 44:1, 43:1, 42:1, 41:1, 40:1, 39:1, 38:1, 37:1, 36:1, 35:1, 34:1, 33:1, 32:1, 31:1, 30:1, 29:1, 28:1, 27:1, 26:1, 25:1, 24:1, 23:1, 22:1, 21:1, 20:1, 19:1, 18:1, 17:1, 16:1, 15:1, 14:1, 13:1, 12:1, 11:1, 10:1, 9:1, 8:1, 7:1, 6:1, 5:1, 4:1, 3:1, 2:1, 1:1, 0.9:1, 0.8:1, 0.7:1, 0.6:1, 0.5:1, 0.4:1, 0.3:1, 0.2:1, or 0.1:1. In some embodiments, the molar ratio of a nucleic acid encoding the guide polynucleotide and the nucleic acid encoding the base editor fusion protein is at least about 1:10000, 1:9500, 1:9000, 1:8500, 1:8000, 1:7500, 1:7000, 1:6500, 1:6000, 1:5500, 1:5000, 1:4500, 1:4000, 1:3500, 1:3000, 1:2500, 1:2000, 1:1500, 1:1000, 1:950, 1:900, 1:850, 1:800, 1:750, 1:700, 1:650, 1:600, 1:550, 1:500, 1:450, 1:400, 1:350, 1:300, 1:250, 1:200, 1:190, 1:180, 1:170, 1:160, 1:150, 1:140, 1:130, 1:120, 1:110, 1:100, 1:95, 1:90, 1:85, 1:80, 1:75, 1:70, 1:69, 1:68, 1:67, 1:66, 1:65, 1:64, 1:63, 1:62, 1:61, 1:60, 1:59, 1:58, 1:57, 1:56, 1:55, 1:54, 1:53, 1:52, 1:51, 1:50, 1:49, 1:48, 1:47, 1:46, 1:45, 1:44, 1:43, 1:42, 1:41, 1:40, 1:39, 1:38, 1:37, 1:36, 1:35, 1:34, 1:33, 1:32, 1:31, 1:30, 1:29, 1:28, 1:27, 1:26, 1:25, 1:24, 1:23, 1:22, 1:21, 1:20, 1:19, 1:18, 1:17, 1:16, 1:15, 1:14, 1:13, 1:12, 1:11, 1:10, 1:9, 1:8, 1:7, 1:6, 1:5, 1:4, 1:3, 1:2, 1:1, 1:0.9, 1:0.8, 1:0.7, 1:0.6, 1:0.5, 1:0.4, 1:0.3, 1:0.2, or 1:0.1. In some embodiments, the molar ratio of a nucleic acid encoding the guide polynucleotide and the nucleic acid encoding the base editor fusion protein is at least about 10000:1, 9500:1, 9000:1, 8500:1, 8000:1, 7500:1, 7000:1, 6500:1, 6000:1, 5500:1, 5000:1, 4500:1, 4000:1, 3500:1, 3000:1, 2500:1, 2000:1, 1500:1, 1000:1, 950:1, 900:1, 850:1, 800:1, 750:1, 700:1, 650:1, 600:1, 550:1, 500:1, 450:1, 400:1, 350:1, 300:1, 250:1, 200:1, 190:1, 180:1, 170:1, 160:1, 150:1, 140:1, 130:1, 120:1, 110:1, 100:1, 95:1, 90:1, 85:1, 80:1, 75:1, 70:1, 69:1, 68:1, 67:1, 66:1, 65:1, 64:1, 63:1, 62:1, 61:1, 60:1, 59:1, 58:1, 57:1, 56:1, 55:1, 54:1, 53:1, 52:1, 51:1, 50:1, 49:1, 48:1, 47:1, 46:1, 45:1, 44:1, 43:1, 42:1, 41:1, 40:1, 39:1, 38:1, 37:1, 36:1, 35:1, 34:1, 33:1, 32:1, 31:1, 30:1, 29:1, 28:1, 27:1, 26:1, 25:1, 24:1, 23:1, 22:1, 21:1, 20:1, 19:1, 18:1, 17:1, 16:1, 15:1, 14:1, 13:1, 12:1, 11:1, 10:1, 9:1, 8:1, 7:1, 6:1, 5:1, 4:1, 3:1, 2:1, 1:1, 0.9:1, 0.8:1, 0.7:1, 0.6:1, 0.5:1, 0.4:1, 0.3:1, 0.2:1, or 0.1:1. In some embodiments, the molar ratio of a nucleic acid encoding the guide polynucleotide and the nucleic acid encoding the base editor fusion protein is at least about 1:10000, 1:9500, 1:9000, 1:8500, 1:8000, 1:7500, 1:7000, 1:6500, 1:6000, 1:5500, 1:5000, 1:4500, 1:4000, 1:3500, 1:3000, 1:2500, 1:2000, 1:1500, 1:1000, 1:950, 1:900, 1:850, 1:800, 1:750, 1:700, 1:650, 1:600, 1:550, 1:500, 1:450, 1:400, 1:350, 1:300, 1:250, 1:200, 1:190, 1:180, 1:170, 1:160, 1:150, 1:140, 1:130, 1:120, 1:110, 1:100, 1:95, 1:90, 1:85, 1:80, 1:75, 1:70, 1:69, 1:68, 1:67, 1:66, 1:65, 1:64, 1:63, 1:62, 1:61, 1:60, 1:59, 1:58, 1:57, 1:56, 1:55, 1:54, 1:53, 1:52, 1:51, 1:50, 1:49, 1:48, 1:47, 1:46, 1:45, 1:44, 1:43, 1:42, 1:41, 1:40, 1:39, 1:38, 1:37, 1:36, 1:35, 1:34, 1:33, 1:32, 1:31, 1:30, 1:29, 1:28, 1:27, 1:26, 1:25, 1:24, 1:23, 1:22, 1:21, 1:20, 1:19, 1:18, 1:17, 1:16, 1:15, 1:14, 1:13, 1:12, 1:11, 1:10, 1:9, 1:8, 1:7, 1:6, 1:5, 1:4, 1:3, 1:2, 1:1, 1:0.9, 1:0.8, 1:0.7, 1:0.6, 1:0.5, 1:0.4, 1:0.3, 1:0.2, or 1:0.1. In some embodiments, the molar ratio of a nucleic acid encoding the guide polynucleotide and the nucleic acid encoding the base editor fusion protein is at most about 10000:1, 9500:1, 9000:1, 8500:1, 8000:1, 7500:1, 7000:1, 6500:1, 6000:1, 5500:1, 5000:1, 4500:1, 4000:1, 3500:1, 3000:1, 2500:1, 2000:1, 1500:1, 1000:1, 950:1, 900:1, 850:1, 800:1, 750:1, 700:1, 650:1, 600:1, 550:1, 500:1, 450:1, 400:1, 350:1, 300:1, 250:1, 200:1, 190:1, 180:1, 170:1, 160:1, 150:1, 140:1, 130:1, 120:1, 110:1, 100:1, 95:1, 90:1, 85:1, 80:1, 75:1, 70:1, 69:1, 68:1, 67:1, 66:1, 65:1, 64:1, 63:1, 62:1, 61:1, 60:1, 59:1, 58:1, 57:1, 56:1, 55:1, 54:1, 53:1, 52:1, 51:1, 50:1, 49:1, 48:1, 47:1, 46:1, 45:1, 44:1, 43:1, 42:1, 41:1, 40:1, 39:1, 38:1, 37:1, 36:1, 35:1, 34:1, 33:1, 32:1, 31:1, 30:1, 29:1, 28:1, 27:1, 26:1, 25:1, 24:1, 23:1, 22:1, 21:1, 20:1, 19:1, 18:1, 17:1, 16:1, 15:1, 14:1, 13:1, 12:1, 11:1, 10:1, 9:1, 8:1, 7:1, 6:1, 5:1, 4:1, 3:1, 2:1, 1:1, 0.9:1, 0.8:1, 0.7:1, 0.6:1, 0.5:1, 0.4:1, 0.3:1, 0.2:1, or 0.1:1. In some embodiments, the molar ratio of a nucleic acid encoding the guide polynucleotide and the nucleic acid encoding the base editor fusion protein is at most about 1:10000, 1:9500, 1:9000, 1:8500, 1:8000, 1:7500, 1:7000, 1:6500, 1:6000, 1:5500, 1:5000, 1:4500, 1:4000, 1:3500, 1:3000, 1:2500, 1:2000, 1:1500, 1:1000, 1:950, 1:900, 1:850, 1:800, 1:750, 1:700, 1:650, 1:600, 1:550, 1:500, 1:450, 1:400, 1:350, 1:300, 1:250, 1:200, 1:190, 1:180, 1:170, 1:160, 1:150, 1:140, 1:130, 1:120, 1:110, 1:100, 1:95, 1:90, 1:85, 1:80, 1:75, 1:70, 1:69, 1:68, 1:67, 1:66, 1:65, 1:64, 1:63, 1:62, 1:61, 1:60, 1:59, 1:58, 1:57, 1:56, 1:55, 1:54, 1:53, 1:52, 1:51, 1:50, 1:49, 1:48, 1:47, 1:46, 1:45, 1:44, 1:43, 1:42, 1:41, 1:40, 1:39, 1:38, 1:37, 1:36, 1:35, 1:34, 1:33, 1:32, 1:31, 1:30, 1:29, 1:28, 1:27, 1:26, 1:25, 1:24, 1:23, 1:22, 1:21, 1:20, 1:19, 1:18, 1:17, 1:16, 1:15, 1:14, 1:13, 1:12, 1:11, 1:10, 1:9, 1:8, 1:7, 1:6, 1:5, 1:4, 1:3, 1:2, 1:1, 1:0.9, 1:0.8, 1:0.7, 1:0.6, 1:0.5, 1:0.4, 1:0.3, 1:0.2, or 1:0.1.

[0481] In some embodiments, the nucleobase alteration results in a reduction of at least 35% in blood PCSK9 protein level in the subject as compared to prior to the administration as measured by ELISA, Western blots, or LC-MS/MS.

[0482] In some embodiments, the nucleobase alteration results in a reduction of at least 30%, 35%, 40%, 45%, 50%, 55%, 60%, 65%, 70%, 75%, 80%, 85%, 90%, 95%, 97%, 98%, or 99% in blood PCSK9 protein level in the subject as compared to prior to the administration as measured by ELISA, Western blots, or LC-MS/MS.

[0483] In some embodiments, the nucleobase alteration results in a reduction of at least 1%, 2%, 3%, 4%, 5%, 6%, 7%, 8%, 9%, 10%, 15%, 20%, 25%, 30%, 31%, 32%, 33%, 34%, 35%, 36%, 37%, 38%, 39%, 40%, 45%, 50%, 55%, 60%, 65%, 70%, 71%, 72%, 73%, 74%, 75%, 76%, 77%, 78%, 79%, 80%, 85%, 90%, 95%, 97%, 98%, 90%, 95%, 97%, 98%, 99%, 99.3%, 99.5%, 99.7%, 99.8%, or 99.9% in blood PCSK9 protein level in the subject as compared to prior to the administration as measured by ELISA, Western blots, or LC-MS/MS. In some embodiments, the nucleobase alteration results in a reduction of at most 1%, 2%, 3%, 4%, 5%, 6%, 7%, 8%, 9%, 10%, 15%, 20%, 25%, 30%, 31%, 32%, 33%, 34%, 35%, 36%, 37%, 38%, 39%, 40%, 45%, 50%, 55%, 60%, 65%, 70%, 71%, 72%, 73%, 74%, 75%, 76%, 77%, 78%, 79%, 80%, 85%, 90%, 95%, 97%, 98%, 90%, 95%, 97%, 98%, 99%, 99.3%, 99.5%, 99.7%, 99.8%, or 99.9% in blood PCSK9 protein level in the subject as compared to prior to the administration as measured by ELISA, Western blots, or LC-MS/MS. In some embodiments, the nucleobase alteration results in a reduction of 1%-99.9%, 2%-99.9%, 3%-99.9%, 4%-99.9%, 5%-99.9%, 6%-99.9%, 7%-99.9%, 8%-99.9%, 9%-99.9%, 10%-99.9%, 15%-99.9%, 20%-99.9%, 25%-99.9%, 30%-99.9%, 31%-99.9%, 32%-99.9%, 33%-99.9%, 34%-99.9%, 35%-99.9%, 36%-99.9%, 37%-99.9%, 38%-99.9%, 39%-99.9%, 40%-99.9%, 45%-99.9%, 50%-99.9%, 55%-99.9%, 60%-99.9%, 65%-99.9%, 70%-99.9%, 75%-99.9%, 80%-99.9%, 85%-99.9%, 90%-99.9%, or 95-99.9% in blood PCSK9 protein level in the subject as compared to prior to the administration as measured by ELISA, Western blots, or LC-MS/MS. In some embodiments, the nucleobase alteration results in a reduction of 1%-99.5%, 1%-99%, 1%-98%, 1%-97%, 1%-96%, 1%-95%, 1%-90%, 1%-85%, 1%-80%, 1%-79%, 1%-78%, 1%-77%, 1%-76%, 1%-75%, 1%-74%, 1%-73%, 1%-72%, 1%-71%, 1%-70%, 1%-65%, 1%-60%, 1%-55%, 1%-50%, 1%-45%, 1%-40%, 1%-39%, 1%-38%, 1%-37%, 1%-36%, 1%-35%, 1%-34%, 1%-33%, 1%-32%, 1%-31%, 1%-30%, 1%-25%, 1%-20%, 1%-15%, 1%-10%, 1%-9%, 1%-8%, 1%-7%, 1%-6%, 1%-5%, 1%-4%, 1%-3%, or 1%-2% in blood PCSK9 protein level in the subject as compared to prior to the administration as measured by ELISA, Western blots, or LC-MS/MS. In some embodiments, the nucleobase alteration results in a reduction of 1%-99.9%, 5%-99.5%, 10%-99%, 15%-97%, 20%-95%, 25%-90%, 30%-85%, 31%-80%, 32%-79%, 33%-78%, 34%-77%, 35%-76%, 36%-76%, 37%-75%, 38%-74%, 39%-73%, 40%-72%, 45%-71%, 50%-70%, or 55%-65% in blood PCSK9 protein level in the subject as compared to prior to the administration as measured by ELISA, Western blots, or LC-MS/MS. In some embodiments, the nucleobase alteration results in a reduction of 100% in blood PCSK9 protein level in the subject as compared to prior to the administration as measured by ELISA, Western blots, or LC-MS/MS.

[0484] In some embodiments, the nucleobase alteration results in at least 1%, 2%, 3%, 4%, 5%, 6%, 7%, 8%, 9%, 10%, 11%, 12%, 13%, 14%, 15%, 20%, 25%, 30%, 35%, 40%, 50%, 75%, 90%, 100%, 110%, 120%, 130%, 140%, 150%, 160%, 170%, 180%, 190%, 200%, 210%, 220%, 230%, 240%, 250%, 260%, 270%, 280%, 290%, 300%, 400% 500%, 600%, 700%, 800%, 900%, 1000% less blood PCSK9 protein level in the subject as compared to prior to the administration as measured by ELISA, Western blots, or LC-MS/MS. In some embodiments, the nucleobase alteration results in at least 1.1-fold, 1.2-fold, 1.3-fold, 1.4-fold, 1.5-fold, 1.6-fold, 1.7-fold, 1.8-fold, 1.9-fold, 2-fold, 2.5-fold, 3-fold, 3.5-fold, 4-fold, 4.5-fold, 5-fold, 6-fold, 7-fold, 8-fold, 9-fold, 10-fold, or more than 10-fold less blood PCSK9 protein level in the subject as compared to prior to the administration as measured by ELISA, Western blots, or LC-MS/MS.

[0485] In some embodiments, the reduction of blood PCSK9 protein level or the blood PCSK9 protein level in the subject as compared to prior to the administration is measured by ELISA (enzyme-linked immunosorbent assay). In some embodiments, the reduction of blood PCSK9 protein level or the blood PCSK9 protein level in the subject as compared to prior to the administration is measured by Western blot analysis. In some embodiments, the reduction of blood PCSK9 protein level or the blood PCSK9 protein level in the subject as compared to prior to the administration is measured by LC-MS/MS (liquid chromatography-tandem mass spectrometry).

[0486] In some embodiments, the nucleobase alteration results in a reduction of at least 35% in blood ANGPTL3 protein level in the subject as compared to prior to the administration as measured by ELISA, Western blots, or LC-MS/MS.

[0487] In some embodiments, the nucleobase alteration results in a reduction of at least 30%, 35%, 40%, 45%, 50%, 55%, 60%, 65%, 70%, 75%, 80%, 85%, 90%, 95%, 97%, 98%, or 99% in blood ANGPTL3 protein level in the subject as compared to prior to the administration as measured by ELISA, Western blots, or LC-MS/MS.

[0488] In some embodiments, the nucleobase alteration results in a reduction of at least 1%, 2%, 3%, 4%, 5%, 6%, 7%, 8%, 9%, 10%, 15%, 20%, 25%, 30%, 31%, 32%, 33%, 34%, 35%, 36%, 37%, 38%, 39%, 40%, 45%, 50%, 55%, 60%, 65%, 70%, 71%, 72%, 73%, 74%, 75%, 76%, 77%, 78%, 79%, 80%, 85%, 90%, 95%, 97%, 98%, 90%, 95%, 97%, 98%, 99%, 99.3%, 99.5%, 99.7%, 99.8%, or 99.9% in blood ANGPTL3 protein level in the subject as compared to prior to the administration as measured by ELISA, Western blots, or LC-MS/MS. In some embodiments, the nucleobase alteration results in a reduction of at most 1%, 2%, 3%, 4%, 5%, 6%, 7%, 8%, 9%, 10%, 15%, 20%, 25%, 30%, 31%, 32%, 33%, 34%, 35%, 36%, 37%, 38%, 39%, 40%, 45%, 50%, 55%, 60%, 65%, 70%, 71%, 72%, 73%, 74%, 75%, 76%, 77%, 78%, 79%, 80%, 85%, 90%, 95%, 97%, 98%, 90%, 95%, 97%, 98%, 99%, 99.3%, 99.5%, 99.7%, 99.8%, or 99.9% in blood ANGPTL3 protein level in the subject as compared to prior to the administration as measured by ELISA, Western blots, or LC-MS/MS. In some embodiments, the nucleobase alteration results in a reduction of 1%-99.9%, 2%-99.9%, 3%-99.9%, 4%-99.9%, 5%-99.9%, 6%-99.9%, 7%-99.9%, 8%-99.9%, 9%-99.9%, 10%-99.9%, 15%-99.9%, 20%-99.9%, 25%-99.9%, 30%-99.9%, 31%-99.9%, 32%-99.9%, 33%-99.9%, 34%-99.9%, 35%-99.9%, 36%-99.9%, 37%-99.9%, 38%-99.9%, 39%-99.9%, 40%-99.9%, 45%-99.9%, 50%-99.9%, 55%-99.9%, 60%-99.9%, 65%-99.9%, 70%-99.9%, 75%-99.9%, 80%-99.9%, 85%-99.9%, 90%-99.9%, or 95-99.9% in blood ANGPTL3 protein level in the subject as compared to prior to the administration as measured by ELISA, Western blots, or LC-MS/MS. In some embodiments, the nucleobase alteration results in a reduction of 1%-99.5%, 1%-99%, 1%-98%, 1%-97%, 1%-96%, 1%-95%, 1%-90%, 1%-85%, 1%-80%, 1%-79%, 1%-78%, 1%-77%, 1%-76%, 1%-75%, 1%-74%, 1%-73%, 1%-72%, 1%-71%, 1%-70%, 1%-65%, 1%-60%, 1%-55%, 1%-50%, 1%-45%, 1%-40%, 1%-39%, 1%-38%, 1%-37%, 1%-36%, 1%-35%, 1%-34%, 1%-33%, 1%-32%, 1%-31%, 1%-30%, 1%-25%, 1%-20%, 1%-15%, 1%-10%, 1%-9%, 1%-8%, 1%-7%, 1%-6%, 1%-5%, 1%-4%, 1%-3%, or 1%-2% in blood ANGPTL3 protein level in the subject as compared to prior to the administration as measured by ELISA, Western blots, or LC-MS/MS. In some embodiments, the nucleobase alteration results in a reduction of 1%-99.9%, 5%-99.5%, 10%-99%, 15%-97%, 20%-95%, 25%-90%, 30%-85%, 31%-80%, 32%-79%, 33%-78%, 34%-77%, 35%-76%, 36%-76%, 37%-75%, 38%-74%, 39%-73%, 40%-72%, 45%-71%, 50%-70%, or 55%-65% in blood ANGPTL3 protein level in the subject as compared to prior to the administration as measured by ELISA, Western blots, or LC-MS/MS. In some embodiments, the nucleobase alteration results in a reduction of 100% in blood ANGPTL3 protein level in the subject as compared to prior to the administration as measured by ELISA, Western blots, or LC-MS/MS.

[0489] In some embodiments, the nucleobase alteration results in at least 1%, 2%, 3%, 4%, 5%, 6%, 7%, 8%, 9%, 10%, 11%, 12%, 13%, 14%, 15%, 20%, 25%, 30%, 35%, 40%, 50%, 75%, 90%, 100%, 110%, 120%, 130%, 140%, 150%, 160%, 170%, 180%, 190%, 200%, 210%, 220%, 230%, 240%, 250%, 260%, 270%, 280%, 290%, 300%, 400% 500%, 600%, 700%, 800%, 900%, 1000% less blood ANGPTL3 protein level in the subject as compared to prior to the administration as measured by ELISA, Western blots, or LC-MS/MS. In some embodiments, the nucleobase alteration results in at least 1.1-fold, 1.2-fold, 1.3-fold, 1.4-fold, 1.5-fold, 1.6-fold, 1.7-fold, 1.8-fold, 1.9-fold, 2-fold, 2.5-fold, 3-fold, 3.5-fold, 4-fold, 4.5-fold, 5-fold, 6-fold, 7-fold, 8-fold, 9-fold, 10-fold, or more than 10-fold less blood ANGPTL3 protein level in the subject as compared to prior to the administration as measured by ELISA, Western blots, or LC-MS/MS.

[0490] In some embodiments, the reduction of blood ANGPTL3 protein level or the blood ANGPTL3 protein level in the subject as compared to prior to the administration is measured by ELISA (enzyme-linked immunosorbent assay). In some embodiments, the reduction of blood ANGPTL3 protein level or the blood ANGPTL3 protein level in the subject as compared to prior to the administration is measured by Western blot analysis. In some embodiments, the reduction of blood ANGPTL3 protein level or the blood ANGPTL3 protein level in the subject as compared to prior to the administration is measured by LC-MS/MS (liquid chromatography-tandem mass spectrometry).

[0491] In some embodiments, the nucleobase alteration results in a reduction of at least 35% in blood low-density lipoprotein cholesterol (LDL-C) level in the subject as compared to prior to the administration.

[0492] In some embodiments, the nucleobase alteration results in a reduction of at least 30%, 35%, 40%, 45%, 46%, 47%, 48%, 49%, 50%, 51%, 52%, 53%, 54%, 55%, 56%, 57%, 58%, 59%, 60%, 61%, 62%, 63%, 64%, 65%, 70%, 75%, 80%, 85%, 90%, 95%, 97%, 98%, or 99% in blood low-density lipoprotein cholesterol (LDL-C) level in the subject as compared to prior to the administration. In some embodiments, the nucleobase alteration results in a reduction of at least 1%, 2%, 3%, 4%, 5%, 6%, 7%, 8%, 9%, 10%, 15%, 20%, 25%, 30%, 35%, 40%, 45%, 46%, 47%, 48%, 49%, 50%, 51%, 52%, 53%, 54%, 55%, 56%, 57%, 58%, 59%, 60%, 61%, 62%, 63%, 64%, 65%, 70%, 75%, 80%, 85%, 90%, 95%, 97%, 98%, 99%, 99.3%, 99.5%, 99.7%, 99.8%, or 99.9% in blood low-density lipoprotein cholesterol (LDL-C) level in the subject as compared to prior to the administration. In some embodiments, the nucleobase alteration results in a reduction of at most 1%, 2%, 3%, 4%, 5%, 6%, 7%, 8%, 9%, 10%, 15%, 20%, 25%, 30%, 35%, 40%, 45%, 50%, 55%, 60%, 65%, 70%, 75%, 80%, 85%, 90%, 95%, 97%, 98%, 99%, 99.3%, 99.5%, 99.7%, 99.8%, or 99.9% in blood low-density lipoprotein cholesterol (LDL-C) level in the subject as compared to prior to the administration. In some embodiments, the nucleobase alteration results in a reduction of 1%-99.9%, 2%-99.9%, 3%-99.9%, 4%-99.9%, 5%-99.9%, 6%-99.9%, 7%-99.9%, 8%-99.9%, 9%-99.9%, 10%-99.9%, 15%-99.9%, 20%-99.9%, 25%-99.9%, 30%-99.9%, 35%-99.9%, 40%-99.9%, 45%-99.9%, 50%-99.9%, 55%-99.9%, 60%-99.9%, 65%-99.9%, 70%-99.9%, 75%-99.9%, 80%-99.9%, 85%-99.9%, 90%-99.9%, or 95-99.9% in blood low-density lipoprotein cholesterol (LDL-C) level in the subject as compared to prior to the administration. In some embodiments, the nucleobase alteration results in a reduction of 1%-99.5%, 1%-99%, 1%-98%, 1%-97%, 1%-96%, 1%-95%, 1%-90%, 1%-85%, 1%-80%, 1%-75%, 1%-70%, 1%-65%, 1%-60%, 1%-55%, 1%-50%, 1%-45%, 1%-40%, 1%-35%, 1%-30%, 1%-25%, 1%-20%, 1%-15%, 1%-10%, 1%-9%, 1%-8%, 1%-7%, 1%-6%, 1%-5%, 1%-4%, 1%-3%, or 1%-2% in blood low-density lipoprotein cholesterol (LDL-C) level in the subject as compared to prior to the administration. In some embodiments, the nucleobase alteration results in a reduction of 1%-99.9%, 5%-99.5%, 10%-99%, 15%-97%, 20%-95%, 25%-90%, 30%-85%, 35%-80%, 40%-75%, 45%-70%, 50%-65%, or 55%-60% in blood low-density lipoprotein cholesterol (LDL-C) level in the subject as compared to prior to the administration. In some embodiments, the nucleobase alteration results in a reduction of 100% in blood low-density lipoprotein cholesterol (LDL-C) level in the subject as compared to prior to the administration. In some embodiments, the nucleobase alteration results in at least 1%, 2%, 3%, 4%, 5%, 6%, 7%, 8%, 9%, 10%, 11%, 12%, 13%, 14%, 15%, 20%, 25%, 30%, 35%, 40%, 50%, 75%, 90%, 100%, 110%, 120%, 130%, 140%, 150%, 160%, 170%, 180%, 190%, 200%, 210%, 220%, 230%, 240%, 250%, 260%, 270%, 280%, 290%, 300%, 400% 500%, 600%, 700%, 800%, 900%, 1000% less blood low-density lipoprotein cholesterol (LDL-C) level in the subject as compared to prior to the administration. In some embodiments, the nucleobase alteration results in at least 1.1-fold, 1.2-fold, 1.3-fold, 1.4-fold, 1.5-fold, 1.6-fold, 1.7-fold, 1.8-fold, 1.9-fold, 2-fold, 2.5-fold, 3-fold, 3.5-fold, 4-fold, 4.5-fold, 5-fold, 6-fold, 7-fold, 8-fold, 9-fold, 10-fold, or more than 10-fold less blood low-density lipoprotein cholesterol (LDL-C) level in the subject as compared to prior to the administration.

[0493] In some embodiments, the nucleobase alteration results in a reduction of at least 35% in blood triglyceride level in the subject as compared to prior to the administration.

[0494] In some embodiments, the nucleobase alteration results in a reduction of at least 30%, 35%, 40%, 45%, 46%, 47%, 48%, 49%, 50%, 51%, 52%, 53%, 54%, 55%, 56%, 57%, 58%, 59% 60%, 61%, 62%, 63%, 64%, 65%, 70%, 75%, 80%, 85%, 90%, 95%, 97%, 98%, or 99% in blood triglyceride level in the subject as compared to prior to the administration. In some embodiments, the nucleobase alteration results in a reduction of at least 1%, 2%, 3%, 4%, 5%, 6%, 7%, 8%, 9%, 10%, 15%, 20%, 25%, 30%, 35%, 40%, 45%, 46%, 47%, 48%, 49%, 50%, 51%, 52%, 53%, 54%, 55%, 56%, 57%, 58%, 59%, 60%, 61%, 62%, 63%, 64%, 65%, 70%, 75%, 80%, 85%, 90%, 95%, 97%, 98%, 99%, 99.3%, 99.5%, 99.7%, 99.8%, or 99.9% in blood triglyceride level in the subject as compared to prior to the administration. In some embodiments, the nucleobase alteration results in a reduction of at most 1%, 2%, 3%, 4%, 5%, 6%, 7%, 8%, 9%, 10%, 15%, 20%, 25%, 30%, 35%, 40%, 45%, 50%, 55%, 60%, 65%, 70%, 75%, 80%, 85%, 90%, 95%, 97%, 98%, 99%, 99.3%, 99.5%, 99.7%, 99.8%, or 99.9% in blood triglyceride level in the subject as compared to prior to the administration. In some embodiments, the nucleobase alteration results in a reduction of 1%-99.9%, 2%-99.9%, 3%-99.9%, 4%-99.9%, 5%-99.9%, 6%-99.9%, 7%-99.9%, 8%-99.9%, 9%-99.9%, 10%-99.9%, 15%-99.9%, 20%-99.9%, 25%-99.9%, 30%-99.9%, 35%-99.9%, 40%-99.9%, 45%-99.9%, 50%-99.9%, 55%-99.9%, 60%-99.9%, 65%-99.9%, 70%-99.9%, 75%-99.9%, 80%-99.9%, 85%-99.9%, 90%-99.9%, or 95-99.9% in blood triglyceride level in the subject as compared to prior to the administration. In some embodiments, the nucleobase alteration results in a reduction of 1%-99.5%, 1%-99%, 1%-98%, 1%-97%, 1%-96%, 1%-95%, 1%-90%, 1%-85%, 1%-80%, 1%-75%, 1%-70%, 1%-65%, 1%-60%, 1%-55%, 1%-50%, 1%-45%, 1%-40%, 1%-35%, 1%-30%, 1%-25%, 1%-20%, 1%-15%, 1%-10%, 1%-9%, 1%-8%, 1%-7%, 1%-6%, 1%-5%, 1%-4%, 1%-3%, or 1%-2% in blood triglyceride level in the subject as compared to prior to the administration. In some embodiments, the nucleobase alteration results in a reduction of 1%-99.9%, 5%-99.5%, 10%-99%, 15%-97%, 20%-95%, 25%-90%, 30%-85%, 35%-80%, 40%-75%, 45%-70%, 50%-65%, or 55%-60% in blood triglyceride level in the subject as compared to prior to the administration. In some embodiments, the nucleobase alteration results in a reduction of 100% in blood triglyceride level in the subject as compared to prior to the administration. In some embodiments, the nucleobase alteration results in at least 1%, 2%, 3%, 4%, 5%, 6%, 7%, 8%, 9%, 10%, 11%, 12%, 13%, 14%, 15%, 20%, 25%, 30%, 35%, 40%, 50%, 75%, 90%, 100%, 110%, 120%, 130%, 140%, 150%, 160%, 170%, 180%, 190%, 200%, 210%, 220%, 230%, 240%, 250%, 260%, 270%, 280%, 290%, 300%, 400% 500%, 600%, 700%, 800%, 900%, 1000% less blood triglyceride level in the subject as compared to prior to the administration. In some embodiments, the nucleobase alteration results in at least 1.1-fold, 1.2-fold, 1.3-fold, 1.4-fold, 1.5-fold, 1.6-fold, 1.7-fold, 1.8-fold, 1.9-fold, 2-fold, 2.5-fold, 3-fold, 3.5-fold, 4-fold, 4.5-fold, 5-fold, 6-fold, 7-fold, 8-fold, 9-fold, 10-fold, or more than 10-fold less blood triglyceride level in the subject as compared to prior to the administration.

[0495] In some embodiments, the blood triglyceride level or the reduction of blood triglyceride level in the subject as compared to prior to the administration is measured by any standard technique. In some embodiments, the blood low-density lipoprotein cholesterol (LDL-C) level or the reduction of blood low-density lipoprotein cholesterol (LDL-C) level in the subject as compared to prior to the administration is measured by any standard technique. For example, a clinical analyzer instrument may be used to measure a ‘lipid panel’ in serum samples which entails the direct measurement of cholesterol (total C), triglycerides (TG) and high-density lipoprotein cholesterol (HDL-C) enzymatically. Reagent kits specific for each analyte contain buffers, calibrators, blanks and controls. As used in the present disclosure, cholesterol, triglycerides and HDL-C may be quantified using absorbance measurements of specific enzymatic reaction products. LDL-C may be determined indirectly. In some instances, most of circulating cholesterol can be found in three major lipoprotein fractions: very low-density lipoproteins (VLDL), LDL and HDL. In some embodiments, total circulating cholesterol may be estimated with the formula [Total C]=[VLDL-C]+[LDL-C]+[HDL-C]. Thus the LDL-C can be calculated from measured values of total cholesterol, triglycerides and HDL-C according to the relationship: [LDL-C]=[total C]−[HDL-C]−[TG]/5, where [TG]/5 is an estimate of VLDL-cholesterol. A reagent kit specific for triglycerides containing buffers, calibrators, blanks and controls. As used herein, serum samples from the study may be analyzed and triglycerides may be measured using a series of coupled enzymatic reactions. In some embodiments, H2O2 may be used to quantify the analyte.as the end product of the last one and its absorbance at 500 nm, and the color intensity is proportional to triglyceride concentrations.

[0496] In some embodiments, the guide polynucleotide is a guide RNA. In some embodiments, the guide RNA comprises a spacer sequence that binds to the complementary strand of a protospacer sequence of the ANGPTL3 gene with 0, 1, or 2 mismatches. In some embodiments, the guide RNA comprises a spacer sequence that binds to the complementary strand of a protospacer sequence of the ANGPTL3 gene with no mismatches. In some embodiments, the guide RNA comprises a spacer sequence that binds to the complementary strand of a protospacer sequence of the ANGPTL3 gene with 1 mismatch. In some embodiments, the guide RNA comprises a spacer sequence that binds to the complementary strand of a protospacer sequence of the ANGPTL3 gene with 2 mismatches. In some embodiments, the guide RNA comprises a spacer sequence that binds to the complementary strand of a protospacer sequence of the ANGPTL3 gene with 3 mismatches. In some embodiments, the guide RNA comprises a spacer sequence that binds to the complementary strand of a protospacer sequence of the ANGPTL3 gene with 4 mismatches. In some embodiments, the guide RNA comprises a spacer sequence that binds to the complementary strand of a protospacer sequence of the ANGPTL3 gene with 5 mismatches.

[0497] In some embodiments, the guide polynucleotide is a guide RNA. In some embodiments, the guide RNA comprises a spacer sequence that binds to the complementary strand of a protospacer sequence of the PCSK9 gene with 0, 1, or 2 mismatches. In some embodiments, the guide RNA comprises a spacer sequence that binds to the complementary strand of a protospacer sequence of the PCSK9 gene with no mismatches. In some embodiments, the guide RNA comprises a spacer sequence that binds to the complementary strand of a protospacer sequence of the PCSK9 gene with 1 mismatch. In some embodiments, the guide RNA comprises a spacer sequence that binds to the complementary strand of a protospacer sequence of the PCSK9 gene with 2 mismatches. In some embodiments, the guide RNA comprises a spacer sequence that binds to the complementary strand of a protospacer sequence of the PCSK9 gene with 3 mismatches. In some embodiments, the guide RNA comprises a spacer sequence that binds to the complementary strand of a protospacer sequence of the PCSK9 gene with 4 mismatches. In some embodiments, the guide RNA comprises a spacer sequence that binds to the complementary strand of a protospacer sequence of the PCSK9 gene with 5 mismatches.

[0498] In some embodiments, the nucleobase alteration is outside of the protospacer sequence in less than 1% of whole liver cells in the subject as measured by net nucleobase editing. In some embodiments, the nucleobase alteration is outside of the protospacer sequence in less than 1% of hepatocytes in the subject as measured by net nucleobase editing. In some embodiments, the nucleobase alteration is only within the protospacer sequence as measured by net nucleobase editing.

[0499] In some embodiments, the nucleobase alteration is outside of the protospacer sequence in less than 0.01%. 0.02%, 0.03% 0.04%, 0.05%, 0.06%, 0.07%, 0.08%, 0.09%, 0.1%, 0.2%, 0.3%, 0.4%, 0.5%, 0.6%, 0.7%, 0.8%, 0.9%, 1.0%, 2.0%, 3.0% 4.0%, 5.0%, 6.0%, 7.0%, 8.0%, 9.0%, 10%, 15%, 20%, 25%, 30%, 35%, 40%, 45%, 50%, 55%, 60%, 65%, 70%, 65%, 80%, 85%, 90% of whole liver cells in the subject as measured by net nucleobase editing. In some embodiments, the nucleobase alteration is outside of the protospacer sequence in less than 0.01%. 0.02%, 0.03% 0.04%, 0.05%, 0.06%, 0.07%, 0.08%, 0.09%, 0.1%, 0.2%, 0.3%, 0.4%, 0.5%, 0.6%, 0.7%, 0.8%, 0.9%, 1.0%, 2.0%, 3.0% 4.0%, 5.0%, 6.0%, 7.0%, 8.0%, 9.0%, 10%, 15%, 20%, 25%, 30%, 35%, 40%, 45%, 50%, 55%, 60%, 65%, 70%, 65%, 80%, 85%, 90% of hepatocytes in the subject as measured by net nucleobase editing. In some embodiments, the nucleobase alteration is outside of the protospacer sequence in less than 0.01%. 0.02%, 0.03% 0.04%, 0.05%, 0.06%, 0.07%, 0.08%, 0.09%, 0.1%, 0.2%, 0.3%, 0.4%, 0.5%, 0.6%, 0.7%, 0.8%, 0.9%, 1.0%, 2.0%, 3.0% 4.0%, 5.0%, 6.0%, 7.0%, 8.0%, 9.0%, 10%, 15%, 20%, 25%, 30%, 35%, 40%, 45%, 50%, 55%, 60%, 65%, 70%, 65%, 80%, 85%, 90% of cells in the subject as measured by net nucleobase editing.

[0500] In some embodiments, the administration is via intravenous infusion. In some embodiments, the method for treating or preventing a condition in a subject in need thereof as described herein comprises sequential administration of the LNP enclosing (i) a guide polynucleotide or a nucleic acid encoding the guide polynucleotide and the second LNP enclosing (ii) a base editor fusion protein comprising a programmable DNA binding domain and a deaminase, or a nucleic acid encoding same. In some embodiments, the method for treating or preventing a condition in a subject in need thereof as described herein comprises concurrent administration of the LNP enclosing (i) a guide polynucleotide or a nucleic acid encoding the guide polynucleotide and the second LNP enclosing (ii) a base editor fusion protein comprising a programmable DNA binding domain and a deaminase, or a nucleic acid encoding same. In some embodiments, the method for treating or preventing a condition in a subject in need thereof as described herein comprises administering a single dose of the LNP enclosing (ii) a base editor fusion protein comprising a programmable DNA binding domain and a deaminase, or a nucleic acid encoding same followed by staggered doses of the LNP enclosing (i) a guide polynucleotide or a nucleic acid encoding the guide polynucleotide over an interval of 1, 2, 3, 4, 5, 6, or 7 days.

[0501] In some embodiments, the method for treating or preventing a condition in a subject in need thereof as described herein comprises administering a single dose of the LNP enclosing (ii) a base editor fusion protein comprising a programmable DNA binding domain and a deaminase, or a nucleic acid encoding same followed by staggered doses of the LNP enclosing (i) a guide polynucleotide or a nucleic acid encoding the guide polynucleotide over an interval of 1, 2, 3, 4, 5, 6, 7, 8, 9, 10, 11, 12, 13, 14, 15, 16, 17, 18, 19, 20, 21, 22, 23, 24, 25, 26, 27, 28, 29, or 30 hours. In some embodiments, the method for treating or preventing a condition in a subject in need thereof as described herein comprises administering a single dose of the LNP enclosing (ii) a base editor fusion protein comprising a programmable DNA binding domain and a deaminase, or a nucleic acid encoding same followed by staggered doses of the LNP enclosing (i) a guide polynucleotide or a nucleic acid encoding the guide polynucleotide over an interval of 1, 2, 3, 4, 5, 6, 7, 8, 9, 10, 11, 12, 13, 14, 15, 16, 17, 18, 19, 20, 21, 22, 23, 24, 25, 26, 27, 28, 29, or 30 days. In some embodiments, the method for treating or preventing a condition in a subject in need thereof as described herein comprises administering a single dose of the LNP enclosing (ii) a base editor fusion protein comprising a programmable DNA binding domain and a deaminase, or a nucleic acid encoding same followed by staggered doses of the LNP enclosing (i) a guide polynucleotide or a nucleic acid encoding the guide polynucleotide over an interval of 1, 2, 3, 4, 5, 6, 7, 8, 9, 10, 11, 12, 13, 14, 15, 16, 17, 18, 19, 20, 21, 22, 23, 24, 25, 26, 27, 28, 29, 30, 31, 32, 33, 34, 35, or 36 months.

[0502] The method as described herein may be used for treating or preventing a condition in a subject in need thereof. In some embodiments, the method comprises administering a single dose of a LNP enclosing (i) a guide polynucleotide, e.g., a guide RNA, or a nucleic acid encoding the guide polynucleotide and (ii) a base editor fusion protein or a nucleic acid encoding the base editor fusion protein, e.g., an mRNA encoding the base editor fusion protein. For example, the method may comprise administering an LNP enclosing (i) a guide RNA and (i) an mRNA encoding the base editor fusion protein. The LNP may be administered at a single dose or multiple doses. In other embodiments, the method comprises administering a LNP enclosing (i) a guide polynucleotide or a nucleic acid encoding the guide polynucleotide, and a second LNP enclosing (ii) the base editor fusion protein or a nucleic acid encoding the base editor fusion protein. The LNP may be administered at a single dose or multiple doses.

[0503] In some embodiments, the method for treating or preventing a condition in a subject in need thereof as described herein comprises administering a single dose of the LNP enclosing (i) a guide polynucleotide or a nucleic acid encoding same and administering multiple doses of the LNP enclosing (ii) a base editor fusion protein comprising a programmable DNA binding domain and a deaminase, or a nucleic acid encoding same after 1 day, and the multiple doses are given at 1 day intervals. In some embodiments, the method for treating or preventing a condition in a subject in need thereof as described herein comprises administering a single dose of the LNP enclosing (i) a guide polynucleotide or a nucleic acid encoding same and administering multiple doses of the LNP enclosing (ii) a base editor fusion protein comprising a programmable DNA binding domain and a deaminase, or a nucleic acid encoding same after 1 day, and the multiple doses are given at 2 day intervals. In some embodiments, the method for treating or preventing a condition in a subject in need thereof as described herein comprises administering a single dose of the LNP enclosing (i) a guide polynucleotide or a nucleic acid encoding same and administering multiple doses of the LNP enclosing (ii) a base editor fusion protein comprising a programmable DNA binding domain and a deaminase, or a nucleic acid encoding same after 1 day, and the multiple doses are given at 3 day intervals. In some embodiments, the method for treating or preventing a condition in a subject in need thereof as described herein comprises administering a single dose of the LNP enclosing (i) a guide polynucleotide or a nucleic acid encoding same and administering multiple doses of the LNP enclosing (ii) a base editor fusion protein comprising a programmable DNA binding domain and a deaminase, or a nucleic acid encoding same after 1 day, and the multiple doses are given at 4 day intervals. In some embodiments, the method for treating or preventing a condition in a subject in need thereof as described herein comprises administering a single dose of the LNP enclosing (i) a guide polynucleotide or a nucleic acid encoding same and administering multiple doses of the LNP enclosing (ii) a base editor fusion protein comprising a programmable DNA binding domain and a deaminase, or a nucleic acid encoding same after 1 day, and the multiple doses are given at 5 day intervals. In some embodiments, the method for treating or preventing a condition in a subject in need thereof as described herein comprises administering a single dose of the LNP enclosing (i) a guide polynucleotide or a nucleic acid encoding same and administering multiple doses of the LNP enclosing (ii) a base editor fusion protein comprising a programmable DNA binding domain and a deaminase, or a nucleic acid encoding same after 1 day, and the multiple doses are given at 6 day intervals. In some embodiments, the method for treating or preventing a condition in a subject in need thereof as described herein comprises administering a single dose of the LNP enclosing (i) a guide polynucleotide or a nucleic acid encoding same and administering multiple doses of the LNP enclosing (ii) a base editor fusion protein comprising a programmable DNA binding domain and a deaminase, or a nucleic acid encoding same after 1 day, and the multiple doses are given at 7 day intervals.

[0504] In some embodiments, the method for treating or preventing a condition in a subject in need thereof as described herein comprises administering a single dose of the LNP enclosing (i) a guide polynucleotide or a nucleic acid encoding same and administering multiple doses of the LNP enclosing (ii) a base editor fusion protein comprising a programmable DNA binding domain and a deaminase, or a nucleic acid encoding same after 2 days, and the multiple doses are given at 1 day intervals. In some embodiments, the method for treating or preventing a condition in a subject in need thereof as described herein comprises administering a single dose of the LNP enclosing (i) a guide polynucleotide or a nucleic acid encoding same and administering multiple doses of the LNP enclosing (ii) a base editor fusion protein comprising a programmable DNA binding domain and a deaminase, or a nucleic acid encoding same after 2 days, and the multiple doses are given at 2 day intervals. In some embodiments, the method for treating or preventing a condition in a subject in need thereof as described herein comprises administering a single dose of the LNP enclosing (i) a guide polynucleotide or a nucleic acid encoding same and administering multiple doses of the LNP enclosing (ii) a base editor fusion protein comprising a programmable DNA binding domain and a deaminase, or a nucleic acid encoding same after 2 days, and the multiple doses are given at 3 day intervals. In some embodiments, the method for treating or preventing a condition in a subject in need thereof as described herein comprises administering a single dose of the LNP enclosing (i) a guide polynucleotide or a nucleic acid encoding same and administering multiple doses of the LNP enclosing (ii) a base editor fusion protein comprising a programmable DNA binding domain and a deaminase, or a nucleic acid encoding same after 2 days, and the multiple doses are given at 4 day intervals. In some embodiments, the method for treating or preventing a condition in a subject in need thereof as described herein comprises administering a single dose of the LNP enclosing (i) a guide polynucleotide or a nucleic acid encoding same and administering multiple doses of the LNP enclosing (ii) a base editor fusion protein comprising a programmable DNA binding domain and a deaminase, or a nucleic acid encoding same after 2 days, and the multiple doses are given at 5 day intervals. In some embodiments, the method for treating or preventing a condition in a subject in need thereof as described herein comprises administering a single dose of the LNP enclosing (i) a guide polynucleotide or a nucleic acid encoding same and administering multiple doses of the LNP enclosing (ii) a base editor fusion protein comprising a programmable DNA binding domain and a deaminase, or a nucleic acid encoding same after 2 days, and the multiple doses are given at 6 day intervals. In some embodiments, the method for treating or preventing a condition in a subject in need thereof as described herein comprises administering a single dose of the LNP enclosing (i) a guide polynucleotide or a nucleic acid encoding same and administering multiple doses of the LNP enclosing (ii) a base editor fusion protein comprising a programmable DNA binding domain and a deaminase, or a nucleic acid encoding same after 2 days, and the multiple doses are given at 7 day intervals.

[0505] In some embodiments, the method for treating or preventing a condition in a subject in need thereof as described herein comprises administering a single dose of the LNP enclosing (i) a guide polynucleotide or a nucleic acid encoding same and administering multiple doses of the LNP enclosing (ii) a base editor fusion protein comprising a programmable DNA binding domain and a deaminase, or a nucleic acid encoding same after 3 days, and the multiple doses are given at 1 day intervals. In some embodiments, the method for treating or preventing a condition in a subject in need thereof as described herein comprises administering a single dose of the LNP enclosing (i) a guide polynucleotide or a nucleic acid encoding same and administering multiple doses of the LNP enclosing (ii) a base editor fusion protein comprising a programmable DNA binding domain and a deaminase, or a nucleic acid encoding same after 3 days, and the multiple doses are given at 2 day intervals. In some embodiments, the method for treating or preventing a condition in a subject in need thereof as described herein comprises administering a single dose of the LNP enclosing (i) a guide polynucleotide or a nucleic acid encoding same and administering multiple doses of the LNP enclosing (ii) a base editor fusion protein comprising a programmable DNA binding domain and a deaminase, or a nucleic acid encoding same after 3 days, and the multiple doses are given at 3 day intervals. In some embodiments, the method for treating or preventing a condition in a subject in need thereof as described herein comprises administering a single dose of the LNP enclosing (i) a guide polynucleotide or a nucleic acid encoding same and administering multiple doses of the LNP enclosing (ii) a base editor fusion protein comprising a programmable DNA binding domain and a deaminase, or a nucleic acid encoding same after 3 days, and the multiple doses are given at 4 day intervals. In some embodiments, the method for treating or preventing a condition in a subject in need thereof as described herein comprises administering a single dose of the LNP enclosing (i) a guide polynucleotide or a nucleic acid encoding same and administering multiple doses of the LNP enclosing (ii) a base editor fusion protein comprising a programmable DNA binding domain and a deaminase, or a nucleic acid encoding same after 3 days, and the multiple doses are given at 5 day intervals. In some embodiments, the method for treating or preventing a condition in a subject in need thereof as described herein comprises administering a single dose of the LNP enclosing (i) a guide polynucleotide or a nucleic acid encoding same and administering multiple doses of the LNP enclosing (ii) a base editor fusion protein comprising a programmable DNA binding domain and a deaminase, or a nucleic acid encoding same after 3 days, and the multiple doses are given at 6 day intervals. In some embodiments, the method for treating or preventing a condition in a subject in need thereof as described herein comprises administering a single dose of the LNP enclosing (i) a guide polynucleotide or a nucleic acid encoding same and administering multiple doses of the LNP enclosing (ii) a base editor fusion protein comprising a programmable DNA binding domain and a deaminase, or a nucleic acid encoding same after 3 days, and the multiple doses are given at 7 day intervals.

[0506] In some embodiments, the method for treating or preventing a condition in a subject in need thereof as described herein comprises administering a single dose of the LNP enclosing (i) a guide polynucleotide or a nucleic acid encoding same and administering multiple doses of the LNP enclosing (ii) a base editor fusion protein comprising a programmable DNA binding domain and a deaminase, or a nucleic acid encoding same after 4 days, and the multiple doses are given at 1 day intervals. In some embodiments, the method for treating or preventing a condition in a subject in need thereof as described herein comprises administering a single dose of the LNP enclosing (i) a guide polynucleotide or a nucleic acid encoding same and administering multiple doses of the LNP enclosing (ii) a base editor fusion protein comprising a programmable DNA binding domain and a deaminase, or a nucleic acid encoding same after 4 days, and the multiple doses are given at 2 day intervals. In some embodiments, the method for treating or preventing a condition in a subject in need thereof as described herein comprises administering a single dose of the LNP enclosing (i) a guide polynucleotide or a nucleic acid encoding same and administering multiple doses of the LNP enclosing (ii) a base editor fusion protein comprising a programmable DNA binding domain and a deaminase, or a nucleic acid encoding same after 4 days, and the multiple doses are given at 3 day intervals. In some embodiments, the method for treating or preventing a condition in a subject in need thereof as described herein comprises administering a single dose of the LNP enclosing (i) a guide polynucleotide or a nucleic acid encoding same and administering multiple doses of the LNP enclosing (ii) a base editor fusion protein comprising a programmable DNA binding domain and a deaminase, or a nucleic acid encoding same after 4 days, and the multiple doses are given at 4 day intervals. In some embodiments, the method for treating or preventing a condition in a subject in need thereof as described herein comprises administering a single dose of the LNP enclosing (i) a guide polynucleotide or a nucleic acid encoding same and administering multiple doses of the LNP enclosing (ii) a base editor fusion protein comprising a programmable DNA binding domain and a deaminase, or a nucleic acid encoding same after 4 days, and the multiple doses are given at 5 day intervals. In some embodiments, the method for treating or preventing a condition in a subject in need thereof as described herein comprises administering a single dose of the LNP enclosing (i) a guide polynucleotide or a nucleic acid encoding same and administering multiple doses of the LNP enclosing (ii) a base editor fusion protein comprising a programmable DNA binding domain and a deaminase, or a nucleic acid encoding same after 4 days, and the multiple doses are given at 6 day intervals. In some embodiments, the method for treating or preventing a condition in a subject in need thereof as described herein comprises administering a single dose of the LNP enclosing (i) a guide polynucleotide or a nucleic acid encoding same and administering multiple doses of the LNP enclosing (ii) a base editor fusion protein comprising a programmable DNA binding domain and a deaminase, or a nucleic acid encoding same after 4 days, and the multiple doses are given at 7 day intervals.

[0507] In some embodiments, the method for treating or preventing a condition in a subject in need thereof as described herein comprises administering a single dose of the LNP enclosing (i) a guide polynucleotide or a nucleic acid encoding same and administering multiple doses of the LNP enclosing (ii) a base editor fusion protein comprising a programmable DNA binding domain and a deaminase, or a nucleic acid encoding same after 5 days, and the multiple doses are given at 1 day intervals. In some embodiments, the method for treating or preventing a condition in a subject in need thereof as described herein comprises administering a single dose of the LNP enclosing (i) a guide polynucleotide or a nucleic acid encoding same and administering multiple doses of the LNP enclosing (ii) a base editor fusion protein comprising a programmable DNA binding domain and a deaminase, or a nucleic acid encoding same after 5 days, and the multiple doses are given at 2 day intervals. In some embodiments, the method for treating or preventing a condition in a subject in need thereof as described herein comprises administering a single dose of the LNP enclosing (i) a guide polynucleotide or a nucleic acid encoding same and administering multiple doses of the LNP enclosing (ii) a base editor fusion protein comprising a programmable DNA binding domain and a deaminase, or a nucleic acid encoding same after 5 days, and the multiple doses are given at 3 day intervals. In some embodiments, the method for treating or preventing a condition in a subject in need thereof as described herein comprises administering a single dose of the LNP enclosing (i) a guide polynucleotide or a nucleic acid encoding same and administering multiple doses of the LNP enclosing (ii) a base editor fusion protein comprising a programmable DNA binding domain and a deaminase, or a nucleic acid encoding same after 5 days, and the multiple doses are given at 4 day intervals. In some embodiments, the method for treating or preventing a condition in a subject in need thereof as described herein comprises administering a single dose of the LNP enclosing (i) a guide polynucleotide or a nucleic acid encoding same and administering multiple doses of the LNP enclosing (ii) a base editor fusion protein comprising a programmable DNA binding domain and a deaminase, or a nucleic acid encoding same after 5 days, and the multiple doses are given at 5 day intervals. In some embodiments, the method for treating or preventing a condition in a subject in need thereof as described herein comprises administering a single dose of the LNP enclosing (i) a guide polynucleotide or a nucleic acid encoding same and administering multiple doses of the LNP enclosing (ii) a base editor fusion protein comprising a programmable DNA binding domain and a deaminase, or a nucleic acid encoding same after 5 days, and the multiple doses are given at 6 day intervals. In some embodiments, the method for treating or preventing a condition in a subject in need thereof as described herein comprises administering a single dose of the LNP enclosing (i) a guide polynucleotide or a nucleic acid encoding same and administering multiple doses of the LNP enclosing (ii) a base editor fusion protein comprising a programmable DNA binding domain and a deaminase, or a nucleic acid encoding same after 5 days, and the multiple doses are given at 7 day intervals.

[0508] In some embodiments, the method for treating or preventing a condition in a subject in need thereof as described herein comprises administering a single dose of the LNP enclosing (i) a guide polynucleotide or a nucleic acid encoding same and administering multiple doses of the LNP enclosing (ii) a base editor fusion protein comprising a programmable DNA binding domain and a deaminase, or a nucleic acid encoding same after 6 days, and the multiple doses are given at 1 day intervals. In some embodiments, the method for treating or preventing a condition in a subject in need thereof as described herein comprises administering a single dose of the LNP enclosing (i) a guide polynucleotide or a nucleic acid encoding same and administering multiple doses of the LNP enclosing (ii) a base editor fusion protein comprising a programmable DNA binding domain and a deaminase, or a nucleic acid encoding same after 6 days, and the multiple doses are given at 2 day intervals. In some embodiments, the method for treating or preventing a condition in a subject in need thereof as described herein comprises administering a single dose of the LNP enclosing (i) a guide polynucleotide or a nucleic acid encoding same and administering multiple doses of the LNP enclosing (ii) a base editor fusion protein comprising a programmable DNA binding domain and a deaminase, or a nucleic acid encoding same after 6 days, and the multiple doses are given at 3 day intervals. In some embodiments, the method for treating or preventing a condition in a subject in need thereof as described herein comprises administering a single dose of the LNP enclosing (i) a guide polynucleotide or a nucleic acid encoding same and administering multiple doses of the LNP enclosing (ii) a base editor fusion protein comprising a programmable DNA binding domain and a deaminase, or a nucleic acid encoding same after 6 days, and the multiple doses are given at 4 day intervals. In some embodiments, the method for treating or preventing a condition in a subject in need thereof as described herein comprises administering a single dose of the LNP enclosing (i) a guide polynucleotide or a nucleic acid encoding same and administering multiple doses of the LNP enclosing (ii) a base editor fusion protein comprising a programmable DNA binding domain and a deaminase, or a nucleic acid encoding same after 6 days, and the multiple doses are given at 5 day intervals. In some embodiments, the method for treating or preventing a condition in a subject in need thereof as described herein comprises administering a single dose of the LNP enclosing (i) a guide polynucleotide or a nucleic acid encoding same and administering multiple doses of the LNP enclosing (ii) a base editor fusion protein comprising a programmable DNA binding domain and a deaminase, or a nucleic acid encoding same after 6 days, and the multiple doses are given at 6 day intervals. In some embodiments, the method for treating or preventing a condition in a subject in need thereof as described herein comprises administering a single dose of the LNP enclosing (i) a guide polynucleotide or a nucleic acid encoding same and administering multiple doses of the LNP enclosing (ii) a base editor fusion protein comprising a programmable DNA binding domain and a deaminase, or a nucleic acid encoding same after 6 days, and the multiple doses are given at 7 day intervals.

[0509] In some embodiments, the method for treating or preventing a condition in a subject in need thereof as described herein comprises administering a single dose of the LNP enclosing (i) a guide polynucleotide or a nucleic acid encoding same and administering multiple doses of the LNP enclosing (ii) a base editor fusion protein comprising a programmable DNA binding domain and a deaminase, or a nucleic acid encoding same after 7 days, and the multiple doses are given at 1 day intervals. In some embodiments, the method for treating or preventing a condition in a subject in need thereof as described herein comprises administering a single dose of the LNP enclosing (i) a guide polynucleotide or a nucleic acid encoding same and administering multiple doses of the LNP enclosing (ii) a base editor fusion protein comprising a programmable DNA binding domain and a deaminase, or a nucleic acid encoding same after 7 days, and the multiple doses are given at 2 day intervals. In some embodiments, the method for treating or preventing a condition in a subject in need thereof as described herein comprises administering a single dose of the LNP enclosing (i) a guide polynucleotide or a nucleic acid encoding same and administering multiple doses of the LNP enclosing (ii) a base editor fusion protein comprising a programmable DNA binding domain and a deaminase, or a nucleic acid encoding same after 7 days, and the multiple doses are given at 3 day intervals. In some embodiments, the method for treating or preventing a condition in a subject in need thereof as described herein comprises administering a single dose of the LNP enclosing (i) a guide polynucleotide or a nucleic acid encoding same and administering multiple doses of the LNP enclosing (ii) a base editor fusion protein comprising a programmable DNA binding domain and a deaminase, or a nucleic acid encoding same after 7 days, and the multiple doses are given at 4 day intervals. In some embodiments, the method for treating or preventing a condition in a subject in need thereof as described herein comprises administering a single dose of the LNP enclosing (i) a guide polynucleotide or a nucleic acid encoding same and administering multiple doses of the LNP enclosing (ii) a base editor fusion protein comprising a programmable DNA binding domain and a deaminase, or a nucleic acid encoding same after 7 days, and the multiple doses are given at 5 day intervals. In some embodiments, the method for treating or preventing a condition in a subject in need thereof as described herein comprises administering a single dose of the LNP enclosing (i) a guide polynucleotide or a nucleic acid encoding same and administering multiple doses of the LNP enclosing (ii) a base editor fusion protein comprising a programmable DNA binding domain and a deaminase, or a nucleic acid encoding same after 7 days, and the multiple doses are given at 6 day intervals. In some embodiments, the method for treating or preventing a condition in a subject in need thereof as described herein comprises administering a single dose of the LNP enclosing (i) a guide polynucleotide or a nucleic acid encoding same and administering multiple doses of the LNP enclosing (ii) a base editor fusion protein comprising a programmable DNA binding domain and a deaminase, or a nucleic acid encoding same after 7 days, and the multiple doses are given at 7 day intervals.

[0510] In some embodiments, the method for treating or preventing a condition in a subject in need thereof as described herein comprises administering a single dose of the LNP enclosing (ii) a base editor fusion protein comprising a programmable DNA binding domain and a deaminase, or a nucleic acid encoding same and administering multiple doses of the LNP enclosing (i) a guide polynucleotide or a nucleic acid encoding same after 1 day, and the multiple doses are given at 1 day intervals. In some embodiments, the method for treating or preventing a condition in a subject in need thereof as described herein comprises administering a single dose of the LNP enclosing (ii) a base editor fusion protein comprising a programmable DNA binding domain and a deaminase, or a nucleic acid encoding same and administering multiple doses of the LNP enclosing (i) a guide polynucleotide or a nucleic acid encoding same after 1 day, and the multiple doses are given at 2 day intervals. In some embodiments, the method for treating or preventing a condition in a subject in need thereof as described herein comprises administering a single dose of the LNP enclosing (ii) a base editor fusion protein comprising a programmable DNA binding domain and a deaminase, or a nucleic acid encoding same and administering multiple doses of the LNP enclosing (i) a guide polynucleotide or a nucleic acid encoding same after 1 day, and the multiple doses are given at 3 day intervals. In some embodiments, the method for treating or preventing a condition in a subject in need thereof as described herein comprises administering a single dose of the LNP enclosing (ii) a base editor fusion protein comprising a programmable DNA binding domain and a deaminase, or a nucleic acid encoding same and administering multiple doses of the LNP enclosing (i) a guide polynucleotide or a nucleic acid encoding same after 1 day, and the multiple doses are given at 4 day intervals. In some embodiments, the method for treating or preventing a condition in a subject in need thereof as described herein comprises administering a single dose of the LNP enclosing (ii) a base editor fusion protein comprising a programmable DNA binding domain and a deaminase, or a nucleic acid encoding same and administering multiple doses of the LNP enclosing (i) a guide polynucleotide or a nucleic acid encoding same after 1 day, and the multiple doses are given at 5 day intervals. In some embodiments, the method for treating or preventing a condition in a subject in need thereof as described herein comprises administering a single dose of the LNP enclosing (ii) a base editor fusion protein comprising a programmable DNA binding domain and a deaminase, or a nucleic acid encoding same and administering multiple doses of the LNP enclosing (i) a guide polynucleotide or a nucleic acid encoding same after 1 day, and the multiple doses are given at 6 day intervals. In some embodiments, the method for treating or preventing a condition in a subject in need thereof as described herein comprises administering a single dose of the LNP enclosing (ii) a base editor fusion protein comprising a programmable DNA binding domain and a deaminase, or a nucleic acid encoding same and administering multiple doses of the LNP enclosing (i) a guide polynucleotide or a nucleic acid encoding same after 1 day, and the multiple doses are given at 7 day intervals.

[0511] In some embodiments, the method for treating or preventing a condition in a subject in need thereof as described herein comprises administering a single dose of the LNP enclosing (ii) a base editor fusion protein comprising a programmable DNA binding domain and a deaminase, or a nucleic acid encoding same and administering multiple doses of the LNP enclosing (i) a guide polynucleotide or a nucleic acid encoding same after 2 days, and the multiple doses are given at 1 day intervals. In some embodiments, the method for treating or preventing a condition in a subject in need thereof as described herein comprises administering a single dose of the LNP enclosing (ii) a base editor fusion protein comprising a programmable DNA binding domain and a deaminase, or a nucleic acid encoding same and administering multiple doses of the LNP enclosing (i) a guide polynucleotide or a nucleic acid encoding same after 2 days, and the multiple doses are given at 2 day intervals. In some embodiments, the method for treating or preventing a condition in a subject in need thereof as described herein comprises administering a single dose of the LNP enclosing (ii) a base editor fusion protein comprising a programmable DNA binding domain and a deaminase, or a nucleic acid encoding same and administering multiple doses of the LNP enclosing (i) a guide polynucleotide or a nucleic acid encoding same after 2 days, and the multiple doses are given at 3 day intervals. In some embodiments, the method for treating or preventing a condition in a subject in need thereof as described herein comprises administering a single dose of the LNP enclosing (ii) a base editor fusion protein comprising a programmable DNA binding domain and a deaminase, or a nucleic acid encoding same and administering multiple doses of the LNP enclosing (i) a guide polynucleotide or a nucleic acid encoding same after 2 days, and the multiple doses are given at 4 day intervals. In some embodiments, the method for treating or preventing a condition in a subject in need thereof as described herein comprises administering a single dose of the LNP enclosing (ii) a base editor fusion protein comprising a programmable DNA binding domain and a deaminase, or a nucleic acid encoding same and administering multiple doses of the LNP enclosing (i) a guide polynucleotide or a nucleic acid encoding same after 2 days, and the multiple doses are given at 5 day intervals. In some embodiments, the method for treating or preventing a condition in a subject in need thereof as described herein comprises administering a single dose of the LNP enclosing (ii) a base editor fusion protein comprising a programmable DNA binding domain and a deaminase, or a nucleic acid encoding same and administering multiple doses of the LNP enclosing (i) a guide polynucleotide or a nucleic acid encoding same after 2 days, and the multiple doses are given at 6 day intervals. In some embodiments, the method for treating or preventing a condition in a subject in need thereof as described herein comprises administering a single dose of the LNP enclosing (ii) a base editor fusion protein comprising a programmable DNA binding domain and a deaminase, or a nucleic acid encoding same and administering multiple doses of the LNP enclosing (i) a guide polynucleotide or a nucleic acid encoding same after 2 days, and the multiple doses are given at 7 day intervals.

[0512] In some embodiments, the method for treating or preventing a condition in a subject in need thereof as described herein comprises administering a single dose of the LNP enclosing (ii) a base editor fusion protein comprising a programmable DNA binding domain and a deaminase, or a nucleic acid encoding same and administering multiple doses of the LNP enclosing (i) a guide polynucleotide or a nucleic acid encoding same after 3 days, and the multiple doses are given at 1 day intervals. In some embodiments, the method for treating or preventing a condition in a subject in need thereof as described herein comprises administering a single dose of the LNP enclosing (ii) a base editor fusion protein comprising a programmable DNA binding domain and a deaminase, or a nucleic acid encoding same and administering multiple doses of the LNP enclosing (i) a guide polynucleotide or a nucleic acid encoding same after 3 days, and the multiple doses are given at 2 day intervals. In some embodiments, the method for treating or preventing a condition in a subject in need thereof as described herein comprises administering a single dose of the LNP enclosing (ii) a base editor fusion protein comprising a programmable DNA binding domain and a deaminase, or a nucleic acid encoding same and administering multiple doses of the LNP enclosing (i) a guide polynucleotide or a nucleic acid encoding same after 3 days, and the multiple doses are given at 3 day intervals. In some embodiments, the method for treating or preventing a condition in a subject in need thereof as described herein comprises administering a single dose of the LNP enclosing (ii) a base editor fusion protein comprising a programmable DNA binding domain and a deaminase, or a nucleic acid encoding same and administering multiple doses of the LNP enclosing (i) a guide polynucleotide or a nucleic acid encoding same after 3 days, and the multiple doses are given at 4 day intervals. In some embodiments, the method for treating or preventing a condition in a subject in need thereof as described herein comprises administering a single dose of the LNP enclosing (ii) a base editor fusion protein comprising a programmable DNA binding domain and a deaminase, or a nucleic acid encoding same and administering multiple doses of the LNP enclosing (i) a guide polynucleotide or a nucleic acid encoding same after 3 days, and the multiple doses are given at 5 day intervals. In some embodiments, the method for treating or preventing a condition in a subject in need thereof as described herein comprises administering a single dose of the LNP enclosing (ii) a base editor fusion protein comprising a programmable DNA binding domain and a deaminase, or a nucleic acid encoding same and administering multiple doses of the LNP enclosing (i) a guide polynucleotide or a nucleic acid encoding same after 3 days, and the multiple doses are given at 6 day intervals. In some embodiments, the method for treating or preventing a condition in a subject in need thereof as described herein comprises administering a single dose of the LNP enclosing (ii) a base editor fusion protein comprising a programmable DNA binding domain and a deaminase, or a nucleic acid encoding same and administering multiple doses of the LNP enclosing (i) a guide polynucleotide or a nucleic acid encoding same after 3 days, and the multiple doses are given at 7 day intervals.

[0513] In some embodiments, the method for treating or preventing a condition in a subject in need thereof as described herein comprises administering a single dose of the LNP enclosing (ii) a base editor fusion protein comprising a programmable DNA binding domain and a deaminase, or a nucleic acid encoding same and administering multiple doses of the LNP enclosing (i) a guide polynucleotide or a nucleic acid encoding same after 4 days, and the multiple doses are given at 1 day intervals. In some embodiments, the method for treating or preventing a condition in a subject in need thereof as described herein comprises administering a single dose of the LNP enclosing (ii) a base editor fusion protein comprising a programmable DNA binding domain and a deaminase, or a nucleic acid encoding same and administering multiple doses of the LNP enclosing (i) a guide polynucleotide or a nucleic acid encoding same after 4 days, and the multiple doses are given at 2 day intervals. In some embodiments, the method for treating or preventing a condition in a subject in need thereof as described herein comprises administering a single dose of the LNP enclosing (ii) a base editor fusion protein comprising a programmable DNA binding domain and a deaminase, or a nucleic acid encoding same and administering multiple doses of the LNP enclosing (i) a guide polynucleotide or a nucleic acid encoding same after 4 days, and the multiple doses are given at 3 day intervals. In some embodiments, the method for treating or preventing a condition in a subject in need thereof as described herein comprises administering a single dose of the LNP enclosing (ii) a base editor fusion protein comprising a programmable DNA binding domain and a deaminase, or a nucleic acid encoding same and administering multiple doses of the LNP enclosing (i) a guide polynucleotide or a nucleic acid encoding same after 4 days, and the multiple doses are given at 4 day intervals. In some embodiments, the method for treating or preventing a condition in a subject in need thereof as described herein comprises administering a single dose of the LNP enclosing (ii) a base editor fusion protein comprising a programmable DNA binding domain and a deaminase, or a nucleic acid encoding same and administering multiple doses of the LNP enclosing (i) a guide polynucleotide or a nucleic acid encoding same after 4 days, and the multiple doses are given at 5 day intervals. In some embodiments, the method for treating or preventing a condition in a subject in need thereof as described herein comprises administering a single dose of the LNP enclosing (ii) a base editor fusion protein comprising a programmable DNA binding domain and a deaminase, or a nucleic acid encoding same and administering multiple doses of the LNP enclosing (i) a guide polynucleotide or a nucleic acid encoding same after 4 days, and the multiple doses are given at 6 day intervals. In some embodiments, the method for treating or preventing a condition in a subject in need thereof as described herein comprises administering a single dose of the LNP enclosing (ii) a base editor fusion protein comprising a programmable DNA binding domain and a deaminase, or a nucleic acid encoding same and administering multiple doses of the LNP enclosing (i) a guide polynucleotide or a nucleic acid encoding same after 4 days, and the multiple doses are given at 7 day intervals.

[0514] In some embodiments, the method for treating or preventing a condition in a subject in need thereof as described herein comprises administering a single dose of the LNP enclosing (ii) a base editor fusion protein comprising a programmable DNA binding domain and a deaminase, or a nucleic acid encoding same and administering multiple doses of the LNP enclosing (i) a guide polynucleotide or a nucleic acid encoding same after 5 days, and the multiple doses are given at 1 day intervals. In some embodiments, the method for treating or preventing a condition in a subject in need thereof as described herein comprises administering a single dose of the LNP enclosing (ii) a base editor fusion protein comprising a programmable DNA binding domain and a deaminase, or a nucleic acid encoding same and administering multiple doses of the LNP enclosing (i) a guide polynucleotide or a nucleic acid encoding same after 5 days, and the multiple doses are given at 2 day intervals. In some embodiments, the method for treating or preventing a condition in a subject in need thereof as described herein comprises administering a single dose of the LNP enclosing (ii) a base editor fusion protein comprising a programmable DNA binding domain and a deaminase, or a nucleic acid encoding same and administering multiple doses of the LNP enclosing (i) a guide polynucleotide or a nucleic acid encoding same after 5 days, and the multiple doses are given at 3 day intervals. In some embodiments, the method for treating or preventing a condition in a subject in need thereof as described herein comprises administering a single dose of the LNP enclosing (ii) a base editor fusion protein comprising a programmable DNA binding domain and a deaminase, or a nucleic acid encoding same and administering multiple doses of the LNP enclosing (i) a guide polynucleotide or a nucleic acid encoding same after 5 days, and the multiple doses are given at 4 day intervals. In some embodiments, the method for treating or preventing a condition in a subject in need thereof as described herein comprises administering a single dose of the LNP enclosing (ii) a base editor fusion protein comprising a programmable DNA binding domain and a deaminase, or a nucleic acid encoding same and administering multiple doses of the LNP enclosing (i) a guide polynucleotide or a nucleic acid encoding same after 5 days, and the multiple doses are given at 5 day intervals. In some embodiments, the method for treating or preventing a condition in a subject in need thereof as described herein comprises administering a single dose of the LNP enclosing (ii) a base editor fusion protein comprising a programmable DNA binding domain and a deaminase, or a nucleic acid encoding same and administering multiple doses of the LNP enclosing (i) a guide polynucleotide or a nucleic acid encoding same after 5 days, and the multiple doses are given at 6 day intervals. In some embodiments, the method for treating or preventing a condition in a subject in need thereof as described herein comprises administering a single dose of the LNP enclosing (ii) a base editor fusion protein comprising a programmable DNA binding domain and a deaminase, or a nucleic acid encoding same and administering multiple doses of the LNP enclosing (i) a guide polynucleotide or a nucleic acid encoding same after 5 days, and the multiple doses are given at 7 day intervals.

[0515] In some embodiments, the method for treating or preventing a condition in a subject in need thereof as described herein comprises administering a single dose of the LNP enclosing (ii) a base editor fusion protein comprising a programmable DNA binding domain and a deaminase, or a nucleic acid encoding same and administering multiple doses of the LNP enclosing (i) a guide polynucleotide or a nucleic acid encoding same after 6 days, and the multiple doses are given at 1 day intervals. In some embodiments, the method for treating or preventing a condition in a subject in need thereof as described herein comprises administering a single dose of the LNP enclosing (ii) a base editor fusion protein comprising a programmable DNA binding domain and a deaminase, or a nucleic acid encoding same and administering multiple doses of the LNP enclosing (i) a guide polynucleotide or a nucleic acid encoding same after 6 days, and the multiple doses are given at 2 day intervals. In some embodiments, the method for treating or preventing a condition in a subject in need thereof as described herein comprises administering a single dose of the LNP enclosing (ii) a base editor fusion protein comprising a programmable DNA binding domain and a deaminase, or a nucleic acid encoding same and administering multiple doses of the LNP enclosing (i) a guide polynucleotide or a nucleic acid encoding same after 6 days, and the multiple doses are given at 3 day intervals. In some embodiments, the method for treating or preventing a condition in a subject in need thereof as described herein comprises administering a single dose of the LNP enclosing (ii) a base editor fusion protein comprising a programmable DNA binding domain and a deaminase, or a nucleic acid encoding same and administering multiple doses of the LNP enclosing (i) a guide polynucleotide or a nucleic acid encoding same after 6 days, and the multiple doses are given at 4 day intervals. In some embodiments, the method for treating or preventing a condition in a subject in need thereof as described herein comprises administering a single dose of the LNP enclosing (ii) a base editor fusion protein comprising a programmable DNA binding domain and a deaminase, or a nucleic acid encoding same and administering multiple doses of the LNP enclosing (i) a guide polynucleotide or a nucleic acid encoding same after 6 days, and the multiple doses are given at 5 day intervals. In some embodiments, the method for treating or preventing a condition in a subject in need thereof as described herein comprises administering a single dose of the LNP enclosing (ii) a base editor fusion protein comprising a programmable DNA binding domain and a deaminase, or a nucleic acid encoding same and administering multiple doses of the LNP enclosing (i) a guide polynucleotide or a nucleic acid encoding same after 6 days, and the multiple doses are given at 6 day intervals. In some embodiments, the method for treating or preventing a condition in a subject in need thereof as described herein comprises administering a single dose of the LNP enclosing (ii) a base editor fusion protein comprising a programmable DNA binding domain and a deaminase, or a nucleic acid encoding same and administering multiple doses of the LNP enclosing (i) a guide polynucleotide or a nucleic acid encoding same after 6 days, and the multiple doses are given at 7 day intervals.

[0516] In some embodiments, the method for treating or preventing a condition in a subject in need thereof as described herein comprises administering a single dose of the LNP enclosing (ii) a base editor fusion protein comprising a programmable DNA binding domain and a deaminase, or a nucleic acid encoding same and administering multiple doses of the LNP enclosing (i) a guide polynucleotide or a nucleic acid encoding same after 7 days, and the multiple doses are given at 1 day intervals. In some embodiments, the method for treating or preventing a condition in a subject in need thereof as described herein comprises administering a single dose of the LNP enclosing (ii) a base editor fusion protein comprising a programmable DNA binding domain and a deaminase, or a nucleic acid encoding same and administering multiple doses of the LNP enclosing (i) a guide polynucleotide or a nucleic acid encoding same after 7 days, and the multiple doses are given at 2 day intervals. In some embodiments, the method for treating or preventing a condition in a subject in need thereof as described herein comprises administering a single dose of the LNP enclosing (ii) a base editor fusion protein comprising a programmable DNA binding domain and a deaminase, or a nucleic acid encoding same and administering multiple doses of the LNP enclosing (i) a guide polynucleotide or a nucleic acid encoding same after 7 days, and the multiple doses are given at 3 day intervals. In some embodiments, the method for treating or preventing a condition in a subject in need thereof as described herein comprises administering a single dose of the LNP enclosing (ii) a base editor fusion protein comprising a programmable DNA binding domain and a deaminase, or a nucleic acid encoding same and administering multiple doses of the LNP enclosing (i) a guide polynucleotide or a nucleic acid encoding same after 7 days, and the multiple doses are given at 4 day intervals. In some embodiments, the method for treating or preventing a condition in a subject in need thereof as described herein comprises administering a single dose of the LNP enclosing (ii) a base editor fusion protein comprising a programmable DNA binding domain and a deaminase, or a nucleic acid encoding same and administering multiple doses of the LNP enclosing (i) a guide polynucleotide or a nucleic acid encoding same after 7 days, and the multiple doses are given at 5 day intervals. In some embodiments, the method for treating or preventing a condition in a subject in need thereof as described herein comprises administering a single dose of the LNP enclosing (ii) a base editor fusion protein comprising a programmable DNA binding domain and a deaminase, or a nucleic acid encoding same and administering multiple doses of the LNP enclosing (i) a guide polynucleotide or a nucleic acid encoding same after 7 days, and the multiple doses are given at 6 day intervals. In some embodiments, the method for treating or preventing a condition in a subject in need thereof as described herein comprises administering a single dose of the LNP enclosing (ii) a base editor fusion protein comprising a programmable DNA binding domain and a deaminase, or a nucleic acid encoding same and administering multiple doses of the LNP enclosing (i) a guide polynucleotide or a nucleic acid encoding same after 7 days, and the multiple doses are given at 7 day intervals.

[0517] In some embodiments, the method for treating or preventing a condition in a subject in need thereof as described herein comprises administering a single dose of the LNP enclosing (i) a guide polynucleotide or a nucleic acid encoding the guide polynucleotide and (ii) a base editor fusion protein comprising a programmable DNA binding domain and a deaminase, or a nucleic acid encoding same. In some embodiments, the single dose of the LNP is at 0.3 mg/kg. In some embodiments, the single dose of the LNP is at 0.5 mg/kg. In some embodiments, the single dose of the LNP is at 1 mg/kg. In some embodiments, the single dose of the LNP is at 1 mg/kg. In some embodiments, the single dose of the LNP is at about 0.3 to about 3 mg/kg.

[0518] Methods for treatment of a condition as provided herein may comprise a treatment course of one or more treatments, with each treatment comprising a single dose or multiple doses of a base editor system, or a LNP enclosing one or more components of the base editor system. For example, a subject in need thereof may be administered a single dose of a LNP enclosing a mRNA encoding a base editor fusion protein and a guide RNA for a treatment. In some embodiments, a subject may be administered a treatment course of one or more treatments, wherein each treatment comprises one or more of the single doses of the LNP, for example, a subject may also be administered 2, 3, 4, 5, 6, 7, 8, 9, 10, 11, 12, 13, 14, 15, 16, 17, 18, 19, 20, 21, 22, 23, 24, 25, 26, 27, 28, 29, 30, 31, 32, 33, 34, 35, 36, 37, 38, 39, 40, 41, 42, 43, 44, 45, 46, 47, 48, 49, 50, or more doses of a LNP enclosing a mRNA encoding a base editor fusion protein and a guide RNA for a treatment. The subject may receive a treatment course of 1, 2, 3, 4, 5, 6, 7, 8, 9, 10, 11, 12, 13, 14, 15, 16, 17, 18, 19, 20, 21, 22, 23, 24, 25, 26, 27, 28, 29, 30, 31, 32, 33, 34, 35, 36, 37, 38, 39, 40, 41, 42, 43, 44, 45, 46, 47, 48, 49, 50, or more treatments, where each dose may be administered 1 day, 2 days, 3 days, 4 days, 5 days, 6 days, 1 week, 2 weeks, 3 weeks, 1 month, 2 months, 3 months, 6 months, 9 months, 12 months, 24 months, 48 months or apart. A single dose for the treatment as described herein may comprise a LNP enclosing a guide RNA or a mRNA encoding the base editor fusion protein, or both.

[0519] In some embodiments, the single dose of the LNP comprises 0.1 mg/kg, 0.2 mg/kg, 0.3 mg/kg, 0.4 mg/kg, 0.5 mg/kg, 0.6 mg/kg, 0.7 mg/kg, 0.8 mg/kg, 0.9 mg/kg, 1.0 mg/kg, 1.1 mg/kg, 1.2 mg/kg, 1.3 mg/kg, 1.4 mg/kg, 1.5 mg/kg, 1.6 mg/kg, 1.7 mg/kg, 1.8 mg/kg, 1.9 mg/kg, 2.0 mg/kg, 2.1 mg/kg, 2.2 mg/kg, 2.3 mg/kg, 2.4 mg/kg, 2.5 mg/kg, 2.6 mg/kg, 2.7 mg/kg, 2.8 mg/kg, 2.9 mg/kg, 3.0 mg/kg, 3.1 mg/kg, 3.2 mg/kg, 3.3 mg/kg, 3.4 mg/kg, 3.5 mg/kg, 3.6 mg/kg, 3.7 mg/kg, 3.8 mg/kg, 3.9 mg/kg, 4.0 mg/kg, 4.1 mg/kg, 4.2 mg/kg, 4.3 mg/kg, 4.4 mg/kg, 4.5 mg/kg, 4.6 mg/kg, 4.7 mg/kg, 4.8 mg/kg, 4.9 mg/kg, 5.0 mg/kg, 5.1 mg/kg, 5.2 mg/kg, 5.3 mg/kg, 5.4 mg/kg, 5.5 mg/kg, 5.6 mg/kg, 5.7 mg/kg, 5.8 mg/kg, 5.9 mg/kg, 6.0 mg/kg, 6.1 mg/kg, 6.2 mg/kg, 6.3 mg/kg, 6.4 mg/kg, 6.5 mg/kg, 6.6 mg/kg, 6.7 mg/kg, 6.8 mg/kg, 6.9 mg/kg, 7.0 mg/kg, 7.1 mg/kg, 7.2 mg/kg, 7.3 mg/kg, 7.4 mg/kg, 7.5 mg/kg, 7.6 mg/kg, 7.7 mg/kg, 7.8 mg/kg, 7.9 mg/kg, 8.0 mg/kg, 8.1 mg/kg, 8.2 mg/kg, 8.3 mg/kg, 8.4 mg/kg, 8.5 mg/kg, 8.6 mg/kg, 8.7 mg/kg, 8.8 mg/kg, 8.9 mg/kg, 9.0 mg/kg, 9.1 mg/kg, 9.2 mg/kg, 9.3 mg/kg, 9.4 mg/kg, 9.5 mg/kg, 9.6 mg/kg, 9.7 mg/kg, 9.8 mg/kg, 9.9 mg/kg, 10 mg/kg, 11 mg/kg, 12 mg/kg, 13 mg/kg, 14 mg/kg, 15 mg/kg, 16 mg/kg, 17 mg/kg, 18 mg/kg, 19 mg/kg, 20 mg/kg, 25 mg/kg, 30 mg/kg, 35 mg/kg, 40 mg/kg, 45 mg/kg, 50 mg/kg, 55 mg/kg, 60 mg/kg, 65 mg/kg, 70 mg/kg, 75 mg/kg, 80 mg/kg, 85 mg/kg, 90 mg/kg, 95 mg/kg, 100 mg/kg, 105 mg/kg, 110 mg/kg, 115 mg/kg, 120 mg/kg, 125 mg/kg, 130 mg/kg, 135 mg/kg, 140 mg/kg, 145 mg/kg, 150 mg/kg, 155 mg/kg, 160 mg/kg, 165 mg/kg, 170 mg/kg, 175 mg/kg, 180 mg/kg, 185 mg/kg, 190 mg/kg, 195 mg/kg, 200 mg/kg, 250 mg/kg, 300 mg/kg, 350 mg/kg, 400 mg/kg, 450 mg/kg, or 500 mg/kg.

[0520] In some embodiments, the condition is a atherosclerotic cardiovascular disease. In some embodiments, the condition is a cardiovascular disease, or diabetes. In some embodiments, the condition is a atherosclerotic vascular disease.

[0521] In some embodiments, the subject is a non-human primate. In some embodiments, the subject is a monkey. In some embodiments, the subject is a human. In some embodiments, the deaminase is an adenine deaminase. In some embodiments, the nucleobase alteration is a A•T to G•C alteration. In some embodiments, the deaminase is an adenine deaminase and the nucleobase alteration is a A•T to G•C alteration. In some embodiments, the programmable DNA binding domain comprises a nuclease inactive Cas9. In some embodiments, the programmable DNA binding domain comprises a Cas9 nickase. In some embodiments, the programmable DNA binding domain comprises a Cas9.

[0522] In some embodiments, the nucleobase alteration is at a splice site of the PCSK9 gene. In some embodiments, the nucleobase alteration is at a splice donor site of the PCSK9 gene. In some embodiments, the splice donor site is at 5′ end of PCSK9 intron 1 as referenced in SEQ ID NO: 5. In some embodiments, the nucleobase alteration is at a splice acceptor site of the PCSK9 gene. In some embodiments, the nucleobase alteration results in a frame shift, a premature stop codon, a insertion or deletion in a transcript encoded by the PCSK9 gene. In some embodiments, the nucleobase alteration results in an aberrant transcript encoded by the PCSK9 gene. In some embodiments, the guide polynucleotide is a guide RNA. In some embodiments, the guide RNA is chemically modified. In some embodiments, the guide RNA comprises a tracrRNA sequence. In some embodiments, the guide RNA comprises a chemical modification as set forth in Table 1 or Table 24.

[0523] In some embodiments, the nucleobase alteration is at a splice site of the ANGPTL3 gene. In some embodiments, the nucleobase alteration is at a splice donor site of the ANGPTL3 gene. In some embodiments, the splice donor site is at 5′ end of ANGPTL3 intron 6 as referenced in SEQ ID NO: 7. In some embodiments, the nucleobase alteration is at a splice acceptor site of the ANGPTL3 gene. In some embodiments, the nucleobase alteration results in a frame shift, a premature stop codon, a insertion or deletion in a transcript encoded by the ANGPTL3 gene. In some embodiments, the nucleobase alteration results in an aberrant transcript encoded by the ANGPTL3 gene. In some embodiments, the guide polynucleotide is a guide RNA. In some embodiments, the guide RNA is chemically modified. In some embodiments, the guide RNA comprises a tracrRNA sequence. In some embodiments, the guide RNA comprises a chemical modification as set forth in Table 1 or Table 24.

[0524] In some embodiments, the guide RNA comprises a guide RNA sequence set forth in Table 1 or Table 24. In some embodiments, the guide RNA comprises the sequence 5′-5′-cscscsGCACCUUGGCGCAGCGGgUUUUAGagcuaGaaauagcaaGUUaAaAuAaggCUaGUC cG UUAucAAcuuGaaaaaguGgcaccgAgUCggugcusususu-3′ (SEQ ID NO: 9), 5′-cscscsGCACCUUGGCGCAGCGGgUUUUAGagcuagaaauagcaaGUUaAaAuAaggcuaGUcc GU UAucAAcuugaaaaagugGcaccgagucggugcusususu-3′ (SEQ ID NO: 2234), 5′-cscscsGCACCUUGGCGCAGCGGgUUUUAGagcuaGaaauagcaaGUUaAaAuAaggcuaGUcc GUUAucAAcuuGaaaaagugGcaccgagucggugcusususu-3′ (SEQ ID NO: 2235) (GA346), 5′-cscscsGCACCUUGGCGCAGCGGgUUUUAGagcuagaaauagcaaGUUaAaAuAaggcuaGUcc GUUAacAAcuugaaaaagugGcaccgagucggugcusususu-3 (SEQ ID NO: 65) (GA374), 5′-cscscsGCACCUUGGCGCAGCGGgUUUUAGagcuagaaauagcaaGUUaAaAuAaggcuaGUcc GUUAucAAcuugaaaaagugGcaccgagucggugcusususuuuu-3′ (SEQ ID NO: 11) (GA385), 5′-cscscsGCACCUUGGCGCAGCGGgUUUUAGagcuagaaauagcaaGUUaAaAuAaggcuaGUcc GUUAucAAcuugaaaaagugGcaccgagucggugcusususuuUu-3′ (SEQ ID NO: 2241) (GA386) or 5′-cscscsGCACCUUGGCGCAGCGgUUUUAGagcuaGaaauagcaaGUUaAaAuAaggcuaGUccG UUAucAAcuuGaaaaagugGcaccgagucggugcuususuuuu-3′ (SEQ ID NO: 12) (GA387).

[0525] In some embodiments, the protospacer sequence comprises a protospacer sequence set forth in Table 1 or Table 24. In some embodiments, the protospacer comprises the sequence

| (SEQ ID NO: 13) | |
|---|---|
| | 5′-CCCGCACCTTGGCGCAGCGG-3′, |
| (SEQ ID NO: 14) | |
| | AAGATACCTGAATAACTCTC-3′ |
| | or |
| (SEQ ID NO: 15) | |
| | 5′-AAGATACCTGAATAACCCTC-3′. |

[0526] In some embodiments, the base editor fusion protein comprises the sequence of SEQ ID NO: 3. In some embodiments, the adenosine deaminase comprises an amino acid sequence that is at least 60%, at least 65%, at least 70%, at least 75%, at least 80%, at least 85%, at least 90%, at least 95%, at least 96%, at least 97%, at least 98%, at least 99%, or at least 99.5% identical to the amino acid sequence set forth in SEQ ID NO: 3 or to any of the adenosine deaminases provided herein. It should be appreciated that adenosine deaminases provided herein may include one or more mutations (e.g., any of the mutations provided herein). The disclosure provides any deaminase domains with a certain percent identity plus any of the mutations or combinations thereof described herein. In some embodiments, the adenosine deaminase comprises an amino acid sequence that has 1, 2, 3, 4, 5, 6, 7, 8, 9, 10, 11, 12, 13, 14, 15, 16, 17, 18, 19, 20, 21, 22, 21, 24, 25, 26, 27, 28, 29, 30, 31, 32, 33, 34, 35, 36, 37, 38, 39, 40, 41, 42, 43, 44, 45, 46, 47, 48, 49, 50, or more mutations compared to the amino acid sequence set forth in SEQ ID NO: 3 or any of the adenosine deaminases provided herein. In some embodiments, the adenosine deaminase comprises an amino acid sequence that has at least 5, at least 10, at least 15, at least 20, at least 25, at least 30, at least 35, at least 40, at least 45, at least 50, at least 60, at least 70, at least 80, at least 90, at least 100, at least 110, at least 120, at least 130, at least 140, at least 150, at least 160, or at least 170 identical contiguous amino acid residues as compared to any one of the amino acid sequences set forth in SEQ ID NO: 3 or any of the adenosine deaminases provided herein.

[0527] In some embodiments, the mRNA comprises a cap analog.

[0528] In some embodiments, the mRNA comprises at least 1, 2, or 3 nucleotides at the 5′ end that comprises 2′-hydroxyl group, 2′-O-methyl group, or additional 2′ chemical modification or a combination thereof. In some embodiments, the mRNA comprises at least 1, 2, or 3 nucleotides at the 5′ end that comprises 2′-hydroxyl group, 2′-O-methyl group, or additional 2′ chemical modification or a combination thereof. In some embodiments, the mRNA comprises at least 1 nucleotide at the 5′ end that comprises 2′-hydroxyl group, 2′-O-methyl group, or additional 2′ chemical modification or a combination thereof. In some embodiments, the mRNA comprises at least 2 nucleotides at the 5′ end that comprises 2′-hydroxyl group, 2′-O-methyl group, or additional 2′ chemical modification or a combination thereof. In some embodiments, the mRNA comprises at least 3 nucleotides at the 5′ end that comprises 2′-hydroxyl group, 2′-O-methyl group, or additional 2′ chemical modification or a combination thereof. In some embodiments, the mRNA comprises at least 4 nucleotides at the 5′ end that comprises 2′-hydroxyl group, 2′-O-methyl group, or additional 2′ chemical modification or a combination thereof. In some embodiments, the mRNA comprises at least 5 nucleotides at the 5′ end that comprises 2′-hydroxyl group, 2′-O-methyl group, or additional 2′ chemical modification or a combination thereof. In some embodiments, the mRNA comprises at least 6 nucleotides at the 5′ end that comprises 2′-hydroxyl group, 2′-O-methyl group, or additional 2′ chemical modification or a combination thereof. In some embodiments, the mRNA comprises at least 7 nucleotides at the 5′ end that comprises 2′-hydroxyl group, 2′-O-methyl group, or additional 2′ chemical modification or a combination thereof. In some embodiments, the mRNA comprises at least 8 nucleotides at the 5′ end that comprises 2′-hydroxyl group, 2′-O-methyl group, or additional 2′ chemical modification or a combination thereof. In some embodiments, the mRNA comprises at least 9 nucleotides at the 5′ end that comprises 2′-hydroxyl group, 2′-O-methyl group, or additional 2′ chemical modification or a combination thereof. In some embodiments, the mRNA comprises at least 10 nucleotides at the 5′ end that comprises 2′-hydroxyl group, 2′-O-methyl group, or additional 2′ chemical modification or a combination thereof.

[0529] In some embodiments, the mRNA comprises a poly A tail.

[0530] The compositions described herein, may be administered to a subject in need thereof, in a therapeutically effective amount, to treat conditions related to high circulating cholesterol levels. Conditions related to high circulating cholesterol level that may be treated using the compositions and methods described herein include, without limitation:

hypercholesterolemia, elevated total cholesterol levels, elevated low-density lipoprotein (LDL) levels, elevated blood LDL-cholesterol levels, reduced blood high-density lipoprotein cholesterol level, liver steatosis, coronary heart disease, vascular disease, ischemia, stroke, peripheral vascular disease, thrombosis, type 2 diabetes, hypertriglyceridemia, high elevated blood pressure, atherosclerosis, obesity, Alzheimer's disease, neurodegeneration, and combinations thereof. The compositions and methods disclosed herein are effective in reducing the circulating cholesterol level in the subject, thus treating the conditions. The compositions and methods disclosed herein are effective in reducing blood LDL cholesterol level and/or a reducing blood triglycerides level as compared to before the administration.

[0531] In another aspect, provided herein is a method for treating or preventing a condition in a subject in need thereof, the method comprising administering to the subject the complex as provided herein, the composition as provided herein, or the lipid nanoparticle as provided herein, wherein the sgRNA directs the adenosine base editor protein to effect a modification in a target polynucleotide sequence in a cell of the subject, thereby treating or preventing the condition.

[0532] In some embodiments, the target polynucleotide sequence is in a PCSK9 gene. In some embodiments, the modification reduces expression of functional PCSK9 protein encoded by the PCSK9 gene in the subject. In some embodiments, the condition is atherosclerotic vascular disease. In some embodiments, the target polynucleotide sequence is in an ANGPTL3 gene. In some embodiments, the modification reduces expression of functional ANGPTL3 protein encoded by the ANGPTL3 gene in the subject. In some embodiments, the condition is an atherosclerotic vascular disease, hypertriglyceridemia, or diabetes.

[0533] A patient who is being treated for a condition, a disease or a disorder is one who a medical practitioner has diagnosed as having such a condition. Diagnosis may be by any suitable means. Diagnosis and monitoring may involve, for example, detecting the presence of diseased, dying or dead cells in a biological sample (e.g., tissue biopsy, blood test, or urine test), detecting the presence of plaques, detecting the level of a surrogate marker in a biological sample, or detecting symptoms associated with a condition. A patient in whom the development of a condition is being prevented may or may not have received such a diagnosis. One in the art will understand that these patients may have been subjected to the same standard tests as described above or may have been identified, without examination, as one at high risk due to the presence of one or more risk factors (e.g., family history or genetic predisposition).

[0534] The therapeutic methods of the disclosure may be carried out on subjects displaying pathology resulting from a disease or a condition, subjects suspected of displaying pathology resulting from a disease or a condition, and subjects at risk of displaying pathology resulting from a disease or a condition. For example, subjects that have a genetic predisposition to a disease or a condition can be treated prophylactically. Subjects exhibiting symptoms associated with a condition, a disease or a disorder may be treated to decrease the symptoms or to slow down or prevent further progression of the symptoms. The physical changes associated with the increasing severity of a disease or a condition are shown herein to be progressive. Thus, in embodiments of the disclosure, subjects exhibiting mild signs of the pathology associated with a condition or a disease may be treated to improve the symptoms and/or prevent further progression of the symptoms.

[0535] In some embodiments, the subject exhibits a reduced blood LDL cholesterol level and/or a reduced blood triglycerides level as compared to before the administration.

[0536] In some embodiments, after the administration, the subject exhibits a reduced blood low-density lipoprotein (LDL) cholesterol level by at least 5%, at least 10%, at least 15%, at least 20%, at least 25%, at least 30%, at least 35%, at least 40%, at least 45%, at least 50%, at least 55%, at least 60%, at least 65%, at least 70%, at least 75%, at least 80%, at least 85%, at least 90%, at least 95%, at least 97%, at least 98%, at least 99%, at least 99.5%, at least 99.9%, or 100% as compared to before the administration. In some embodiments, after the administration, the subject exhibits a reduced blood low-density lipoprotein (LDL) cholesterol level by at least 2 fold, at least 3 fold, at least 4 fold, at least 5 fold, at least 10 fold, at least 20 fold, at least 25 fold, at least 30 fold, at least 40 fold, at least 50 fold, at least 60 fold, at least 70 fold, at least 80 fold, at least 90 fold, at least 100 fold, at least 200 fold, at least 300 fold, at least 400 fold, at least 500 fold, at least 600 fold, at least 700 fold, at least 800 fold, at least 900 fold, at least 1000 fold, at least 2000 fold, at least 3000 fold, at least 4000 fold, at least 5000 fold, at least 6000 fold, at least 7000 fold, at least 8000 fold, at least 9000 fold, or at least 10000 fold as compared to before the administration.

[0537] In some embodiments, after the administration, the subject exhibits a reduced blood triglycerides level by at least 5%, at least 10%, at least 15%, at least 20%, at least 25%, at least 30%, at least 35%, at least 40%, at least 45%, at least 50%, at least 55%, at least 60%, at least 65%, at least 70%, at least 75%, at least 80%, at least 85%, at least 90%, at least 95%, at least 97%, at least 98%, at least 99%, at least 99.5%, at least 99.9%, or 100% as compared to before the administration.

[0538] In some embodiments, after the administration, the subject exhibits a reduced blood triglycerides level by at least 5%, at least 10%, at least 15%, at least 20%, at least 25%, at least 30%, at least 35%, at least 40%, at least 45%, at least 50%, at least 55%, at least 60%, at least 65%, at least 70%, at least 75%, at least 80%, at least 85%, at least 90%, at least 95%, at least 97%, at least 98%, at least 99%, at least 99.5%, at least 99.9%, or 100% as compared to before the administration. In some embodiments, after the administration, the subject exhibits a reduced blood triglycerides level by at least 2 fold, at least 3 fold, at least 4 fold, at least 5 fold, at least 10 fold, at least 20 fold, at least 25 fold, at least 30 fold, at least 40 fold, at least 50 fold, at least 60 fold, at least 70 fold, at least 80 fold, at least 90 fold, at least 100 fold, at least 200 fold, at least 300 fold, at least 400 fold, at least 500 fold, at least 600 fold, at least 700 fold, at least 800 fold, at least 900 fold, at least 1000 fold, at least 2000 fold, at least 3000 fold, at least 4000 fold, at least 5000 fold, at least 6000 fold, at least 7000 fold, at least 8000 fold, at least 9000 fold, or at least 10000 fold as compared to before the administration.

[0539] The dosage and frequency (single or multiple doses) administered to a mammal can vary depending upon a variety of factors, for example, whether the mammal suffers from another disease, and its route of administration; size, age, sex, health, body weight, body mass index, and diet of the recipient; nature and extent of symptoms of the disease being treated, kind of concurrent treatment, complications from the disease being treated or other health-related problems. Adjustment and manipulation of established dosages (e.g., frequency and duration) are well within the ability of those skilled in the art. The treatment, such as those disclosed herein, can be administered to the subject on a daily, twice daily, biweekly, monthly or any applicable basis that is therapeutically effective. In embodiments, the treatment is only on an as-needed basis, e.g., upon appearance of signs or symptoms of a condition or a disease, e.g., an atherosclerotic vascular disease, hypertriglyceridemia, or diabetes.

[0540] The compositions described herein, may be administered to a subject in need thereof, in a therapeutically effective amount, to treat conditions related to high circulating cholesterol levels. Conditions related to high circulating cholesterol level that may be treated using the compositions and methods described herein include, without limitation: hypercholesterolemia, elevated total cholesterol levels, elevated low-density lipoprotein (LDL) levels, elevated blood LDL-cholesterol levels, reduced blood high-density lipoprotein cholesterol level, liver steatosis, coronary heart disease, vascular disease, ischemia, stroke, peripheral vascular disease, thrombosis, type 2 diabetes, hypertriglyceridemia, high elevated blood pressure, atherosclerosis, obesity, Alzheimer's disease, neurodegeneration, and combinations thereof. The compositions and methods disclosed herein are effective in reducing the circulating cholesterol level in the subject, thus treating the conditions. The compositions and methods disclosed herein are effective in reducing blood LDL cholesterol level and/or a reducing blood triglycerides level as compared to before the administration.

[0541] Toxicity and therapeutic efficacy of the compositions of the disclosure can be determined by standard pharmaceutical procedures in cell cultures or experimental animals, e.g., for determining the LD50 (the dose lethal to 50% of the population) and the ED50 (the dose therapeutically effective in 50% of the population). The dose ratio between toxic and therapeutic effects (the ratio LD50/ED50) is the therapeutic index. Agents that exhibit high therapeutic indices are preferred. The dosage of agents lies preferably within a range of circulating concentrations that include the ED50 with little or no toxicity. While agents that exhibit toxic side effects may be used, care should be taken to design a delivery system that targets such agents to the site of affected tissue in order to minimize potential damage to uninfected cells and, thereby, reduce side effects.

[0542] The skilled artisan will appreciate that certain factors may influence the dosage and frequency of administration required to effectively treat a subject, including but not limited to the severity of the disease or disorder, previous treatments, the general characteristics of the subject including health, sex, weight and/or age of the subject, and other diseases present. Moreover, treatment of a subject with a therapeutically effective amount of the compositions can include a single treatment or, preferably, can include a series of treatments. It will also be appreciated that the effective dosage of the composition of the disclosure used for treatment may increase or decrease over the course of a particular treatment. Changes in dosage may result and become apparent from the results of diagnostic assays as described herein. The therapeutically-effective dosage will generally be dependent on the patient's status at the time of administration. The precise amount can be determined by routine experimentation but may ultimately lie with the judgment of the clinician, for example, by monitoring the patient for signs of disease and adjusting the treatment accordingly.

[0543] Frequency of administration may be determined and adjusted over the course of therapy, and is generally, but not necessarily, based on treatment and/or suppression and/or amelioration and/or delay of a disease. Alternatively, sustained continuous release formulations of a polypeptide or a polynucleotide may be appropriate. Various formulations and devices for achieving sustained release are known in the art. In some embodiments, dosage is daily, every other day, every three days, every four days, every five days, or every six days. In some embodiments, dosing frequency is once every week, every 2 weeks, every 4 weeks, every 5 weeks, every 6 weeks, every 7 weeks, every 8 weeks, every 9 weeks, or every 10 weeks; or once every month, every 2 months, or every 3 months, or longer. The progress of this therapy is easily monitored by conventional techniques and assays.

[0544] The dosing regimen (including a composition disclosed herein) can vary over time. In some embodiments, for an adult subject of normal weight, doses ranging from about 0.01 to 1000 mg/kg may be administered. In some embodiments, the dose is between 1 to 200 mg. The particular dosage regimen, i.e., dose, timing and repetition, will depend on the particular subject and that subject's medical history, as well as the properties of the polypeptide or the polynucleotide (such as the half-life of the polypeptide or the polynucleotide, and other considerations well known in the art).

[0545] For the purpose of the present disclosure, the appropriate therapeutic dosage of a composition as described herein will depend on the specific agent (or compositions thereof) employed, the formulation and route of administration, the type and severity of the disease, whether the polypeptide or the polynucleotide is administered for preventive or therapeutic purposes, previous therapy, the subject's clinical history and response to the antagonist, and the discretion of the attending physician. Typically, the clinician will administer a polypeptide until a dosage is reached that achieves the desired result.

[0546] Administration of one or more compositions can be continuous or intermittent, depending, for example, upon the recipient's physiological condition, whether the purpose of the administration is therapeutic or prophylactic, and other factors known to skilled practitioners. The administration of a composition may be essentially continuous over a preselected period of time or may be in a series of spaced dose, e.g., either before, during, or after developing a disease.

[0547] The methods and compositions of the disclosure described herein including embodiments thereof can be administered with one or more additional therapeutic regimens or agents or treatments, which can be co-administered to the mammal.

### Metabolic Syndrome and Cardiovascular Disease

[0548] The ability of gene modification, especially to edit bases directly allows for the precise edit, modification, and/or disruption of genes in vivo without the need to create DSBs and improved methods of treating human disease. For example, Chadwick et. al used cytosine base editing to introduce nonsense mutations into the Pcsk9 gene in adult mice. Delivery of BE3 and a gRNA via adenoviral vector into the liver caused a reduction in plasma PCSK9 levels by 56%. Furthermore, cholesterol levels in the base-edited mice were reduced by roughly 30%. In subsequent work, cytosine base editing to disrupt the Angptl3 gene in adult mice resulted in substantially reduced blood cholesterol and triglyceride levels, and cytosine base editing to disrupt the Pcsk9 gene or the Hpd gene in fetal mice resulted in postnatal reduction of cholesterol levels or cure of the disease hereditary tyrosinemia type 1.

[0549] Cardiovascular disease, obesity, type 2 diabetes, metabolic syndrome may share one or more similar underlying etiologies. The human PCSK9 gene encodes a protein that helps regulate the amount of cholesterol in the bloodstream. The liver protein Proprotein Convertase Subtilisin/Kexin Type 9 (PCSK9) in human is a secreted, globular, auto-activating serine protease that acts as a protein-binding adaptor within endosomal vesicles to bridge a pH-dependent interaction with the low-density lipoprotein receptor (LDL-R) during endocytosis of LDL particles, preventing recycling of the LDL-R to the cell surface and leading to reduction of LDL-cholesterol clearance. PCSK9 orthologs are found across many species. The PCSK9 protein breaks down low-density lipoprotein receptors before they reach the cell surface, so more cholesterol can remain in the bloodstream. As a result, the PCSK9 gene and the encoded PCSK9 protein are attractive targets for regulating cholesterol metabolism, especially in lowering blood cholesterol levels.

[0550] Other targets have also been shown that are associated with decreased plasma levels of triglycerides (TGs), low-density lipoprotein cholesterol (LDL-C), and high-density lipoprotein cholesterol (HDL-C), which leads to a significant reduction in cardiovascular risk. For example, human ANGPTL3 is considered an important new pharmacological target for the treatment of cardiovascular diseases. Experimental evidence demonstrates that anti-ANGPTL3 therapies have an important anti-atherosclerotic effect. Results from phase I clinical trials with a monoclonal anti-ANGPTL3 antibody (evinacumab) and anti-sense oligonucleotide (ASO) clearly show a significant lipid lowering effect.

[0551] Human ANGPTL3 gene is located on chromosome 1p31. Genetic variants of human ANGPTL3 gene have been linked to different plasma lipid profiles. For example, homozygous loss of function (LOF) variants of ANGPTL3 gene cause the levels of all plasma lipoproteins to be greatly reduced. ANGPTL3 is exclusively expressed in the liver and is secreted into circulation where it goes through cleavage by hepatic proprotein convertases. The ANGPTL3 protein is a 460-amino-acid (aa) polypeptide with a distinctive signal peptide sequence, a N-terminal helical domain and a C-terminal globular fibrinogen homology domain. The N-terminal coiled-coil region (17-207aa) affects plasma TG levels via reversibly inhibiting catalytic activity of LPL while the fibrinogen-like domain (207-460aa) binds to integrin αvβ3 receptor and affects angiogenesis, which is similar to the function of angiopoietins. A short linker region (at 221-222 and 224-225) between N- and C-terminal domains is a special zone, which has been verified to be split by furin. Existed results have shown that the truncated form of cleavage ANGPTL3 could reinforce the inhibitory activity of LPL and endothelial lipase (EL), suggesting that the cleavage type of ANGPTL3 may function more effectively.

[0552] Moreover, human apolipoprotein C-III (APOC3) could potentially be another therapeutic target. APOC3 is a protein that in humans is encoded by the APOC3 gene. APOC3 is a component of VLDL. APOC3 inhibits lipoprotein lipase and hepatic lipase. It is also thought to inhibit hepatic uptake of triglyceride-rich particles. An increase in APOC3 levels induces the development of hypertriglyceridemia. Recent evidence suggests an intracellular role for APOC3 in promoting the assembly and secretion of triglyceride-rich VLDL particles from hepatic cells under lipid-rich conditions. However, two naturally occurring point mutations in human apoC3 coding sequence, A23T and K58E have been shown to abolish the intracellular assembly and secretion of triglyceride-rich VLDL particles from hepatic cells.

[0553] Targeted base editing with target genes involved in vascular disease and diabetes as described in Chadwick A C, Wang X, Musunuru K. In vivo base editing of PCSK9 (proprotein convertase subtilisin/kexin type 9) as a therapeutic alternative to genome editing. Arterioscler Thromb Vasc Biol, 2017, 37: 1741-7; Chadwick A C, Evitt N H, Lv W, et al. Reduced blood lipid levels with in vivo CRISPR-Cas9 base editing of ANGPTL3. Circulation, 2018, 137: 975-7; Rossidis A C, Stratigis J D, Chadwick A C, et al. In utero CRISPR-mediated therapeutic editing of metabolic genes. Nat Med, 2018, 24: 1513-8 is incorporated herein by reference in its entirety. While genes involved in lipid metabolism, including PCSK9, have been edited by targeted by current gene editing technologies, there remains a need for precise base editing targeting these genes for improved editing outcomes.

### Pharmaceutical Composition

[0554] In some aspects, provided herein is a pharmaceutical composition comprising the base editor system as provided herein and a pharmaceutically acceptable carrier or excipient.

[0555] In some aspects, provided herein, is a pharmaceutical composition for gene modification comprising a gRNA or sgRNA described herein and a Base editor fusion protein or a nucleic acid sequence encoding the Base editor fusion protein and a pharmaceutically acceptable carrier. The composition for gene modification comprising a gRNA or sgRNA described herein and a Base editor fusion protein or a nucleic acid sequence encoding the Base editor fusion protein can be formulated into pharmaceutical compositions. Pharmaceutical compositions are formulated in a conventional manner using one or more pharmaceutically acceptable inactive ingredients that facilitate processing of the active compounds into preparations that can be used pharmaceutically. Suitable formulations for use in the present disclosure and methods of delivery are generally well known in the art. Proper formulation is dependent upon the route of administration chosen. A summary of pharmaceutical compositions described herein can be found, for example, in Remington: The Science and Practice of Pharmacy, Nineteenth Ed (Easton, Pa.: Mack Publishing Company, 1995); Hoover, John E., Remington's Pharmaceutical Sciences, Mack Publishing Co., Easton, Pennsylvania 1975; Liberman, H. A. and Lachman, L., Eds., Pharmaceutical Dosage Forms, Marcel Decker, New York, N.Y., 1980; and Pharmaceutical Dosage Forms and Drug Delivery Systems, Seventh Ed. (Lippincott Williams & Wilkins 1999), herein incorporated by reference for such disclosure.

[0556] A pharmaceutical composition can be a mixture of a gRNA or sgRNA described herein and a Base editor fusion protein or a nucleic acid sequence encoding the Base editor fusion protein with one or more of other chemical components (i.e., pharmaceutically acceptable ingredients), such as carriers, excipients, binders, filling agents, suspending agents, flavoring agents, sweetening agents, disintegrating agents, dispersing agents, surfactants, lubricants, colorants, diluents, solubilizers, moistening agents, plasticizers, stabilizers, penetration enhancers, wetting agents, anti-foaming agents, antioxidants, preservatives, or one or more combination thereof. The pharmaceutical composition facilitates administration of the gRNA or sgRNA described herein and the Base editor fusion protein or a nucleic acid sequence encoding the Base editor fusion protein to an organism or a subject in need thereof.

[0557] The pharmaceutical compositions of the present disclosure can be administered to a subject using any suitable methods known in the art. The pharmaceutical compositions described herein can be administered to the subject in a variety of ways, including parenterally, intravenously, intradermally, intramuscularly, colonically, rectally, or intraperitoneally. In some embodiments, the pharmaceutical compositions can be administered by intraperitoneal injection, intramuscular injection, subcutaneous injection, or intravenous injection of the subject. In some embodiments, the pharmaceutical compositions can be administered parenterally, intravenously, intramuscularly, or orally.

[0558] For administration by inhalation, the adenovirus described herein can be formulated for use as an aerosol, a mist, or a powder. For buccal or sublingual administration, the pharmaceutical compositions may be formulated in the form of tablets, lozenges, or gels formulated in a conventional manner. In some embodiments, the adenovirus described herein can be prepared as transdermal dosage forms. In some embodiments, the adenovirus described herein can be formulated into a pharmaceutical composition suitable for intramuscular, subcutaneous, or intravenous injection. In some embodiments, the adenovirus described herein can be administered topically and can be formulated into a variety of topically administrable compositions, such as solutions, suspensions, lotions, gels, pastes, medicated sticks, balms, creams, or ointments. In some embodiments, the adenovirus described herein can be formulated in rectal compositions such as enemas, rectal gels, rectal foams, rectal aerosols, suppositories, jelly suppositories, or retention enemas. In some embodiments, the adenovirus described herein can be formulated for oral administration such as a tablet, a capsule, or liquid in the form of aqueous suspensions or solutions selected from the group including, but not limited to, aqueous oral dispersions, emulsions, solutions, elixirs, gels, and syrups.

[0559] In some embodiments, the pharmaceutical composition for gene modification comprising a gRNA or sgRNA described herein and a Type II Cas protein or a nucleic acid sequence encoding the Type II Cas protein further comprises a therapeutic agent. The additional therapeutic agent may modulate different aspects of the disease, disorder, or condition being treated and provide a greater overall benefit than administration of either the replication competent recombinant adenovirus or the therapeutic agent alone. Therapeutic agents include, but are not limited to, a chemotherapeutic agent, a radiotherapeutic agent, a hormonal therapeutic agent, and/or an immunotherapeutic agent. In some embodiments, the therapeutic agent may be a radiotherapeutic agent. In some embodiments, the therapeutic agent may be a hormonal therapeutic agent. In some embodiments, the therapeutic agent may be an immunotherapeutic agent. In some embodiments, the therapeutic agent is a chemotherapeutic agent. Preparation and dosing schedules for additional therapeutic agents can be used according to manufacturers' instructions or as determined empirically by a skilled practitioner. For example, preparation and dosing schedules for chemotherapy are also described in The Chemotherapy Source Book, 4th Edition, 2008, M. C. Perry, Editor, Lippincott, Williams & Wilkins, Philadelphia, PA.

[0560] The subjects that can be treated with gene modification compositions of chemically modified gRNAs or sgRNAs described herein and a Type II Cas protein or a nucleic acid sequence encoding the Type II Cas protein and methods described herein can be any subject with a disease or a condition. For example, the subject may be a eukaryotic subject, such as an animal. In some embodiments, the subject is a mammal, e.g., human. In some embodiments, the subject is a human. In some embodiments, the subject is a non-human animal. In some embodiments, the subject is a fetus, an embryo, or a child. In some embodiments, the subject is a non-human primate such as chimpanzee, and other apes and monkey species; farm animals such as cattle, horses, sheep, goats, pigs; domestic animals such as rabbits, dogs, and cats; laboratory animals including rodents, such as rats, mice, and guinea pigs, and the like.

[0561] In some embodiments, the subject is prenatal (e.g., a fetus), a child (e.g., a neonate, an infant, a toddler, a preadolescent), an adolescent, a pubescent, or an adult (e.g., an early adult, a middle-aged adult, a senior citizen). The human subject can be between about 0 month and about 120 years old, or older. The human subject can be between about 0 and about 12 months old; for example, about 1, 2, 3, 4, 5, 6, 7, 8, 9, 10, 11, or 12 months old. The human subject can be between about 0 and 12 years old; for example, between about 0 and 30 days old; between about 1 month and 12 months old; between about 1 year and 3 years old; between about 4 years and 5 years old; between about 4 years and 12 years old; about 1, 2, 3, 4, 5, 6, 7, 8, 9, 10, 11, or 12 years old. The human subject can be between about 13 years and 19 years old; for example, about 13, 14, 15, 16, 17, 18, or 19 years old. The human subject can be between about 20 and about 39 years old; for example, about 20, 21, 22, 23, 24, 25, 26, 27, 28, 29, 30, 31, 32, 33, 34, 35, 36, 37, 38, or 39 years old. The human subject can be between about 40 to about 59 years old; for example, about 40, 41, 42, 43, 44, 45, 46, 47, 48, 49, 50, 51, 52, 53, 54, 55, 56, 57, 58, or 59 years old. The human subject can be greater than 59 years old; for example, about 60, 61, 62, 63, 64, 65, 66, 67, 68, 69, 70, 71, 72, 73, 74, 75, 76, 77, 78, 79, 80, 81, 82, 83, 84, 85, 86, 87, 88, 89, 90, 91, 92, 93, 94, 95, 96, 97, 98, 99, 100, 101, 102, 103, 104, 105, 106, 107, 108, 109, 110, 111, 112, 113, 114, 115, 116, 117, 118, 119, or 120 years old. The human subjects can include male subjects and/or female subjects.

### Lipid Nanoparticle (LNP) Composition

[0562] In some embodiments, LNPs are prepared in accordance with the methods described in Conway, A. et al. 2019 Mol. Ther. 27, 866-877, and Villiger, L. et al 2021 Nat. Biomed. Eng. 5, 179-18, which are incorporated by reference. In some embodiments, LNPs are composed of an amino lipid, a monomethoxypolyethylene glycol (or methoxypoluyethyle glycol) of average molecular weight 2000 Da conjugated to a lipid called PEG-Lipid, cholesterol and 1,2-distearoyl-sn-glycero-3-phosphocholine (DSPC). In some embodiments, LNPs are composed of proprietary ionizable cationic lipid, 1,2-distearoyl-sn-glycero-3-phosphocholine, cholesterol, and a PEG-lipid.

[0563] In some embodiments, LNPs have an average hydrodynamic diameter of about 30-about 160, about 35-about 160, about 40-about 160, about 45-about 160, about 50-about 160, about 55-about 160, about 60-about 160, about 65-about 160, about 70-about 160, about 75-about 160, about 80-about 160, about 85-about 160, about 90-about 160, about 95-about 160, about 100-about 160, about 105-about 160, about 110-about 160, about 115-about 160, about 120-about 160, about 125-about 160, about 130-about 160, about 135-about 160, about 140-about 160, about 145-about 160, about 150-about 160, about 30-about 155, about 30-about 150, about 30-about 145, about 30-about 140, about 30-about 135, about 30-about 130, about 30-about 125, about 30-about 120, about 30-about 115, about 30-about 110, about 30-about 105, about 30-about 100, about 30-about 95, about 30-about 90, about 30-about 85, about 30-about 80, about 30-about 75, about 30-about 70, about 30-about 65, about 30-about 60, about 30-about 55, about 30-about 50, about 30-about 45, about 30-about 40, about 30-about 45, about 35-about 45, about 35-about 50, about 40-about 50, about 40-about 55, about 45-about 55, about 45-about 60, about 50-about 60, about 50-about 65, about 55-about 60, about 55-about 65, about 55-about 70, about 60-about 70, about 60-about 75, about 65-about 75, about 65-about 80, about 70-about 80, about 70-about 85, about 75-about 85, about 75-about 90, about 80-about 90, about 80-about 95, about 85-about 95, about 85-about 100, about 90-about 100, about 90-about 105, about 95-about 105, about 95-about 110, about 100-about 110, about 100-about 115, about 105-about 115, about 105-about 120, about 110-about 120, about 110-about 125, about 115-about 125, about 115-about 130, about 120-about 130, about 120-about 135, about 125-about 135, about 125-about 140, about 130-about 140, about 130-about 145, about 35-about 140, about 45-about 130, about 55-about 120, about 65-about 110, about 75-about 100, or about 85-about 90 nm.

[0564] In some embodiments, LNPs comprise about 1-about 97, about 5-about 97, about 10-about 97, about 15-about 97, about 20-about 97, about 25-about 97, about 30-about 97, about 35-about 97, about 40-about 97, about 45-about 97, about 50-about 97, about 55-about 97, about 60-about 97, about 65-about 97, about 70-about 97, about 75-about 97, about 80-about 97, about 1-about 95, about 1-about 90, about 1-about 85, about 1-about 80, about 1-about 75, about 1-about 70, about 1-about 65, about 1-about 60, about 1-about 55, about 1-about 50, about 1-about 45, about 1-about 40, about 1-about 35, about 1-about 30, about 1-about 25, about 1-about 20, about 1-about 15, about 1-about 10, about 10-about 30, about 10-about 35, about 15-about 35, about 15-about 40, about 20-about 40, about 20-about 45, about 25-about 45, about 25-about 50, about 30-about 50, about 30-about 55, about 35-about 55, about 35-about 60, about 40-about 60, about 40-about 65, about 45-about 65, about 45-about 70, about 50-about 70, about 50-about 75, about 55-about 75, about 55-about 80, or about 60-about 80% of amino lipids (in mol %).

[0565] In some embodiments, LNPs comprise about 1-about 40, about 1-about 38, about 1-about 36, about 1-about 34, about 1-about 32, about 1-about 30, about 1-about 28, about 1-about 26, about 1-about 24, about 1-about 22, about 1-about 20, about 1-about 18, about 1-about 16, about 1-about 14, about 1-about 12, about 1-about 10, about 1-about 8, about 1-about 6, about 1-about 4, about 1-about 2, about 2-about 40, about 4-about 40, about 6-about 40, about 8-about 40, about 10-about 40, about 12-about 40, about 14-about 40, about 16-about 40, about 18-about 40, about 20-about 40, about 22-about 40, about 24-about 40, about 26-about 40, about 28-about 40, about 30-about 40, about 32-about 40, about 34-about 40, about 36-about 40, about 38-about 40, about 2-about 35, about 2-about 30, about 2-about 25, about 2-about 20, about 2-about 15, about 2-about 10, about 2-about 8, about 2-about 6, or about 2-about 4% DSPC (in mol %).

[0566] In some embodiments, LNPs comprise about 1-about 20, about 1-about 19, about 1-about 18, about 1-about 17, about 1-about 16, about 1-about 15, about 1-about 14, about 1-about 13, about 1-about 12, about 1-about 11, about 1-about 10, about 1-about 9, about 1-about 8, about 1-about 7, about 1-about 6, about 1-about 5, about 1-about 4, about 1-about 3, about 2-about 6, about 3-about 7, about 4-about 8, about 5-about 9, about 6-about 10, about 7-about 11, about 8-about 12, about 9-about 13, about 10-about 14, about 11-about 15, about 12-about 16, about 13-about 17, about 14-about 18, about 15-about 19, or about 16-about 20% PEG-Lipid (in mol %),

[0567] In some embodiments, LNPs comprise about 1-about 97, about 5-about 97, about 10-about 97, about 15-about 97, about 20-about 97, about 25-about 97, about 30-about 97, about 35-about 97, about 40-about 97, about 45-about 97, about 50-about 97, about 55-about 97, about 60-about 97, about 65-about 97, about 70-about 97, about 75-about 97, about 80-about 97, about 1-about 95, about 1-about 90, about 1-about 85, about 1-about 80, about 1-about 75, about 1-about 70, about 1-about 65, about 1-about 60, about 1-about 55, about 1-about 50, about 1-about 45, about 1-about 40, about 1-about 35, about 1-about 30, about 1-about 25, about 1-about 20, about 1-about 15, about 1-about 10, about 10-about 30, about 10-about 35, about 15-about 35, about 15-about 40, about 20-about 40, about 20-about 45, about 25-about 45, about 25-about 50, about 30-about 50, about 30-about 55, about 35-about 55, about 35-about 60, about 40-about 60, about 40-about 65, about 45-about 65, about 45-about 70, about 50-about 70, about 50-about 75, about 55-about 75, about 55-about 80, or about 60-about 80% of cholesterol (in mol %).

[0568] In some embodiments, LNPs comprise about 1-about 97, 5-about 97, 10-about 97, 15-about 97, 20-about 97, 25-about 97, 30-about 97, 35-about 97, 40-about 97, 45-about 97, 50-about 97, 55-about 97, 60-about 97, 65-about 97, 70-about 97, 75-about 97, 80-about 97, 1-about 95, 1-about 90, 1-about 85, 1-about 80, 1-about 75, 1-about 70, 1-about 65, 1-about 60, 1-about 55, 1-about 50, 1-about 45, 1-about 40, 1-about 35, 1-about 30, 1-about 25, 1-about 20, 1-about 15, 1-about 10, 10-about 30, 10-about 35, 15-about 35, 15-about 40, 20-about 40, 20-about 45, 25-about 45, 25-about 50, 30-about 50, 30-about 55, 35-about 55, 35-about 60, 40-about 60, 40-about 65, 45-about 65, 45-about 70, 50-about 70, 50-about 75, 55-about 75, 55-about 80, or 60-about 80% of amino lipids; 1-about 40, 1-about 38, 1-about 36, 1-about 34, 1-about 32, 1-about 30, 1-about 28, 1-about 26, 1-about 24, 1-about 22, 1-about 20, 1-about 18, 1-about 16, 1-about 14, 1-about 12, 1-about 10, 1-about 8, 1-about 6, 1-about 4, 1-about 2, 2-about 40, 4-about 40, 6-about 40, 8-about 40, 10-about 40, 12-about 40, 14-about 40, 16-about 40, 18-about 40, 20-about 40, 22-about 40, 24-about 40, 26-about 40, 28-about 40, 30-about 40, 32-about 40, 34-about 40, 36-about 40, 38-about 40, 2-about 35, 2-about 30, 2-about 25, 2-about 20, 2-about 15, 2-about 10, 2-about 8, 2-about 6, or 2-about 4% DSPC; 1-about 20, 1-about 19, 1-about 18, 1-about 17, 1-about 16, 1-about 15, 1-about 14, 1-about 13, 1-about 12, 1-about 11, 1-about 10, 1-about 9, 1-about 8, 1-about 7, 1-about 6, 1-about 5, 1-about 4, 1-about 3, 2-about 6, 3-about 7, 4-about 8, 5-about 9, 6-about 10, 7-about 11, 8-about 12, 9-about 13, 10-about 14, 11-about 15, 12-about 16, 13-about 17, 14-about 18, 15-about 19, and about 16-about 20% PEG-Lipid, with the balance being cholesterol (all in mol %).

### Amino Lipid

[0569] Described herein are LNP compositions comprising an amino lipid, a phospholipid, a PEGlipid, a cholesterol or a derivative thereof, a payload, or any combination thereof. In some embodiments, the LNP composition comprises an amino lipid. In one aspect, disclosed herein is an amino lipid having the structure of Formula (I), or a pharmaceutically acceptable salt or solvate thereof,

[chemical structure]

[0570] wherein
[0571] each of R¹ and R² is independently C₇-C₂₂ alkyl, C₇-C₂₂ alkenyl, C₃-C₈ cycloalkyl, —C₂-C₁₀ alkylene-L-R⁶, or

[chemical structure]

wherein each of the alkyl, alkylene, alkenyl, and cycloalkyl is independently substituted or unsubstituted;
[0572] each of X, Y, and Z is independently —C(═O)NR⁴—, —NR⁴C(═O)—, —C(═O)O—, —OC(═O)—, —OC(═O)O—, —NR⁴C(═O)O—, —OC(═O)NR⁴—, —NR⁴C(═O)NR⁴—, —NR⁴C(═NR⁴)NR⁴—, —C(═S)NR⁴—, —NR⁴C(═S)—, —C(═O)O—, —OC(═S)—, OC(═S)O—, —NR⁴C(═S)O—, —OC(═S)NR⁴—, —NR⁴C(═S)NR⁴—, —C(═O)S—, —SC(═O)—, —OC(═O)S—, —NR⁴C(═O)S—. —SC(═O)NR⁴—, —C(═S)S—, —SC(═S)—, —SC(═S)O—, —NR⁴C(═S)S—, —SC(═S)NR⁴—, —C(═S)S—, —SC(═S)—, —SC(═O)S—, —SC(═S)S—, —NR⁴C(═S)S—, —SC(═S)NR⁴—O, S, or a bond;
[0573] each of L is independently —C(═O)NR⁴—, —NR⁴C(═O)—, —C(═O)O—. —OC(═O)O—, —NR⁴C(═O)O—, —OC(═O)NR⁴—, —NR⁴C(═O)NR⁴—, —NR⁴C(═NR⁴)NR⁴—, —C(═S)NR⁴—, —NR⁴C(═S)—, —C(═O)O—, —OC(═S)—, OC(═S)O—, —NR⁴C(═S)O—, —OC(═S)NR⁴—, —NR⁴C(═S)NR⁴—, —C(═O)S—, SC(═O)—, —OC(═O)S—, —NR⁴C(═O)S—, —SC(═O)NR⁴—, —C(═S)S—, —SC(═S)—, —SC(═S)O—, —NR⁴C(═S)S—, —SC(═S)NR⁴—, —C(═S)S—, —SC(═S)—, —SC(═O)S—, —SC(═S)S—, —NR⁴C(═S)S—, — SC(═S)NR⁴—, O, S, —C₁-C₁₀ alkylene-O—, —C₁-C₁₀ alkylene-C(═O)O—, —C₁-C₁₀ alkylene-OC(═O)—, or a bond, wherein the alkylene is substituted or unsubstituted;
[0574] R³ is —C₀-C₁₀ alkylene-NR⁷R⁸, —C₀-C₁₀ alkylene-heterocycloalkyl, or —C₀-C₁₀ alkylene-heterocycloaryl,
[0575] wherein the alkylene, heterocycloalkyl and heterocycloaryl is independently substituted or unsubstituted; each of R⁴ is independently hydrogen or substituted or unsubstituted C₁-C₆ alkyl;
[0576] R⁵ is hydrogen or substituted or unsubstituted C₁-C₆ alkyl;
[0577] each of R⁶ is independently substituted or unsubstituted C₃-C₂₂ alkyl or substituted or unsubstituted C₃-C₂₂ alkenyl;
[0578] each of R⁷ and R⁸ is independently hydrogen or substituted or unsubstituted C₁-C₆ alkyl, or R⁷ and R⁸ taken together with the nitrogen to which they are attached form a substituted or unsubstituted C₂-C₆ heterocyclyl;
[0579] p is an integer selected from 1 to 10; and
[0580] each of n, m, and q is independently 0, 1, 2, 3, 4, or 5.

[0581] In some embodiments of Formula (I), if the structure carries more than one asymmetric C-atom, each asymmetric C-atom independently represents racemic, chirally pure R and/or chirally pure S isomer, or a combination thereof.

[0582] In some embodiments, each of n, in, and q in Formula (I) is independently 0, 1, 2, or 3. In some embodiments, each of n, m, and q in Formula (I) is 1.

[0583] In some embodiments, the compound of Formula (1) has a structure of Formula (Ia), or a pharmaceutically acceptable salt or pharmaceutically acceptable solvate thereof.

[chemical structure]

[0584] wherein
[0585] each of R¹ and R² is independently C₇-C₂₂ alkyl, C₇-C₂₂ alkenyl, C₃-C₈ cycloalkyl, —C₂-C₁₀ alkylene-L-R⁶, or

[chemical structure]

wherein each of the alkyl, alkylene, alkenyl, and cycloalkyl is independently substituted or unsubstituted;
[0586] each of X, Y, and Z is independently C(═O)NR⁴—, —NR⁴C(D)-, —C(═O)O—, —OC(═O)—, —OC(═O)O—, —NR⁴C(═O)O—, —OC(═O)NR⁴—, —NR⁴C═O)NR⁴—, —NR⁴C(═NR⁴)NR⁴—. —C(═S)NR⁴—, —NR⁴C(═S)—, —C(E)O—, —OC(═S)—, OC(═S)O—, —NR⁴C(═S)O—, —OC(═S)NR⁴—, —NR⁴C(═S)NR⁴—, —C(═O)S—, —SC(═O)—, —OC(═O)S—, —NR⁴C(═O)S—, —SC(═O)NR⁴—, —C(═S)S—, —SC(═S)—, —SC(═S)O—, —NR⁴C(═S)S—, —SC(═S)NR⁴—, —C(═S)S—. —SC(═S)—, —SC(═O)S—, —SC(═S)S—. —NR⁴C(═S)S—, — SC(═S)NR⁴—, O, S, —C₁-C₁₀ alkylene-O—, or a bond, wherein the alkylene is substituted or unsubstituted;
[0587] each of L is independently —C(═O)NR⁴—, —NR⁴C(═O)—, —C(═O)O—, —OC(═O)—, —OC(═O)O—, —NR⁴C(═O)O—, —OC(═O)NR⁴—, —NR⁴C(═O)NR⁴—, —NR⁴C(═NR⁴)NR⁴—. —C(═S)NR⁴—, —NR⁴C(═S)—, —C(═O)O—, —OC(═S)—, OC(═S)O—, —NR⁴C(═S)O—, —OC(═S)NR⁴—, —NR⁴C(═S)NR⁴—, —C(═O)S—, —SC(═O)—, —OC(═O)S—, —NR⁴C(═O)S—, —SC(═O)NR⁴— —C(═S)S—, —SC(═S)—, —SC(═S)O—, —NR⁴C(═S)S—, —SC(═S)NR⁴—, —C(═S)S—, —SC(═S)—, —SC(═O)S—, —SC(═S)S—, —NR⁴C(═S)S—, — SC(═S)NR⁴—, O, S. —C₁-C₁₀ alkylene-O—, —C₁-C₁₀ alkylene-C(═O)O—, —C₁-C₁₀ alkylene-OC(═O)—, or a bond, wherein the alkylene is substituted or unsubstituted;
[0588] R³ is —C₀-C₁₀ alkylene-NR⁷R⁸, —C₀-C₁₀ alkylene-heterocycloalkyl, or —C₀-C₁₀ alkylene-heterocyclowyl, wherein the alkylene, heterocycloalkyl and heterocycloaryl is independently substituted or unsubstituted;
[0589] each of R⁴ is independently hydrogen or substituted or unsubstituted CI-C₆ alkyl;
[0590] R⁵ is hydrogen or substituted or unsubstituted C₁-C₆ alkyl;
[0591] each of R⁶ is independently substituted or unsubstituted C₃-C₂₂ alkyl or substituted or unsubstituted C₃-C₂₂ alkenyl;
[0592] each of R⁷ and R⁸ is independently hydrogen or substituted or unsubstituted C₁-C₆ alkyl, or R⁷ and R⁸ taken together with the nitrogen to which they are attached form a substituted or unsubstituted C₂-C₆ heterocyclyl; and
[0593] p is an integer selected from 1 to 10.

[0594] In some embodiments of Formula (Ia), if the structure carries more than one asymmetric Catom, each asymmetric C-atom independently represents racemic, chirally pure R and/or chirally pure S isomer, or a combination thereof.

[0595] In some embodiments, R¹ and R² in Formula (I) and Formula (Ia) is independently C₇-C₂₂ alkyl, C₇-C₂₂ alkenyl, —C₂-C₁₀ alkylene-L-R⁶, or

[chemical structure]

wherein each of the alkyl, alkylene, alkenyl, and cycloalkyl is independently substituted or unsubstituted. In some embodiments, R¹ and R² in Formula (I) and Formula (Ia) is independently C₁₀-C₂₀ alkyl, C₁₀-C₂₀ alkenyl. —C₈-C₇ alkylene-L-R⁶, or

[chemical structure]

wherein each of the alkyl, alkylene, alkenyl, and cycloalkyl is independently substituted or unsubstituted. In some embodiments, R¹ in Formula (I) and Formula (Ia) is

[chemical structure]

[0596] In some embodiments, each of L in Formula (I) and Formula (Ia) is independently O, S, —C₁-C₁₀ alkylene-O—, —C₁-C₁₀ alkylene-C(═O)O—, —C₁-C₁₀ alkylene-OC(═O)—, or a bond, wherein the alkylene is substituted or unsubstituted. In some embodiments, each of L in Formula (I) and Formula (Ia) is independently O, S, —C₁-C₃ alkylene-O—, —C₁-C₃ alkylene-C(═O)O—, —C₁-C₃ alkylene-OC(═O)—, or a bond, wherein the alkylene is substituted or unsubstituted. In some embodiments, each of L in Formula (I) and Formula (Ia) is independently O, S, —C₁-C₃ alkylene-O—, —C₁-C₃ alkylene-C(═O)O—, —C₁-C₃ alkylene-OC(═O)—, or a bond, wherein the alkylene is linear or branched unsubstituted alkylene.

[0597] In some embodiments, each of R⁶ in Formula (I) and Formula (Ia) is independently substituted or unsubstituted linear C₃-C₂₂ alkyl or substituted or unsubstituted linear C₃-C₂₂ alkenyl. In some embodiments, each of R⁶ in Formula (I) and Formula (Ia) is independently substituted or unsubstituted C₃-C₂₀ alkyl or substituted or unsubstituted C₃-C₂₀ alkenyl. In some embodiments, each of R⁶ in Formula (I) and Formula (Ia) is independently substituted or unsubstituted C₃-C₁₀ alkyl or substituted or unsubstituted C₃-C₁₀ alkenyl. In some embodiments, each of R⁶ in Formula (I) and Formula (Ia) is independently substituted or unsubstituted C₃-C₁₀ alkyl. In some embodiments, each of R⁶ in Formula (I) and Formula (Ia) is independently substituted or unsubstituted linear C₃-C₁₀ alkyl. In some embodiments, each of R⁶ in Formula (I) and Formula (Ia) is independently substituted or unsubstituted n-pentyl, n-hexyl, n-heptyl, n-octyl, n-nonyl, n-decyl, n-undecyl, or n-dodecyl. In some embodiments, each of R⁶ in Formula (I) and Formula (Ia) is independently substituted or unsubstituted n-octyl. In some embodiments, each of R⁶ in Formula (I) and Formula (Ia) is n-octyl.

[0598] In some embodiments, each of L in Formula (I) and Formula (Ia) is independently —C(═O)O—, —OC(═O)—, —C₁-C₁₀ alkylene-O—, or O. In some embodiments, each of. L in Formula (I) and Formula (Ia) is O. In some embodiments, each of L in Formula (I) and Formula (Ia) is —C₁-C₃ alkylene-O—. In some embodiments, p in Formula (I) and Formula (Ia) is 1, 2, 3, 4, or 5. In some embodiments, p in Formula (I) and Formula (Ia) is 2.

[0599] In some embodiments R¹ in Formula (I) and Formula (Ia) is

[chemical structure]

[chemical structure]

[0600] In some embodiments, each of R⁴ in Formula (I) and Formula (Ia) is independently H or substituted or unsubstituted C₁-C₄ alkyl. In some embodiments, each of. R⁴ in Formula (I) and Formula (Ia) is independently substituted or unsubstituted linear C₁-C₄ alkyl. In some embodiments, each of R⁴ in Formula (1) and Formula (Ia) is H. In some embodiments, each of R⁴ in Formula (I) and Formula (Ia) is independently H, —CH₃, —CH₂CH₃, —CH₂CH₂CH₃, or —CH(CH₃)₂. In some embodiments, each of R⁴ in Formula (I) and Formula (Ia) is independently H or —CH₃. In some embodiments, each of R⁴ in Formula (1) and Formula (Ia) is —CH₃.

[0601] In some embodiments, X in Formula (I) and Formula (Ia) is —C(═O)O— or —OC(═O))—. In some embodiments, X in Formula (I) and Formula (Ia) is —C(═O)NR⁴— or —NR⁴C(═O)—. In some embodiments, X in Formula (I) and Formula (Ia) is —C(═O)N(CH₃)—, —N(CH₃)C(═O)—, —C(═O)NH—, or —NHC(═O)—. In some embodiments, X in Formula (I) and Formula (Ia) is —C(═O))NH—, —C(═O)N(CH₃)—. —OC(═O))—, —NHC(═O)—, —N(CH₃)C(═O))—, —C(═O)O— —OC(═O)O—, —NHC(═O)O—, —N(CH₃)C(═O)O—, —OC(═O))NH—, —OC(═O)N(CH₃)—, —NHC(═O)NH—, —N(CH₃)C(═O))NH—, —NHC(═O)N(CH₃)—, —N(CH₃)C(═O)N(CH₃)—, NHC(═NH)NH—, —N(CH₃)C(═NH)NH—, —NHC(═NH)N(CH₃)—, — N(CH₃)C(═NH)N(CH₃)—, NHC(═NMe)NH—, —N(CH₃)C(═NMe)NH—, —NHC(═NMe)N(CH₃)—, or —N(CH₃)C(═NMe)N(CH₃)—.

[0602] In some embodiments. R² in Formula (I) and Formula (Ia) is C₇-C₂₂ alkyl, C₇-C₂₂ alkenyl, —C₂-C₁₀ alkylene-L-R⁶, or

[chemical structure]

wherein each of the alkyl, alkylene, alkenyl, and cycloalkyl is independently substituted or unsubstituted. In some embodiments, R² in Formula (I) and Formula (Ia) is substituted or unsubstituted C₇-C₂₂ alkyl or substituted or unsubstituted C₇-C₂₂ alkenyl. In some embodiments, R² in Formula (I) and Formula (Ia) is substituted or unsubstituted linear C₇-C₂₂ alkyl or substituted or unsubstituted linear C₇-C₂₂ alkenyl. In some embodiments, R² in Formula (I) and Formula (Ia) is substituted or unsubstituted C₁₀-C₂₀ alkyl or substituted or unsubstituted C₁₀-C₂₀ alkenyl. In some embodiments, R² in Formula (I) and Formula (Ia) is unsubstituted C₁₀-C₂₀ alkyl. In some embodiments, R² in Formula (I) and Formula (Ia) is unsubstituted C₁₀-C₂₀ alkenyl. In some embodiments, R² in Formula (I) and Formula (Ia) is —C₂-C₁₀ alkylene-L-R⁶. In some embodiments, R² in Formula (I) and Formula (Ia) is —C₂-C₁₀ alkylene-C(═O)O— R⁶ or —C₂-C₁₀ alkylene-OC(═O)— R⁶.

[0603] In some embodiments, R² in Formula (I) and Formula (Ia) is

[chemical structure]

[0604] In some embodiments, Y in Formula (I) and Formula (Ia) is —C(═O)O— or —OC(═O)—, In some embodiments, Y in Formula (I) and Formula (Ia) is —C(═O) NR⁴— or —NR⁴C(═O)—. In some embodiments, Y in Formula (I) and Formula (Ia) is —C(═O)N(CH₃)—, —N(CH₃) C(═O)—, —C(═O)NH—, or —NHC(═O)—. In some embodiments, Y in Formula (I) and Formula (Ia) is —OC(═O)O—, —NR⁴C(═O)O—, —OC(═O) NR⁴—, or —NR⁴C(═O) NR⁴—. In some embodiments. Y in Formula (I) and Formula (Ia) is —OC(═O)O—, —NHC(═O)O—, —OC(═O) NH—, —NHC(═O) NH—, —N(CH₃) C(═O)O—, —OC(═O)N(CH₃)—, —N(CH₃) C(═O)N(CH₃)— or —N(CH₃)C(═O) NH—. In some embodiments, Y in Formula (I) and Formula (Ia) is —OC(═O)O—, —NHC(═O)O—, —OC(═O)NH—, or —NHC(═O)NH—.

[0605] In some embodiments, R³ in Formula (I) and Formula (Ia) is —C₀-C₁₀ alkylene-NR⁷R⁸ or —C₀-C₁₀ alkylene-heterocycloalkyl, wherein the alkylene and heterocycloalkyl is independently substituted or unsubstituted. In some embodiments, R³ in Formula (I) and Formula (Ta) is —C₀-C₁₀ alkylene-NR⁷R⁸. Tn some embodiments, R³ in Formula (I) and Formula (Ia) is —C₁-C₆ alkylene-NR⁷R⁸. In some embodiments, R³ in Formula (I) and Formula (Ia) is —C₁-C₄ alkylene-NR⁷R⁸. In some embodiments, R³ in Formula (I) and Formula (Ia) is —C₁-alkylene-NR⁷R⁸. In some embodiments, R³ in Formula (I) and Formula (Ia) is —C₂-alkylene-NR⁷R⁸. Tn some embodiments, R³ in Formula (I) and Formula (Ia) is —C₃-alkylene-NR⁷R⁸. In some embodiments, R³ in Formula (I) and Formula (Ia) is —C₄-alkylene-NR⁷R⁸. In some embodiments, R³ in Formula (I) and Formula (Ia) is —C₅-alkylene-NR⁷R⁸. In some embodiments, R³ in Formula (I) and Formula (Ia) is —C₀-C₁₀ alkylene-heterocycloalkyl. In some embodiments, R³ in Formula (I) and Formula (Ia) is —C₁-C₆ alkylene-heterocycloalkyl, wherein the heterocycloalkyl comprises 1 to 3 nitrogen and 0-2 oxygen. In some embodiments, R³ in Formula (I) and Formula (Ia) is —C₁-C₆ alkylene-heterocycloaryl.

[0606] In some embodiments, each of R⁷ and R⁸ in Formula (I) and Formula (Ia) is independently hydrogen or substituted or unsubstituted C₁-C₆ alkyl. Tn some embodiments, each of R⁷ and R⁸ is independently hydrogen or substituted or unsubstituted C₁-C₃ alkyl. In some embodiments, each of R⁷ and R⁸ is independently substituted or unsubstituted C₁-C₃ alkyl. In some embodiments, each of R⁷ and R⁸ is independently —CH₃, —CH₂CH₃, —CH₂CH₂CH₃, or —CH(CH₃)₂. In some embodiments, each of R and R⁸ is CH₃. In some embodiments, each of R⁷ and R⁸ is —CH₂CH₃.

[0607] In some embodiments, R⁷ and R⁸ in Formula (I) and Formula (Ia) taken together with the nitrogen to which they are attached form a substituted or unsubstituted C2-C6 heterocyclyl. In some embodiments, R⁷ and R⁸ taken together with the nitrogen to which they are attached form a substituted or unsubstituted C₂-C₆ heterocycloalkyl. In some embodiments, R⁷ and R⁸ taken together with the nitrogen to which they are attached form a substituted or unsubstituted 3-7 membered heterocycloalkyl.

[0608] In some embodiments, R³ in Formula (I) and Formula (Ia) is

[chemical structure]

[0609] In some embodiments. R³ in Formula (I) and Formula (Ia) is

[chemical structure]

[0610] In some embodiments. R³ in Formula (1) and Formula (Ia) is

[chemical structure]

[0611] In some embodiments, Z in Formula (I) and Formula (Ia) is —C(═O)O— or —OC(═O)—. In some embodiments, Z in Formula (1) and Formula (Ia) is —C(═O)NR⁴— or —NR⁴C(═O)—. In some embodiments, Z in Formula (I) and Formula (Ia) is —C(═O)N(CH₃)—, —N(CH₃)C(═O)—, —C(═O)NH—, or —NHC(═O)—. In some embodiments, Z in Formula (I) and Formula (Ia) is —OC(═O)O—, —NR⁴C(═O)O—, —OC(O)NR⁴—, or —NR⁴C(═O)NR⁴—. In some embodiments. Z in Formula (I) and Formula (Ia) is —OC(═O)O—, —NHC(═O)O—, —OC(═O)NH—, —NHC(═O)NH—, —N(CH₃)C(═O)O—, —OC(═O)N(CH₃)—, — N(CH₃)C(═O)N(CH₃)—, —NHC(═O)N(CH₃)— or —N(CH₃)C(═O)NH—. In some embodiments, Y in Formula (I) and Formula (Ia) is —OC(═O)O—, —NHC(═O)O—, —OC(═O)NH—, or —NHC(═O)NH—.

[0612] In some embodiments, R⁵ in Formula (I) and Formula (Ia) is hydrogen or substituted or unsubstituted C₁-C₃ alkyl. In some embodiments, R⁵ in Formula (I) and Formula (a) is H, —CH₃, —CH—)CH₃, —CH₂CH₂CH₃, or —CH(CH₃)₂. In some embodiments, R⁵ in Formula (I) and Formula (Ia) is H.

[0613] In some embodiments, the LNP comprises a plurality of amino lipids. For example, the LNP composition can comprise 2, 3, 45, 6.7, 8, 9. 10, or more amino lipids. For another example, the LNP composition can comprise at least 2, at least 3, at least 4, at least 5, at least 6, at least 7, at least 9, at least 10, or at least 20 amino lipids. For yet another example, the LNP composition can comprise at most 2, at most 3, at most 4, at most 5, at most 6, at most 7, at most 9, at most 10, at most 20, or at most 30 amino lipids.

[0614] In some embodiments, the LNP composition comprises a first amino lipid. In some embodiments, the LNP composition comprises a first amino lipid and a second amino lipid. In some embodiments, the LNP composition comprises a first amino lipid, a second amino lipid, and a third amino lipid. In some embodiments, the LNP composition comprises a first amino lipid, a second amino lipid, a third amino lipid, and a fourth amino lipid. In some embodiments, the LNP composition does not comprise a fourth amino lipid. In some embodiments, the LNP composition does not comprise a third amino lipid. In some embodiments, a molar ratio of the first amino lipid to the second amino lipid is from about 0.1 to about 10. In some embodiments, a molar ratio of the first amino lipid to the second amino lipid is from about 0.20 to about 5. In some embodiments, a molar ratio of the first amino lipid to the second amino lipid is from about 0.25 to about 4. In some embodiments, a molar ratio of the first amino lipid to the second amino lipid is about 0.25, about 0.33, about 0.5, about 1, about 2, about 3, or about 4.

[0615] In some embodiments, a molar ratio of the first amino lipid:the second amino lipid:the third amino lipid is about 4:1:1. In some embodiments, a molar ratio of the first amino lipid:the second amino lipid:the third amino lipid is about 1:1:1. In some embodiments, a molar ratio of the first amino lipid:the second amino lipid:the third amino lipid is about 2:1:1. In some embodiments, a molar ratio of the first amino lipid:the second amino lipid: the third amino lipid is about 2:2:1. In some embodiments, a molar ratio of the first amino lipid:the second amino lipid:the third amino lipid is about 3:2:1. In some embodiments, a molar ratio of the first amino lipid:the second amino lipid:the third amino lipid is about 3:1:1. In some embodiments, a molar ratio of the first amino lipid:the second amino lipid:the third amino lipid is about 5:1:1. In some embodiments, a molar ratio of the first amino lipid:the second amino lipid:the third amino lipid is about 3:3:1. In some embodiments, a molar ratio of the first amino lipid:the second amino lipid:the third amino lipid is about 4:4:1.

[0616] In some embodiments, the LNP composition comprises one or more amino lipids. In some embodiments, the one or more amino lipids comprise from about 40 mol % to about 65 mol % of the total lipid present in the particle. In some embodiments, the one or more amino lipids comprise about 40 mol %, about 41 mol %, about 42 mol %, about 43 mol %, about 44 mol %, about 45 mol %, about 46 mol %, about 47 mol %, about 48 mol %, about 49 mol %, about 50 mol %, about 51 mol %, about 52 mol %, about 53 mol %, about 54 mol %, about 55 mol %, about 56 mol %, about 57 mol %, about 58 mol %, about 59 mol %, about 60 mol %, about 61 mol %, about 62 mol %, about 63 mol %, about 64 mol %, or about 65 mol % of the total lipid present in the particle. In some embodiments, the first amino lipid comprises from about 1 mol % to about 99 mol % of the total amino lipids present in the particle. In some embodiments, the first amino lipid comprises from about 16.7 mol % to about 66.7 mol % of the total amino lipids present in the particle. In some embodiments, the first amino lipid comprises from about 20 mol % to about 60 mol % of the total amino lipids present in the particle.

[0617] In some embodiments, the amino lipid is an ionizable lipid. An ionizable lipid can comprise one or more ionizable nitrogen atoms. In some embodiments, at least one of the one or more ionizable nitrogen atoms is positively charged. Tn some embodiments, at least 10 mol %, 20 mol %, 30 mol %, 40 mol %, 50 mol %, 60 mol %, 70 mol %, 80 mol %. 90 mol %, 95 mol %, or 99 mol % of the ionizable nitrogen atoms in the LNP composition are positively charged. In some embodiments, the amino lipid comprises a primary amine, a secondary amine, a tertiary amine, an imine, an amide, a guanidine moiety, a histidine residue, a lysine residue, an arginine residue, or any combination thereof. In some embodiments, the amino lipid comprises a primary amine, a secondary amine, a tertiary amine, a guanidine moiety, or any combination thereof. In some embodiments, the amino lipid comprises a tertiary amine.

[0618] In some embodiments, the amino lipid is a cationic lipid. Tn some embodiments, the amino lipid is an ionizable lipid. In some embodiments, the amino lipid comprises one or more nitrogen atoms. In some embodiments, the amino lipid comprises one or more ionizable nitrogen atoms. Exemplary cationic and/or ionizable lipids include, but are not limited to, 3-(didodecylamino)-N1,N1,4-tri dodecyl-1-piperazineethan amine (KL10), N142-(didodecylamino)ethyl]-N1,N4,N4-tridodecyl-1,4-piperazinediethanamine (KL22), 14,25-ditridecyl-15,18,21,24-tetraaza-octatriacontane (KL25), 1,2-dilinoleyloxy-N,N-dimethylaminopropane (DLin-DMA), 2,2-dilinoleyl-4-dimethylaminomethyl-[1,3]-dioxolane (DLin-K-DMA), heptatriaconta-6,9,28,31-tetraen-19-yl 4-(dimethylamino)butanoate (DLin-MC 3-DMA), 2,2-dilinoleyl-4-(2-dimethylaminoethyl)-[1,3]-dioxolane (DLin-KC2-DMA), 1,2-dioleyloxy-N,N-dimethylaminopropane (DODMA), 2-({8-[(3β)-cholest-5-en-3-yloxy]octyl}oxy)-N,N-dimethyl-3-[(9Z,12Z)-octadeca-9,12-dien-1-yloxy]propan-1-amine (Octyl-CLinDMA), (2R)-2-({8-[(3β)-cholest-5-en-3-yloxy]octyl}oxy)-N,N-dimethyl-3-[(9Z,12Z)-octadeca-9,12-dien-1-yloxy]propan-1-amine (Octyl-CLinDMA (2R)), and (2S)-2-({8-[(33)-cholest-5-en-3-yloxy]octyl}oxy)-N,N-dimethyl-3-[(9Z,12Z)-octadeca-9,12-dien-1-yloxy]propan-1-amine (Octyl-CLinDMA (2S)).

[0619] In some embodiments, an amino lipid described herein can take the form of a salt, such as a pharmaceutically acceptable salt. All pharmaceutically acceptable salts of the amino lipid are encompassed by this disclosure. As used herein, amino lipid also includes its pharmaceutically acceptable salts, and its diastereomeric, enantiomeric, and epimeric forms.

[0620] In some embodiments, an amino lipid described herein, possesses one or more stereocenters and each stereocenter exists independently in either the R or S configuration. The lipids presented herein include all diastereomeric, enantiomeric, and epimeric forms as well as the appropriate mixtures thereof. The lipids provided herein include all cis. trans, syn, anti, entgegen (E), and zusammen (Z) isomers as well as the appropriate mixtures thereof. Tn certain embodiments, lipids described herein are prepared as their individual stereoisomers by reacting a racemic mixture of the compound with an optically active resolving agent to form a pair of diastereoisomeric compounds/salts, separating the diastereomers and recovering the optically pure enantiomers. In some embodiments, resolution of enantiomers is carried out using covalent diastereomeric derivatives of the compounds described herein. In another embodiment, diastereomers are separated by separation/resolution techniques based upon differences in solubility. In other embodiments, separation of stereoisomers is performed by chromatography or by the forming diastereomeric salts and separation by recrystallization, or chromatography, or any combination thereof. Jean Jacques, Andre Collet, Samuel H. Wilen, “Enantiomers, Racemates and Resolutions”, John Wiley and Sons, Inc., 1981. In one aspect, stereoisomers are obtained by stereoselective synthesis.

[0621] In some embodiments, the lipids such as the amino lipids are substituted based on the structures disclosed herein. In some embodiments, the lipids such as the amino lipids are unsubstituted. In another embodiment, the lipids described herein are labeled isotopically (e.g. with a radioisotope) or by another other means, including, but not limited to, the use of chromophores or fluorescent moieties, bioluminescent labels, or chemiluminescent labels.

[0622] Lipids described herein include isotopically-labeled compounds, which are identical to those recited in the various formulae and structures presented herein, but for the fact that one or more atoms are replaced by an atom having an atomic mass or mass number different from the atomic mass or mass number usually found in nature. Examples of isotopes that can be incorporated into the present lipids include isotopes of hydrogen, carbon, nitrogen, oxygen, sulfur, fluorine and chlorine, such as, for example, ²H, ³H, ¹³C, ¹⁴C, ¹⁵N, ¹⁸O, ¹⁷O, ³⁵S ¹⁸F, ³⁶Cl. In one aspect, isotopically-labeled lipids described herein, for example those into which radioactive isotopes such as ³H and ¹⁴C are incorporated, are useful in drug and/or substrate tissue distribution assays. In one aspect, substitution with isotopes such as deuterium affords certain therapeutic advantages resulting from greater metabolic stability, such as, for example, increased in vivo half-life or reduced dosage requirements.

[0623] In some embodiments, the asymmetric carbon atom of the amino lipid is present in enantiomerically enriched form. In certain embodiments, the asymmetric carbon atom of the amino lipid has at least 50% enantiomeric excess, at least 60% enantiomeric excess, at least 70% enantiomeric excess, at least 80% enantiomeric excess, at least 90% enantiomeric excess, at least 95% enantiomeric excess, or at least 99% enantiomeric excess in the (S)- or (R)-configuration.

[0624] In some embodiments, the disclosed amino lipids can be converted to N-oxides. In some embodiments, N-oxides are formed by a treatment with an oxidizing agent (e.g., 3-chloroperoxybenzoic acid and/or hydrogen peroxides). Accordingly, disclosed herein are N-oxide compounds of the described amino lipids, when allowed by valency and structure, which can be designated as N O or N⁺—O⁻. In some embodiments, the nitrogen in the compounds of the disclosure can be converted to N-hydroxy or N-alkoxy. For example, N-hydroxy compounds can be prepared by oxidation of the parent amine by an oxidizing agent such as ra-CPBA. All shown and claimed nitrogen containing compounds are also considered. Accordingly, also disclosed herein are N-hydroxy and Nal koxy (e.g., N—OR, wherein R is substituted or unsubstituted C₁-C₆ alkyl, C₁-C₆ alkenyl, C₁-C₆ alkynyl, 3-14-membered carbocycle or 3-14-membered heterocycle) derivatives of the described amino lipids.

### PEG-Lipid

[0625] As used herein, a “PEG lipid” or “PEG-lipid” refers to a lipid comprising a polyethylene glycol component.

[0626] In some embodiments, the described LNP composition comprises a PEG-lipid. In some embodiments, the described LNP composition comprises two or more PEG-lipids. Exemplary PEG-lipids include, but are not limited to, the lipids. Exemplary PEG-lipids also include, but are not limited to, PEG-modified phosphatidylethanolamines, PEG-modified phosphatidic acids, PEG-modified ceramides, PEG-modified dialkylamines, PEG-modified diacylglycerols, PEG-modified dialkylglycerols, and mixtures thereof. For example, the one or more PEG-lipids can comprise PEG-c-DOMG, PEG-DMG, PEG-DLPE, PEG-DMPE, PEG-DPPC, a PEG-DSPE lipid, or a combination thereof. In some embodiments, PEG moiety is an optionally substituted linear or branched polymer of ethylene glycol or ethylene oxide. In some embodiments, the PEG moiety is substituted, e.g., by one or more alkyl, alkoxy, acyl, hydroxy, or aryl groups. In some embodiments, the PEG moiety includes PEG copolymer such as PEG-polyurethane or PEG-polypropylene (see, e.g., j. Milton Harris, Poly(ethylene glycol) chemistry: biotechnical and biomedical applications (1992)). In some embodiments, the PEG moiety does not include PEG copolymers, e.g., it may be a PEG monopolymer. Exemplary PEG-lipids include, but are not limited to, PEG-dilauroylglycerol, PEG-dimyristoylglycerol (PEG-DMG), PEG-dipalmitoylglycerol, PEG-distearoylgiycerol (PEG-DSPE), PEG-dipalmitoylglycerol, PEG-disteiylglycerol, PEG-dilawylglycamide, PEG-dimyristylglycamide, PEG-dipalmitoylglycamide, PEG-disterylglycamide, PEG-cholesterol, and PEG-DMB (3,4-Ditetradecoxylbenzyl-[omega]-methyl-poly(ethylene glycol) ether), 1,2-dimyristoyl-sn-glycero-3-phosphoethanolamine-N-[methoxy(polyethylene glycol)-2000]).

[0627] In some embodiments, a PEG-lipid is a PEG-lipid conjugate, for example, PEG coupled to dialkyloxypropyls (e.g., PEG-DAA conjugates), PEG coupled to diacylglycerols (e.g., PEG-DAG conjugates), PEG coupled to cholesterol, PEG coupled to phosphatidylethanolamines, and PEG conjugated to ceramides (see, e.g., U.S. Pat. No. 5,885,613), cationic PEG lipids, polyoxazoline (POZ)-lipid conjugates (e.g. POZ-DAA conjugates; see, e.g., WO 2010/006282), polyamide oligomers (e.g., ATTA-lipid conjugates), and mixtures thereof.

[0628] A PEG-lipid can comprise one or more ethylene glycol units, for example, at least 1, at least 2, at least 5, at least 10, at least 20, at least 30, at least 40, at least 50, at least 60, at least 70, at least 80, at least 90, at least 100, at least 120, or at least 150 ethylene glycol units. In some embodiments, a number average molecular weight of the PEG-lipids is from about 200 Da to about 5000 Da. In some embodiments, a number average molecular weight of the PEG-lipids is from about 500 Da to about 3000 Da. In some embodiments, a number average molecular weight of the PEG-lipids is from about 750 Da to about 2500 Da. In some embodiments, a number average molecular weight of the PEG-lipids is from about 750 Da to about 2500 Da. In some embodiments, a number average molecular weight of the PEG-lipids is about 500 Da, about 750 Da, about 1000 Da, about 1250 Da, about 1500 Da, about 1750 Da, or about 2000 Da. In some embodiments, a polydispersity index (PD1) of the one or more PEG-lipids is smaller than 2. In some embodiments, a PDI of the one or more PEG-lipids is at most 1.1, 1.2, 1.3, 1.4, 1.5, 1.6, 1.7, 1.8, 1.9, 2.0, 2.1, 2.2, 2.3. 2.4, 2.5, 2.6, 2.7, 2.8, 2.9, or 3.0. In some embodiments, a PDI of the one or more PEG-lipids is at least 1.1, 1.2, 1.3, 1.4, 1.5, 1.6, 1.7, 1.8, 1.9, 2.0, 2.1, 2.2, 2.3, 2.4, 2.5, 2.6, 2.7, 2.8, 2.9, or 3.0.

[0629] In some embodiments, the PEG-lipid comprises from about 0.1 mol % to about 10 mol % of the total lipid present in the particle. In some embodiments, the PEG-lipid comprises from about 0.1 mol % to about 6 mol % of the total lipid present in the particle. In some embodiments, the PEG-lipid comprises from about 0.5 mol % to about 5 mol % of the total lipid present in the particle. In some embodiments, the PEG-lipid comprises from about 1 mol % to about 3 mol % of the total lipid present in the particle. In some embodiments, the PEG-lipid comprises about 2.0 mol % to about 2.5 mol % of the total lipid present in the particle. In some embodiments, the PEG-lipid comprises about 1 mol %, about 1.1 mol %, about 1.2 mol %, about 1.3 mol %, about 1.4 mol %, about 1.5 mol %, about 1.6 mol %, about 1.7 mol %, about 1.8 mol %, about 1.9 mol %, about 2.0 mol %, about 2.1 mol %, about 2.2 mol %, about 2.3 mol %, about 2.4 mol %, about 2.5 mol %, about 2.6 mol %, about 2.7 mol %, about 2.8 mol %, about 2.9 mol %, or about 3.0 mol % of the total lipid present in the particle.

[0630] In some embodiments, the LNP composition comprises a plurality of PEG-lipids, for example, at least 2, 3, 4, 5, 6, 7, 8, 9, 10, or more distinct PEG-lipids.

### Phospholipid

[0631] As used herein, a “phospholipid” refers to a lipid that includes a phosphate moiety and one or more carbon chains, such as unsaturated fatty acid chains. A phospholipid may include one or more multiple (e.g., double or triple) bonds. In some embodiments, a phospholipid may facilitate fusion to a membrane. For example, a cationic phospholipid may interact with one or more negatively charged phospholipids of a membrane (e.g., a cellular or intracellular membrane). Fusion of a phospholipid to a membrane may allow one or more elements of an LNP to pass through the membrane, i.e., delivery of the one or more elements to a cell.

[0632] In some embodiments, the described LNP composition comprises a phospholipid. In some embodiments, the phospholipid comprises a lipid selected from the group consisting of: phosphatidylcholine (PC), phosphatidylethanolamine amine, glycerophospholipid, sphingophospholipids, Guriserohosuhono, sphingolipids phosphono lipids, natural lecithins, and hydrogenated phospholipid. In some embodiments, the phospholipid comprises a phosphatidylcholine. Exemplary phosphatidylcholines include, but are not limited to, soybean phosphatidylcholine, egg yolk phosphatidylcholine (EPC), distearoylphosphatidylcholine, 1,2-distearoyl-sn-glycero-3-phosphocholine (DSPC), dipalmitoyl phosphatidylcholine, dipalmitoyl-sn-glycero-3-phosphocholine (DPPC), 2-Oleoyl-1-palmitoyl-sn-glycero-3-phosphocholine (POPC), dimyristoyl phosphatidylcholine (DMPC), and dioleoyl phosphatidylcholine (DOPC). In certain specific embodiments, the phospholipid is DSPC.

[0633] In some embodiments, the phospholipid comprises a phosphatidylethanolamine amine. In some embodiments, the phosphatidylethanolamine amine is distearoyl phosphatidylethanolamine (DSPE), dipalmitoyl phosphatidyl ethanolamine (DPPE), 1,2-dioleoyl-sn-glycero-3-phosphoethanolamine (DOPE), dimyristoyl phosphoethanolamine (DMPE), 16-0-Monome Le PE, 16-0-dimethyl PE, 18-1-trans PE, palmitoyl oleoyl-phosphatidylethanolamine (POPE), or 1-stearoy1-2-oleoyl-phosphatidyl ethanolamine (SOPE). In some embodiments, the phospholipid comprises a glycerophospholipid. In some embodiments, the glycerophospholipid is plasmalogen, phosphatidate, or phosphatidylcholine. In some embodiments, the glycerophospholipid is phosphatidylserine, phosphatidic acid, phosphatidylglycerol, phosphatidylinositol, palmitoyl oleoyl phosphatidylglycerol (POPG), or lysophosphatidylcholine. In some embodiments, the phospholipid comprises a sphingophospholipid. In some embodiments, the sphingophospholipid is sphingomyelin, ceramide phosphoethanolamine, ceramide phosphoglycerol, or ceramide phosphoglycerophosphoric acid. In some embodiments, the phospholipid comprises a natural lecithin. In some embodiments, the natural lecithin is egg yolk lecithin or soybean lecithin. Tn some embodiments, the phospholipid comprises a hydrogenated phospholipid. In some embodiments, the hydrogenated phospholipid is hydrogenated soybean phosphatidylcholine. In some embodiments, the phospholipid is selected from the group consisting of: phosphatidylcholine, phosphatidylethanolamine, phosphatidylserine, phosphatidylinositol, phosphatidic acid, palmitoyloleoyl phosphatidylcholine, lysophosphatidylcholine, lysophosphatidylethanolamine, dipalmitoylphosphatidylcholine, dioleoylphosphatidylcholine, distearoylphosphatidylcholine, and dilinoleoylphosphatidylcholine.

[0634] In some embodiments, the phospholipid comprises a lipid selected from: 1,2-distearoyl-sn-glycero-3-phosphocholine (DSPC). 1,2-dioleoyl-sn-glycero-3-phosphoethanolamine (DOPE), 1,2-dilinoleoyl-sn-glycero-3-phosphocholine (DLPC), 1,2-dimyristoyl-sn-glycero-phosphocholine (DMPC), 1,2-dioleoyl-sn-glycero-3-phosphocholine (DOPC), 1,2-dipalmitoyl-sn-glycero-3-phosphocholine (DPPC), 1,2-diundecanoyl-sn-glycero-phosphocholine (DUPC), 2-Oleoyl-1-pahnitoyl-sn-glycero-3-phosphocholine (POPC), 1,2-di-O-octadecenyl-sn-glycero-3-phosphocholine (18:0 Diether PC), 1-oleoyl-2-cholesterylhemisuccinoyl-sn-glycero-3-phosphocholine (OChemsPC), 1-hexadecyl-sn-glycero-3-phosphocholine (C16 Lyso PC), 1,2-dilinolenoyl-sn-glycero-3-phosphocholine, 1,2-di arachidonoyl-sn-glycero-3-phosphocholine, 1,2-di docosahexaenoyl-sn-glycero-3-phosphocholine, 1,2-diphytanoyl-sn-glycero-3-phosphoethanolamine (ME 16.0 PE), 1,2-distearoyl-sn-glycero-3-phosphoethanolamine, 1,2-dilinoleoyl-sn-glycero-3-phosphoethanolamine, 1,2-dilinolenoyl-sn-glycero-3-phosphoethanolamine, 1,2-diaracliidonoyl-sn-gly cero-3-phosphoethanol amine, 1,2-di docosahexaenoyl-sn-glycero-3-phosphoethanolamine, 1,2-diol eoy I-sn-glycero-3-phospho-rac-(1-glycerol) sodium salt (DOPG), and sphingomyelin.

[0635] A phospholipid can comprise a phospholipid moiety and one or more fatty acid moieties. A phospholipid moiety can comprise phosphatidyl choline, phosphatidyl ethanolamine, phosphatidyl glycerol, phosphatidyl serine, phosphatidic acid, 2-lysophosphatidyl choline, or a sphingomyelin. A fatty acid moiety can comprise lauric acid, myristic acid, myristoleic acid, palmitic acid, palmitoleic acid, stearic acid, oleic acid, linoleic acid, alpha-linolenic acid, erucic acid, phytanoic acid, arachidic acid, arachidonic acid, eicosapentaenoic acid, behenic acid, docosapentaenoic acid, or docosahexaenoic acid. In some specific embodiments, a phospholipid can be functionalized with or cross-linked to one or more alkynes, which may undergo a copper-catalyzed cycloaddition upon exposure to an azide.

[0636] In some embodiments, the LNP composition comprises a plurality of phospholipids, for example, at least 2, 3, 4, 5, or more distinct phospholipids. In some embodiments, the phospholipid comprises from 1 mol % to 20 mol % of the total lipid present in the particle. In some embodiments, the phospholipid comprises from about 5 mol % to about 15 mol % of the total lipid present in the particle. In some embodiments, the phospholipid comprises from about 8 mol % to about 12 mol % of the total lipid present in the particle. In some embodiments, the phospholipid comprises from about 9 mol %, 10 mol %, or 11 mol % of the total lipid present in the particle.

### Cholesterol

[0637] In some embodiments, the LNP composition comprises a cholesterol or a derivative thereof. In some embodiments, the LNP composition comprises a structural lipid. The structural lipid can be selected from steroid, sterol, alkyl resoreinol, cholesterol or derivative thereof, fecosterol, sitosterol, ergosterol, campesterol, stigmasterol, brassicasterol, tomatidine, tomatine, ursolic acid, alphatocopherol, and a combination thereof. In some embodiments, the structural lipid is a corticosteroid such as prednisolone, dexamethasone, prednisone, and hydrocortisone. In some embodiments, the cholesterol or derivative thereof is cholesterol, 5-heptadecylresorcinol, or cholesterol hemisuccinate. Tn some embodiments, the cholesterol or derivative thereof is cholesterol.

[0638] In some embodiments, the cholesterol or derivative thereof is a cholesterol derivative. In some embodiments, the cholesterol derivative is a polar cholesterol analogue. In some embodiments, the polar cholesterol analogue is 5a-cholestanol, 513-coprostanol, cholesteryl-(2′-hydroxy)-ethyl ether, cholestelyl-(4′-hydroxy)-butyl ether, or 6-ketocholestanol. In some embodiments, the polar cholesterol analogue is cholesteryl-(4′-hydroxy)-butyl ether. In some embodiments, the cholesterol derivative is a non-polar cholesterol analogue. In some embodiments, the non-polar cholesterol analogue is 5acholestane, cholestenone, 5α-cholestanone, 5β-cholestanone, or cholestetyl decanoate.

[0639] In some embodiments, the cholesterol or the derivative thereof comprises from 20 mol % to 50 mol % of the total lipid present in the particle. In some embodiments, the cholesterol or the derivative thereof comprises about 20 mol %, about 21 mol %, about 22 mol %, about 23 mol %, about 24 mol %, about 25 mol %, about 26 mol %, about 27 mol %, about 28 mol %, about 29 mol %, about 30 mol %, about 31 mol %, about 32 mol %, about 33 mol %, about 34 mol %, about 35 mol %, about 36 mol %, about 37 mol %, about 38 mol %, about 39 mol %, about 40 mol %, about 41 mol %, about 42 mol %, about 43 mol %, about 44 mol %. about 45 mol %. about 46 mol %, about 47 mol %, about 48 mol %, or about 50 mol % of the total lipid present in the particle.

### Phosphate Charge Neutralizer

[0640] In some embodiments, the LNP described herein comprises a phosphate charge neutralizer. In some embodiments, the phosphate charge neutralizer comprises arginine, asparagine, glutamine, lysine, histidine, cationic dendrimers, polyamines, or a combination thereof. In some embodiments, the phosphate charge neutralizer comprises one or more nitrogen atoms. In some embodiments, the phosphate charge neutralizer comprises a polyamine. In some embodiments, the polyamine is 1,3-propanediamine, spermine, spermidine, Norspermidine, Tris(2-aminoethyDamine, Cyclen, 1,4,7-Triazacyclononane, 1,1,1-Tris(aminomethyl)ethane, Diethylenetriamine, Triethylenetetramine, or a combination thereof. In some embodiments, the polyamine is 1,3-propanediamine, 1,4-butanediamine, spermine, spermidine, or a combination thereof. In some embodiments, the N/P ratio for the phosphate charge neutralizer is from 0.01 to 10. In some embodiments, the N/P ratio for the phosphate charge neutralizer is from about 0.05 to about 2. In some embodiments, the N/P ratio for the phosphate charge neutralizer is from about 0.1 to about 1. In some embodiments, the N/P ratio for the phosphate charge neutralizer is about 0.1, about 0.2, about 0.3, about 0.4, about 0.5, about 0.6, about 0.7, about 0.8, about 0.9, or about 1. In some embodiments, the NIP ratio for the phosphate charge neutralizer is about 0.25, 0.5, or 0.75.

### Antioxidants

[0641] In some embodiments, the LNP described herein comprises one or more antioxidants. In some embodiments, the one or more antioxidants function to reduce a degradation of the cationic lipids, the payload, or both. In some embodiments, the one or more antioxidants comprise a hydrophilic antioxidant. In some embodiments, the one or more antioxidants is a chelating agent such as ethylenediaminetetraacefic acid (EDTA) and citrate. In some embodiments, the one or more antioxidants is EDTA. In some embodiments, the one or more antioxidants comprise a lipophilic antioxidant. In some embodiments, the lipophilic antioxidant comprises a vitamin E isomer or a polyphenol. In some embodiments, the one or more antioxidants are present in the LNP composition at a concentration of at least 1 mM, at least 10 mM, at least 20 mM, at least 50 mM, or at least 100 mM. In some embodiments, the one or more antioxidants are present in the particle at a concentration of about 20 mM.

### Payload

[0642] The LNPs described herein can be designed to deliver a payload, such as a therapeutic agent, or a target of interest. In some embodiments, an LNP described herein encloses one or more components of a base editor system as described herein. For example, a LNP may enclose one or more of a guide RNA, a nucleic acid encoding the guide RNA, a vector encoding the guide RNA, a base editor fusion protein, a nucleic acid encoding the base editor fusion protein, a programmable DNA binding domain, a nucleic acid encoding the programmable DNA binding domain, a deaminase, a nucleic acid encoding the deaminase, or all or any combination thereof. In some embodiments, the nucleic acid is a DNA. In some embodiments, the nucleic acid is a RNA, for example, a mRNA.

[0643] Additional exemplary therapeutic agents include, but are not limited to, antibodies (e.g., monoclonal, chimeric, humanized, nanobodies, and fragments thereof etc.), cholesterol, hormones, peptides, proteins, chemotherapeutics and other types of antineoplastic agents, low molecular weight drugs, vitamins, co-factors, nucleosides, nucleotides, oligonucleotides, enzymatic nucleic acids, antisense nucleic acids, triplex forming oligonucleotides, antisense DNA or RNA compositions, chimeric DNA:RNA compositions, allozymes, aptamers, ribozyme, decoys and analogs thereof, plasmids and other types of expression vectors, and small nucleic acid molecules, RNAi agents, short interfering nucleic acid (siNA), messenger ribonucleic acid (messenger RNA, mRNA), short interfering RNA (siRNA), double-stranded RNA (dsRNA), micro-RNA (miRNA), and short hairpin RNA (shRNA) molecules, peptide nucleic acid (PNA), a locked nucleic acid ribonucleotide (LNA), morpholino nucleotide, threose nucleic acid (TNA), glycol nucleic acid (GNA), sisiRNA (small internally segmented interfering RNA), aiRNA (asymmetrical interfering RNA), and siRNA with 1, 2 or more mismatches between the sense and anti-sense strand to relevant cells and/or tissues, such as in a cell culture, subject or organism. Therapeutic agents can be purified or partially purified, and can be naturally occurring or synthetic, or chemically modified. In some embodiments, the therapeutic agent is an RNAi agent, short interfering nucleic acid (siNA), short interfering RNA (siRNA), double-stranded RNA (dsRNA), micro-RNA (miRNA), or a short hairpin RNA (shRNA) molecule. In some embodiments, the therapeutic agent is an mRNA.

[0644] In some embodiments, the payload comprises one or more nucleic acid(s) (i.e., one or more nucleic acid molecular entities). In some embodiments, the nucleic acid is a single-stranded nucleic acid. In some embodiments, single-stranded nucleic acid is a DNA. In some embodiments, single-stranded nucleic acid is an RNA. In some embodiments, the nucleic acid is a double-stranded nucleic acid. In some embodiments, the double-stranded nucleic acid is a DNA. In some embodiments, the double-stranded nucleic acid is an RNA. In some embodiments, the double-stranded nucleic acid is a DNA-RNA hybrid. In some embodiments, the nucleic acid is a messenger RNA (mRNA), a microRNA, an asymmetrical interfering RNA (aiRNA), a small hairpin RNA (shRNA), or a Dicer-Substrate dsRNA.

### Other Lipids

[0645] In some embodiments, the disclosed LNP compositions comprise a helper lipid. In some embodiments, the disclosed LNP compositions comprise a neutral lipid. In some embodiments, the disclosed LNP compositions comprise a stealth lipid. In some embodiments, the disclosed LNP compositions comprises additional lipids.

[0646] As used herein, neutral lipids suitable for use in a lipid composition of the disclosure include, for example, a variety of neutral, uncharged or zwitterionic lipids. Examples of neutral phospholipids suitable for use in the present disclosure include, but are not limited to, 5-heptadecylbenzene-1,3-diol (resorcinol), 1,2-dipalmitoyl-sn-glycero-3-phosphocholine (DPPC), 1,2-distearoyl-sn-glycero-3-phosphocholine (DSPC), phosphocholine (DOPC), 1,2-dimyristoyl-sn-glycero-phosphocholine (DMPC), phosphatidylcholine (PLPC), 1,2-distearoyl-sn-glycero-3-phosphocholine (DAPC), phosphatidylethanolamine (PE), egg phosphatidylcholine (EPC), dilauryloylphosphatidylcholine (DLPC), 1-myristoyl-2-palmitoyl phosphatidylcholine (MPPC), 1-palmitoyl-2-myristoyl phosphatidylcholine (PMPC), 1-palmitoyl-2-stearoy1 phosphatidylcholine (PSPC), 1,2-diarachidoylsn-glycero-3-phosphocholine (DBPC), 1-stearoy1-2-palmitoyl phosphatidylcholine (SPPC), 1,2-dieicosenoyl-sn-glycero-3-phosphocholine (DEPC), 2-Oleoyl-1-palmitoyl-sn-glycero-3-phosphocholine (POPC), lysophosphatidyl choline, 1,2-dioleoyl-sn-glycero-3-phosphoethanolamine (DOPE), dilinoleoylphosphatidylcholine distearoylphosphatidylethanolamine (DSPE), dimyristoyl phosphatidylethanolamine (DMPE), dipalmitoyl phosphatidylethanolamine (DPPE), palmitoyloleoyl phosphatidylethanolamine (POPE), lysophosphatidylethanolamine and combinations thereof. In some embodiments, the neutral phospholipid is selected from the group consisting of DSPC and dimyristoyl phosphatidyl ethanolamine (DMPE). In some embodiments, the neutral phospholipid is DSPC. Neutral lipids can function to stabilize and improve processing of the LNPs.

[0647] Helper lipids can refer to lipids that enhance transfection (e.g. transfection of the nanoparticle (LNP) comprising the composition as provided herein, including the biologically active agent). The mechanism by which the helper lipid enhances transfection includes enhancing particle stability. In some embodiments, the helper lipid enhances membrane fusogenicity. Helper lipids can include steroids, sterols, and alkyl resorcinols. Helper lipids suitable for use in the present disclosure can include, but are not limited to, cholesterol, 5-heptadecylresorcinol, and cholesterol hemisuccinate. In some embodiments, the helper lipid is cholesterol. In some embodiments, the helper lipid is be cholesterol hemisuccinate.

[0648] Stealth lipids can refer to lipids that alter the length of time the nanoparticles can exist in vivo (e.g., in the blood). Stealth lipids can assist in the formulation process by, for example, reducing particle aggregation and controlling particle size. Stealth lipids used herein may modulate pharmacokinetic properties of the LNP. Stealth lipids suitable for use in a lipid composition of the disclosure can include, but are not limited to, stealth lipids having a hydrophilic head group linked to a lipid moiety. Stealth lipids suitable for use in a lipid composition of the present disclosure and information about the biochemistry of such lipids can be found in Romberg et al, Pharmaceutical Research, Vol. 25, No. 1, 2008, pg. 55-71 and I-Toekstra et al, Biochimica et Biophysica Acta 1660 (2004) 41-52. Additional suitable PEG lipids are disclosed, e.g., in WO 2006/007712.

[0649] In some embodiments, the stealth lipid is a PEG-lipid. In one embodiment, the hydrophilic head group of stealth lipid comprises a polymer moiety selected from polymers based on PEG (sometimes referred to as poly(ethylene oxide)), poly(oxazoline), poly(vinyl alcohol), poly(glycerol), poly(N-vinylpyrrolidone), polyaminoacids and poly N-(2-hydroxypropyl)methacrylamide]. Stealth lipids can comprise a lipid moiety. In some embodiments, the lipid moiety of the stealth lipid may be derived from diacylglycerol or diacylglycamide, including those comprising a dialkylglycerol or dialkylglycamide group having alkyl chain length independently comprising from about C4 to about C40 saturated or unsaturated carbon atoms, wherein the chain may comprise one or more functional groups such as, for example, an amide or ester. The dialkylglycerol or dialkylglycamide group can further comprise one or more substituted alkyl groups.

[0650] The structures and properties of helper lipids, neutral lipids, stealth lipids, and/or other lipids are further described in WO2017173054A1, WO2019067999A1, US20180290965A1, US20180147298A1, US20160375134A1, U.S. Pat. Nos. 8,236,770, 8,021,686, 8,236,770B2, U.S. Pat. No. 7,371,404B2, U.S. Pat. No. 7,780,983B2, U.S. Pat. No. 7,858,117B2, US20180200186A1, US20070087045A1, WO2018119514A1, and WO2019067992A1, all of which are hereby incorporated by reference in their entirety.

### LNP Formulations

[0651] The LNPs described herein can be designed for one or more specific applications or targets. The elements of a nanoparticle (LNP) composition or a composition can be selected based on a particular application or target, and/or based on the efficacy, toxicity, expense, ease of use, and availability. Similarly, the particular formulation of a nanoparticle composition is a composition comprising one or more described lipids. may be selected for the particular application or target. Suitable phosphate charge neutralizers to be used in formulations include, but are not limited to, Spermidine and 1,3-propanediamine.

[0652] The described LNP formulations can be designed for one or more specific applications or targets. For example, a nanoparticle composition may be designed to deliver a therapeutic agent such as an RNA to a particular cell, tissue, organ, or system or group thereof in a mammal's body. Physiochemical properties of nanoparticle compositions may be altered in order to increase selectivity for particular bodily targets. For instance, particle sizes may be adjusted based on the fenestration sizes of different organs. The therapeutic agent included in a nanoparticle composition may also be selected based on the desired delivery target or targets. For example, a therapeutic agent may be selected for a particular indication, condition, disease, or disorder and/or for delivery to a particular cell, tissue, organ, or system or group thereof (e.g., localized or specific delivery). In certain embodiments, a nanoparticle composition may include an mRNA encoding a polypeptide of interest capable of being translated within a cell to produce the polypeptide of interest. Such a composition may be designed to be specifically delivered to a particular organ.

[0653] The amount of a therapeutic agent in an LNP composition may depend on the size, composition, desired target and/or application, or other properties of the nanoparticle composition. For example, the amount of an RNA comprised in a nanoparticle composition may depend on the size, sequence, and other characteristics of the RNA. The relative amounts of a therapeutic agent and other elements (e.g., lipids) in a nanoparticle composition may also vary. In some embodiments, the wt/wt ratio of the lipid component to a therapeutic agent in a nanoparticle composition may be from about 5:1 to about 60:1, such as about 5:1. 6:1, 7:1, 8:1, 9:1, 10:1, 11:1, 12:1, 13:1, 14:1, 15:1, 16:1, 17:1, 18:1, 19:1, 20:1, 25:1, 30:1, 35:1, 40:1, 45:1, 50:1, and 60:1. For example, the wt/wt ratio of the lipid component to a therapeutic agent may be from about 10:1 to about 40:1. In certain embodiments, the wt/wt ratio is about 20:1. The amount of a therapeutic agent in a nanoparticle composition can be measured using absorption spectroscopy (e.g., ultraviolet-visible spectroscopy).

[0654] In some embodiments, an LNP composition comprises one or more nucleic acids such as RNAs. In some embodiments, the one or more RNAs, lipids, and amounts thereof may be selected to provide a specific NIP ratio. The NIP ratio can be selected from about 1 to about 30. The N/P ratio can be selected from about 2 to about 10. In some embodiments, the NIP ratio is from about 0.1 to about 50. In some embodiments, the N/P ratio is from about 2 to about 8. hi some embodiments, the NIP ratio is from about 2 to about 15, from about 2 to about 10, from about 2 to about 8, from about 2 to about 6, from about 3 to about 15, from about 3 to about 10, from about 3 to about 8, from about 3 to about 6, from about 4 to about 15, from about 4 to about 10, from about 4 to about 8, or from about 4 to about 6. hi some embodiments, the N/P ratio is about 2, about 2.5, about 3, about 3.5, about 4, about 4.5, about 5, about 5.5, about 6, or about 6.5. In some embodiments, the NIP ratio is from about 4 to about 6. In some embodiments, the NIP ratio is about 4, about 4.5, about 5, about 5.5, or about 6.

[0655] In some embodiments, the LNPs are formed with an average encapsulation efficiency ranging from about 50% to about 70%, from about 70% to about 90%, or from about 90% to about 100%. In some embodiments, the LNPs are formed with an average encapsulation efficiency ranging from about 75% to about 95%.

[0656] In another aspect, provided herein is a lipid nanoparticle (LNP) comprising the composition as provided herein. As used herein, a lipid nanoparticle (LNP) composition or a nanoparticle composition is a composition comprising one or more described lipids. LNP compositions are typically sized on the order of micrometers or smaller and may include a lipid bilayer. Nanoparticle compositions encompass lipid nanoparticles (LNPs), liposomes (e.g., lipid vesicles), and lipoplexes. In some embodiments, a LNP refers to any particle that has a diameter of less than 1000 nm, 500 nm, 250 nm, 200 nm, 150 nm, 100 nm, 75 nm, 50 nm, or 25 nm. In some embodiments, a nanoparticle may range in size from 1-1000 nm, 1-500 nm, 1-250 nm, 25-200 nm, 25-100 nm, 35-75 nm, or 25-60 nm. In some embodiments, a liposome having a lipid bilayer with a diameter of 500 rim or less. In some embodiments, the LNPs described herein can have a mean diameter of from about 1 nm to about 2500 nm, from about 10 nm to about 1500 nm, from about 20 nm to about 1000 nm, from about 30 nm to about 150 nm, from about 40 nm to about 150 nm, from about 50 rim to about 150 nm, from about 60 nm to about 130 nm, from about 70 nm to about 110 nm, from about 70 nm to about 100 nm, from about 80 nm to about 100 nm, from about 90 nm to about 100 nm, from about 70 to about 90 nm, from about 80 nm to about 90 nm- or from about 70 nm to about 80 nm. The LNPs described herein can have a mean diameter of about 30 nm, 35 nm, 40 nm, 45 nm, 50 nm, 55 nm, 60 nm, 65 nm, 70 nm, 75 nm, 80 nm, 85 nm, 90 nm, 95 nm, 100 nm, 105 nm, 110 nm, 115 nm, 120 nm, 125 nm, 130 nm, 135 nm, 140 nm, 145 nm, 150 nm, or greater. The LNPs described herein can be substantially non-toxic.

[0657] In some embodiments, an LNP may be made from cationic, anionic, or neutral lipids. In some embodiments, an LNP may comprise neutral lipids, such as the fusogenic phospholipid 1,2-Dioleoyl-sn-glycero-3-phosphoethanolamine (DOPE) or the membrane component cholesterol, as helper lipids to enhance transfection activity and nanoparticle stability. In some embodiments, an LNP may comprise hydrophobic lipids, hydrophilic lipids, or both hydrophobic and hydrophilic lipids. Any lipid or combination of lipids that are known in the art can be used to produce an LNP. Examples of lipids used to produce LNPs include, but are not limited to DOTMA (N[1-(2,3-dioleyloxy)propyl]-N,N,N-trimethylammonium chloride), DOSPA (N,N-dimethyl-N-([2-sperminecarboxamido]ethyl)-2,3-bis(dioleyloxy)-1-propaniminium pentahydrochloride), DOTAP (1,2-Dioleoyl-3-trimethylammonium propane), DMRIE (N-(2-hydroxyethyl)-N,N-dimethyl-2,3-bis(tetradecyloxy-1-propanaminiumbromide), DC-cholesterol (3β-[N-(N′,N′-dimethylaminoethane)-carbamoyl]cholesterol), DOTAP-cholesterol, GAP-DMORIE-DPyPE, and GL67A-DOPE-DMPE (,2-Bis(dimethylphosphino)ethane)-polyethylene glycol (PEG). Examples of cationic lipids include, but are not limited to, 98N12-5, C12-200, DLin-KC2-DMA (KC2), DLin-MC3-DMA (MC3), XTC, MD1, and 7C1. Examples of neutral lipids include, but are not limited to, DPSC, DPPC (Dipalmitoylphosphatidylcholine), POPC (1-palmitoyl-2-oleoyl-sn-glycero-3-phosphocholine), DOPE, and SM (sphingomyelin). Examples of PEG-modified lipids include, but are not limited to, PEG-DMG (Dimyristoyl glycerol), PEG-CerC14, and PEG-CerC20. In some embodiments, the lipids may be combined in any number of molar ratios to produce a LNP. In some embodiments, the polynucleotide may be combined with lipid(s) in a wide range of molar ratios to produce an LNP.

[0658] The term “substituted”, unless otherwise indicated, refers to the replacement of one or more hydrogen radicals in a given structure with the radical of a specified substituent including, but not limited to: halo, alkyl, alkenyl, alkynyl, aryl, heterocyclyl, thiol, alkylthio, oxo, thioxy, arylthio, alkylthioalkyl, arylthioallcyl, alkylsulfonyl, alkylsulfonylalkyl, arylsulfonylalkyl, alkoxy, aryloxy, aralkoxy, aminocarbonyl, alkylaminocarbonyl, aiylaminocarbonyl, alkoxycarbonyl, aryloxycarbonyl, haloalkyl, amino, trifluoromethyl, cyano, nitro, alkylamino, arylamino, alkylaminoalkyl, aiylaminoalkyl, aminoalkylamino, hydroxy, alkoxyalkyl, carboxyalkyl, alkoxycarbonylalkyl, aminocarbonylalkyl, acyl, aralkoxycarbonyl, carboxylic acid, sulfonic acid, sulfonyl, phosphonic acid, aryl, heteroaryl, heterocyclic, and an aliphatic group. It is understood that the substituent may be further substituted. Exemplary•substituents include amino, alkylamino, and the like.

[0659] As used herein, the term “substituent” means positional variables on the atoms of a core molecule that are substituted at a designated atom position, replacing one or more hydrogens on the designated atom, provided that the designated atom's normal valency is not exceeded, and that the substitution results in a stable compound. Combinations of substituents and/or variables are permissible only if such combinations result in stable compounds. A person of ordinal), skill in the art should note that any carbon as well as heteroatom with valences that appear to be unsatisfied as described or shown herein is assumed to have a sufficient number of hydrogen atom(s) to satisfy the valences described or shown. In certain instances one or more substituents having a double bond (e.g., “oxo” or “═O”) as the point of attachment may be described, shown or listed herein within a substituent group, wherein the structure may only show a single bond as the point of attachment to the core structure of Formula (I). A person of ordinary skill in the art would understand that, while only a single bond is shown, a double bond is intended for those substituents.

[0660] The term “alkyl” refers to a straight or branched hydrocarbon chain radical, having from one to twenty carbon atoms, and which is attached to the rest of the molecule by a single bond. An alkyl comprising up to 10 carbon atoms is referred to as a C₁-C₁₀ alkyl, likewise, for example, an alkyl comprising up to 6 carbon atoms is a C₁-C₆ alkyl. Alkyls (and other moieties defined herein) comprising other numbers of carbon atoms are represented similarly. Alkyl groups include, but are not limited to, C₁-C₁₀ alkyl, C₁-C₉ alkyl, C₁-C₈ alkyl. C₁-C₇ alkyl, C₁-C₆ alkyl, C₁-C₅ alkyl, C₁-C₄ alkyl, C₁-C₃ alkyl, C₁-C₂ alkyl, C₂-C₈ alkyl, C₃-C₈ alkyl and C₄-C₈ alkyl. Representative alkyl groups include, but are not limited to, methyl, ethyl, n-propyl, 1-methylethyl (i-propyl), n-butyl, i-butyl, s-butyl, n-pentyl, 1,1-dimethylethyl (t-butyl), 3-methylhexyl, 2-methylhexyl, 1-ethyl-propyl, and the like. In some embodiments, the alkyl is methyl or ethyl. In some embodiments, the alkyl is —CH(CH₃)₂ or —C(CH₃)₃. Unless stated otherwise specifically in the specification, an alkyl group may be optionally substituted as described below. “Alkylene” or “alkylene chain” refers to a straight or branched divalent hydrocarbon chain linking the rest of the molecule to a radical group. In some embodiments, the alkylene is —CI-12-, —CH₂CH₂—, or —CH₂CH₂CH₂—. In some embodiments, the alkylene is —CH₂—. In some embodiments, the alkylene is —CH₂CH₂—. In some embodiments, the alkylene is —CH₂CH₂CH₂—.

[0661] The term “alkenyl” refers to a type of alkyl group in which at least one carbon-carbon double bond is present. In one embodiment, an alkenyl group has the formula —C(R)═CR², wherein R refers to the remaining portions of the alkenyl group, which may be the same or different. In some embodiments, R is H or an alkyl. In some embodiments, an alkenyl is selected from ethenyl (i.e., vinyl), propenyl (i.e., allyl), butenyl, pentenyl, pentadienyl, and the like. Non-limiting examples of an alkenyl group include —CH═CH₂, —C(CH₃)═CH₂, —CH═CHCH₃, —C(CH₃)═CHCH₃, and —CH₂CH═CH₂.

[0662] The term “cycloalkyl” refers to a monocyclic or polycyclic non-aromatic radical, wherein each of the atoms forming the ring (i.e. skeletal atoms) is a carbon atom. In some embodiments, cycloalkyls are saturated or partially unsaturated. In some embodiments, cycloalkyls are spirocyclic or bridged compounds. In some embodiments, cycloalkyls are fused with an aromatic ring (in which case the cycloalkyl is bonded through a non-aromatic ring carbon atom). Cycloalkyl groups include groups having from 3 to 10 ring atoms. Representative cycloalkyls include, but are not limited to, cycloalkyls having from three to ten carbon atoms, from three to eight carbon atoms, from three to six carbon atoms, or from three to five carbon atoms. Monocyclic cycloalkyl radicals include, for example, cyclopropyl, cyclobutyl, cyclopentyl, cyclohexyl, cycloheptyl, and cyclooctyl. In some embodiments, the monocyclic cycloalkyl is cyclopropyl, cyclobutyl, cyclopentyl or cyclohexyl. In some embodiments, the monocyclic cycloalkyl is cyclopentenyl or cyclohexenyl. In some embodiments, the monocyclic cycloalkyl is cyclopenteny 1. Polycyclic radicals include, for example, adamantyl, 1,2-dihydronaphthalenyl, 1,4-dihydronaphthalenyl, tetrainyl, decalinyl, 3,4-dihydronaphthalenyl-.1 (2H)-one. spiro[2.2]pentyl, norbomyl and bicycle[1.1.1]pentyl. Unless otherwise stated specifically in the specification, a cycloalkyl group may be optionally substituted. Depending on the structure, a cycloalkyl group can be monovalent or divalent (i.e., a cycloalkylene group).

[0663] The term “heterocycle” or “heterocyclic” refers to heteroaromatic rings (also known as heteroaryls) and heterocycloallcyl rings (also known as heteroalicyclic groups) that includes at least one heteroatom selected from nitrogen, oxygen and sulfur, wherein each heterocyclic group has from 3 to 12 atoms in its ring system, and with the proviso that any ring does not contain two adjacent O or S atoms. A “heterocyclyl” is a univalent group formed by removing a hydrogen atom from any ring atoms of a heterocyclic compound. In some embodiments, heterocycles are monocyclic, bicyclic, polycyclic, spirocyclic or bridged compounds. Non-aromatic heterocyclic groups (also known as heterocycloalkyls) include rings having 3 to 12 atoms in its ring system and aromatic heterocyclic groups include rings having 5 to 12 atoms in its ring system. The heterocyclic groups include benzofused ring systems. Examples of non-aromatic heterocyclic groups are pyrrolidinyl, tetrahydrofuranyl, dihydrofuranyl, tetrahydrothienyl, oxazolidinonyl, tetrahydropyranyl, dihydropyranyl, tetrahydrothiopyranyl, piperidinyl, morpholinyl. thiomorpholinyl, thioxanyl, piperazinyl, aziridinyl, azetidinyl, oxetanyl, thietanyl, homopiperidinyl, oxepanyl, thiepanyl, oxazepinyl, diazepinyl, thiazepinyl, 1,2,3,6-tetrahydropyridinyl, pyrrolin-2-yl, pyrrolin-3-yl, indolinyl, 2H-pyranyl, 4Hpyranyl, dioxanyl, 1,3-dioxolanyl, pyrazolinyl, dithianyl, dithiolanyl, dihydropyranyl, dihydrothienyl, dihydrofuranyl, pyrazolidinyl, imidazolinyl, imidazoli diny I, 3-az.abicy cl o[3. 1.0]hexany 1,3-azabicyclo[4.1.0]heptanyl, 3 h-indolyl, indolin-2-onyl, isoindolin-1-onyl, isoindoline-1,3-dionyl, 3,4-dihydroisoquinolin-1(2H)-onyl, 3,4-dihydroquinolin-2(1H)-onyl, isoindoline-1,3-dithionyl, benzo[d]oxazol-2(3H)-onyl, 1H-benzo[d]imidazol-2(3H)-onyl, benzo[d]thiazol-2(3H)-onyl, and quinolizinyl. Examples of aromatic heterocyclic groups are pyridinyl, imidazolyl, pyrimidinyl, pyrazolyl, triazolyl, pyrazinyl, tetrazolyl, futyl, thienyl, isoxazolyl, thiazolyl, oxazolyl, isothiazolyl, pyrrolyl, quinolinyl, isoquinolinyl, indolyl, benzimidazolyl, benzofuranyl, cinnolinyl, indazolyl, indolizinyl, phthalazinyl, pyridazinyl, triazinyl, isoindolyl, pteridinyl, purinyl, oxadiazolyl, thiadiazolyl, furaz.anyl, benzofuraz.anyl, benzothiophenyl, benzothiazolyl, benzoxazolyl, quinazolinyl, quinoxalinyl, naphthyridinyl, and furopyridinyl. The foregoing groups are either C-attached (or Clinked) or N-attached where such is possible. For instance, a group derived from pyrrole includes both pyrrol-1-yl (N-attached) or pyrrol-3-yl (C-attached). Further, a group derived from imidazole includes imidazol-1-yl or imidazol-3-yl (both N-attached) or imidazol-2-yl, imidazol-4-yl or imidazol-5-yl (all C-attached). The heterocyclic groups include benzo-fused ring systems. Non-aromatic heterocycles are optionally substituted with one or two oxo (═O) moieties, such as pyrrolidin-2-one. In some embodiments, at least one of the two rings of a bicyclic heterocycle is aromatic. In some embodiments, both rings of a bicyclic heterocycle are aromatic.

[0664] The term “heterocycloalkyl” refers to a cycloalkyl group that includes at least one heteroatom selected from nitrogen, oxygen, and sulfur. Unless stated otherwise specifically in the specification, the heterocycloalkyl radical may be a monocyclic, or bicyclic ring system, which may include fused (when fused with an aryl or a heterowyl ring, the heterocycloalkyl is bonded through a non-aromatic ring atom) or bridged ring systems. The nitrogen, carbon or sulfur atoms in the heterocyclyl radical may be optionally oxidized. The nitrogen atom may be optionally quaternized. The heterocycloalkyl radical is partially or fully saturated. Examples of heterocycloalkyl radicals include, but are not limited to, dioxolanyl, thienyl[1,3]dithianyl, tetrahydroquinolyl, tetrahydroisoquinolyl, decahydroquinolyl, decahydroisoquinolyl, imidazolinyl, imidazolidinyl, isothiazolidinyl, isoxazolidinyl, morpholinyl, octahydroindolyl, octahydroisoindolyl, 2-oxopiperazinyl, 2-oxopiperidinyl, 2-oxopyrrolidinyl, oxazolidinyl, piperidinyl, piperazinyl, 4-piperidonyl, pyrrolidinyl, pyrazolidinyl, quinuclidinyl, thiazolidinyl, tetrahydrofuryl, trithianyl, tetrahydropyranyl, thiomorpholinyl, thiamorpholinyl, 1-oxothiomorpholinyl, 1,1-dioxo-thiomorpholinyl. The term heterocycloalkyl also includes all ring forms of carbohydrates, including but not limited to monosaccharides, disaccharides and oligosaccharides. Unless otherwise noted, heterocycloalkyls have from 2 to 12 carbons in the ring. In some embodiments, heterocycloalkyls have from 2 to 10 carbons in the ring. In some embodiments, heterocycloalkyls have from 2 to 10 carbons in the ring and 1 or 2 N atoms. In some embodiments, heterocycloalkyls have from 2 to 10 carbons in the ring and 3 or 4 N atoms. In some embodiments, heterocycloalkyls have from 2 to 12 carbons, 0-2 N atoms, 0-2 O atoms, 0-2 P atoms, and 0-1 S atoms in the ring. In some embodiments, heterocycloalkyls have from 2 to 12 carbons, 1-3 N atoms, 0-1 O atoms, and 0-1 S atoms in the ring. It is understood that when referring to the number of carbon atoms in a heterocycloalkyl, the number of carbon atoms in the heterocycloalkyl is not the same as the total number of atoms (including the heteroatoms) that make up the heterocycloalkyl (i.e. skeletal atoms of the heterocycloalkyl ring). Unless stated otherwise specifically in the specification, a heterocycloalkyl group may be optionally substituted. As used herein, the term “teterocycloalkylene” can refer to a divalent heterocycloalkyl group.

[0665] The term “heteroaryl” refers to an aryl group that includes one or more ring heteroatoms selected from nitrogen, oxygen and sulfur. The heteroaryl is monocyclic or bicyclic. Illustrative examples of monocyclic heteroaryls include pyridinyl, imidazolyl, pyrimidinyl, pyrazolyl, triazolyl, pyrazinyl, tetrazolyl, furyl, thienyl, isoxazolyl, thiazolyl, oxazolyl, isothiazolyl, pyrrolyl, pyridazinyl, triazinyl, oxadiazolyl, thiadiazolyl, furazanyl, indolizine, indole, benzofuran, benzothiophene, indazole, benzimidazole, purine, quinolizine, quinoline, isoquinoline, cinnoline, phthalazine, quinazoline, quinoxaline, 1,8-naphthyridine, and pteridine. Illustrative examples of monocyclic heteroaryls include pyridinyl, imidazolyl, pyrimidinyl, pyrazolyl, triazolyl, pyrazinyl, tetrazolyl, furyl, thienyl, isoxazolyl, thiazolyl, oxazolyl, isothiazolyl, pyrrolyl, pyridazinyl, triazinyl, oxadiazolyl, thiadiazolyl, and furazanyl. Illustrative examples of bicyclic heteroaryls include indolizine, indole, benzofuran, benzothiophene, indazole, benzimidazole, purine, quinolizine, quinoline, isoquinoline, cinnoline, phthalazine, quinazoline, quinoxaline, 1,8-naphthyridine, and pteridine. In some embodiments, heteroaryl is pyridinyl, pyrazinyl, pyrimidinyl, thiazolyl, thienyl, thiadiazolyl or furyl. In some embodiments, a heteroaryl contains 0-6 N atoms in the ring. In some embodiments, a heteroaryl contains 1-4 N atoms in the ring. In some embodiments, a heteroaryl contains 4-6 N atoms in the ring. In some embodiments, a heteroaryl contains 0-4 N atoms, 0-1 O atoms, 0-1 P atoms, and 0-1 S atoms in the ring. In some embodiments, a heteroaryl contains 1-4 N atoms, 0-1 O atoms, and 0-1 S atoms in the ring. In some embodiments, heteroaryl is a C₁-C₉ heteroaryl. In some embodiments, monocyclic heteroaryl is a C₁-C₅ heteroaryl. In some embodiments, monocyclic heteroaryl is a 5-membered or 6-membered heteroaryl. In some embodiments, a bicyclic heteroaryl is a C₆-C₉ heteroaryl. In some embodiments, a heteroaryl group is partially reduced to form a heterocycloalkyl group defined herein. In some embodiments, a heteroaryl group is fully reduced to form a heterocycloalkyl group defined herein.

[0666] As used herein, the “N/P ratio” is the molar ratio of ionizable (e.g., in the physiological pH range) nitrogen atoms in a lipid (or lipids) to phosphate groups in a nucleic acid molecular entity (or nucleic acid molecular entities), e.g., in a nanoparticle composition comprising a lipid component and an RNA. Ionizable nitrogen atoms can include, for example, nitrogen atoms that can be protonated at about pH 1, about pH 2, about pH 3, about pH 4, about pH5, about pH 6, about pH 7, about pH 7.5, or about pH 8 or higher. The physiological pH range can include, for example, the pH range of different cellular compartments (such as organs, tissues, and cells) and bodily fluids (such as blood, CSF, gastric juice, milk, bile, saliva, tears, and urine). In certain specific embodiments, the physiological pH range refers to the pH range of blood in a mammal, for example, from about 7.35 to about 7.45. Similarly, for phosphate charge neutralizers that have one or more ionizable nitrogen atoms, the N/P ratio can refer to a molar ratio of ionizable nitrogen atoms in the phosphate charge neutralizer to the phosphate groups in a nucleic acid. In some embodiments, ionizable nitrogen atoms refer to those nitrogen atoms that are ionizable within a pH range between 5 and 14.

[0667] It is further contemplated that the LNP formulations that encapsulate the gRNAs and mRNAs drug substances described herein may be modified to include GalNac lipid formulations such as those disclosed in co-owned U.S. patent application Ser. No. 17/192,709 filed on Mar. 4, 2021 with a parallel PCT application being filed on same date having International Application Number PCT/US21/20955. Employment of such GalNac lipid formulations are understood to be capable of enhancing LNP uptake in LDL-R deficient cells, such as those associated with heterozygous and homozygous familial hypercholesterolemia patient populations.

[0668] For the payload that does not contain a phosphate group, the N/P ratio can refer to a molar ratio of ionizable nitrogen atoms in a lipid to the total negative charge in the payload. For example, the N/P ratio of an LNP composition can refer to a molar ratio of the total ionizable nitrogen atoms in the LNP composition to the total negative charge in the payload that is present in the composition.

[0669] As used herein, amino lipids can contain at least one primary, secondary or tertiary amine moiety that is protonatable (or ionizable) between pH range 4 and 14. In some embodiments, the amine moiety/moieties function as the hydrophilic headgroup of the amino lipids. When most of the amine moiety(ies) of an amino lipid (or amino lipids) in a nucleic acid-lipid nanoparticle formulation is protonated at physiological pH, then the nanoparticles can be termed as cationic lipid nanoparticle (cLNP). When most of the amine moiety(ies) of an amino lipid (or amino lipids) in a nucleic acid-lipid nanoparticle formulation is not protonated at physiological pH but can be protonated at acidic pH, endosomal pH for example, can be termed as ionizable lipid nanoparticle (iLNP). The amino lipids that constitute cLNPs can be generally called cationic amino lipids (cLipids). The amino lipids that constitute iLNPs can be called ionizable amino lipids (iLipids). The amino lipid can be an iLipid or a cLipid at physiological pH.

### Kits

[0670] One aspect of the disclosure relates to kits including the compositions comprising a single guide RNA as provided herein, the base editor system and complex as provided herein, the composition as provided herein, or the lipid nanoparticle as provided herein for treating or preventing a condition. The kits can further include one or more additional therapeutic regimens or agents for treating or preventing a condition.

[0671] Also disclosed herein, in certain embodiments, are kits and articles of manufacture for use with one or more methods described herein. Such kits include a carrier, package, or container that is compartmentalized to receive one or more containers such as vials, tubes, and the like, each of the container(s) comprising one of the separate elements to be used in a method described herein. Suitable containers include, for example, bottles, vials, syringes, and test tubes. In one embodiment, the containers are formed from a variety of materials such as glass or plastic.

[0672] The articles of manufacture provided herein contain packaging materials. Examples of pharmaceutical packaging materials include, but are not limited to, blister packs, bottles, tubes, bags, containers, bottles, and any packaging material suitable for a selected formulation and intended mode of administration and treatment.

[0673] For example, the container(s) include the composition of the disclosure, and optionally in addition with therapeutic regimens or agents disclosed herein. Such kits optionally include an identifying description or label or instructions relating to its use in the methods described herein.

[0674] A kit typically includes labels listing contents and/or instructions for use, and package inserts with instructions for use. A set of instructions will also typically be included.

[0675] In embodiments, a label is on or associated with the container. In one embodiment, a label is on a container when letters, numbers or other characters forming the label are attached, molded or etched into the container itself; a label is associated with a container when it is present within a receptacle or carrier that also holds the container, e.g., as a package insert. In one embodiment, a label is used to indicate that the contents are to be used for a specific therapeutic application. The label also indicates directions for use of the contents, such as in the methods described herein.

### EXAMPLES

### Introduction

[0676] The present disclosure will be described in greater detail by way of specific examples. These examples are provided for illustrative purposes only and not to limit the scope of the claims provided herein. Those of skill in the art will readily recognize a variety of non-critical parameters that can be changed or modified to yield alternative embodiments according to the present disclosure.

[0677] Gene-editing technologies, including CRISPR-Cas9 nucleases and CRISPR base editors, have the potential to precisely and permanently modify disease-causing genes in human patients. The demonstration of durable editing in target organs of non-human primates (NHPs) is an important and necessary step prior to in vivo administration of gene editors to patients in clinical trials. Herein provided is the first demonstration that CRISPR base editors delivered in vivo using lipid nanoparticles (LNP) can efficiently modify disease-related genes in living NHPs. In addition to providing proof-of-concept for a once-and-done approach to reduce cholesterol and treat coronary heart disease, the leading cause of death worldwide, these results demonstrate how CRISPR base editors can be productively applied to a variety of therapeutic target genes in the liver and potentially other organs.

[0678] In vivo gene editing is an emerging new therapeutic approach to make DNA modifications in a patient's own body in organs such as the liver. Gene-editing methods include CRISPR-Cas9 and -Cas12 nucleases, CRISPR cytosine base editors, CRISPR adenine base editors, and CRISPR prime editors. The human PCSK9 and ANGPTL3 gene are particularly attractive potential target(s) for in vivo gene editing. In principle, editing of PCSK9 could produce durable reductions in blood LDL-C levels and thereby dramatically lower one's cumulative exposure to LDL-C in contrast to all existing therapies (e.g., statins, ezetimibe, or PCSK9 inhibitors), which must be taken daily or every few weeks to months and can suffer from lack of patient adherence.

[0679] In vivo delivery of a gene editor that can introduce a PCSK9 or ANGPTL3 loss-of-function mutation in the liver has the potential to offer a new kind of once-and-done therapy that offers lifelong treatment of coronary heart disease. CRISPR base editors make an attractive gene-editing modality for this purpose because they function efficiently for introducing precise targeted alterations and, in contrast to CRISPR-Cas9 and other gene-editing nucleases, minimize any deleterious consequences of introducing double-strand DNA breaks.

[0680] CRISPR adenine base editors can induce targeted A→G edits in DNA (T→C on the opposing strand) and can be used to inactivate genes by disrupting start codons, splice donors (canonical GT sequence on the sense strand) or splice acceptors (canonical AG sequence on the sense strand) at exon-intron or intron-exon boundaries, or introducing missense mutations. Adenine 8.8-m (hereafter referred to as ABE8.8) uses its core Streptococcus pyogenes nickase Cas9 (nSpCas9) protein with a guide RNA (gRNA) to engage a double-strand protospacer DNA sequence, flanked by an NGG protospacer-adjacent motif (PAM) sequence on its 3′ end. The protospacer sequence is specified via hybridization of the first 20 bases of the gRNA with a complementary sequence on the “target” DNA strand, leaving part of the other (“non-target”) strand in exposed single-strand form structure called the R-loop. The ABE base editor uses an evolved deoxyadenosine deaminase domain—fused to nSpCas9—to chemically modify an adenosine nucleoside, contained in the single-stranded DNA portion of the R-loop, into inosine and nicks the target DNA strand within the DNA:RNA heteroduplex of the R-loop. This nick biases DNA repair machinery to use the freshly deaminated strand as a template, enabling highly efficient transition mutation at the targeted site. The activity window of ABE8.8 typically ranges from positions 3 to 9 in the protospacer DNA sequence specified by the gRNA, 12 to 18 base pairs 5′ of the NGG PAM (positions 21 to 23), with peak editing observed at position 6 of the protospacer. Although the mechanism of action of ABE8.8 does not involve double-strand DNA breaks, indel mutagenesis can occur low frequency.

[0681] The advantages of base editing compared to CRISPR-Cas9 genome editing for gene inactivation or other types of gene alteration is noted. Standard CRISPR-Cas9 editing carries higher risks of unwanted on-target effects and off-target effects emanating from double-strand breaks (large deletions, integration of vector DNA sequences, chromosomal rearrangements, induction of p53 activity, etc.). Even the intended on-target effects-small indel mutations—have an element of unpredictability, as they can result in frameshift mutations that add varied strings of anomalous amino acids at the end of the truncated protein product, or in-frame mutations that add or remove amino acids from the protein without knocking out its function. In contrast, base editing offers a means to efficiently make precise, stereotyped changes in the genome, allowing for more reproducible alteration of gene function. Base editing mitigates unintended on-target effects by virtue of not requiring double-strand breaks but instead acting through enzymatic modification of DNA bases via the deaminase domain.

[0682] While preferred embodiments of the present invention have been shown and described herein, it will be obvious to those skilled in the art that such embodiments are provided by way of example only. It is not intended that the invention be limited by the specific examples provided within the specification. While the invention has been described with reference to the aforementioned specification, the descriptions and illustrations of the embodiments herein are not meant to be construed in a limiting sense. Numerous variations, changes, and substitutions will now occur to those skilled in the art without departing from the invention. Furthermore, it shall be understood that all aspects of the invention are not limited to the specific depictions, configurations or relative proportions set forth herein which depend upon a variety of conditions and variables. It should be understood that various alternatives to the embodiments of the invention described herein may be employed in practicing the invention. It is therefore contemplated that the invention shall also cover any such alternatives, modifications, variations or equivalents.

### Protospacer Selection and Editing

### Example 1. Grna Design for Targeting Pcsk9 and Angptl3

[0683] All protospacers shown in Table 1 and Table 24 were chosen by two criteria. First, they matched (or very closely matched) sequences in the human, cynomolgus monkey, and/or mouse orthologs of the genes. Second, they had favorable predicted off-target profiles, as judged by the MIT Specificity Score (calculated by http://crispor.tefor.net/; minimum score of 50).

[0684] Where the goal is to disrupt a gene in vivo for a therapeutic purpose, cytosine base editors have the advantage of being able to directly introduce stop codons into the coding sequence of the gene (nonsense mutations) by altering specific codons for glutamine (CAG→TAG, CAA→TAA), arginine (CGA→TGA), and tryptophan (TGG→TAG/TAA/TGA, with editing of cytosines on the antisense strand). In contrast, adenine base editors cannot directly introduce stop codons, as there are no A4G changes that result in nonsense mutations. Nonetheless, the more favorable off-target profile of adenine base editors, particularly with respect to gRNA-independent off-target DNA base editing, recommend the use of adenine base editors over cytosine base editors for therapeutic purposes. Similar approaches were followed to identify and select mouse/rodent specific protospacers listed in Tables 1 and 24.

[0685] One strategy by which adenine base editors might be used to disrupt gene function is to edit the start codon, such as from ATG→GTG or ATG→ACG. Therefore, the resultant translation into protein will not initiate at the canonical ATG site. A second strategy by which adenine base editors might be used to disrupt gene function is to edit splice sites, whether splice donors at the 5′ ends of introns or splice acceptors at the 3′ ends of introns. Splice site disruption can result in the inclusion of intronic sequences in messenger RNA (mRNA)—potentially introducing nonsense, frameshift, or in-frame indel mutations that result in premature stop codons or in insertion/deletion of amino acids that disrupt protein activity—or in the exclusion of exonic sequences, which can also introduce nonsense, frameshift, or in-frame indel mutations. Canonical splice donors comprise the DNA sequence GT on the sense strand, whereas canonical splice acceptors comprise the DNA sequence AG. Alteration of the sequence disrupts normal splicing. Splice donors can be disrupted by adenine base editing of the complementary base in the second position in the antisense strand (GT→GC), and splice acceptors can be disrupted by adenine base editing of the first position in the sense strand (AG→GG). A third strategy by which adenine base editors might be used to disrupt gene function is to introduce a missense mutation(s) into the coding region of the gene that results in production of a less functional, or non-functional protein.

[0686] All gRNA spacer sequences that would permit ABE8.8 (and other ABE variants containing Streptococcus pyogenes Cas9, such as ABE7.10, or another Cas protein that can use the NGG PAM) to disrupt splice sites were identified, whether donors or acceptors, via A→G editing within its editing window (roughly positions 3 to 9 in the 20-nt protospacer region of DNA) were identified. Guide RNAs matching each of the protospacer sequences and otherwise conforming to the standard 100-nt Streptococcus pyogenes CRISPR gRNA sequence were synthesized, with each gRNA molecule having a modest degree of chemical modifications (e.g., in Table 1).

TABLE 1
Guide RNAs (SgRNA/gRNA) for Cas9 nuclease and ABE editors

| | | Proto- | SEQ | | SEQ | Editor |
|---|---|---|---|---|---|---|
| Gene | gRNA | spacer | ID | | ID | associated |
| Target | ID | (5′-3′) | NO | Sequence (5′-3′) | NO | data |
| hcPCSK9 | GA001 | GGTGCTAG | 66 | GsGsUsGCUAGCCUUGCGUUCC | 253 | SpCas9 |
| | | CCTTGCGT | | GGUUUUAGAgcuagaaauagcA | | |
| | | TCCG | | AGUUAAAAUAAGGCUAGUCCGU | | |
| | | | | UAUCAacuugaaaaaguggcac | | |
| | | | | cgagucggugcusususu | | |
| hcPCSK9 | GA002 | GGTGCTAG | 66 | gsgsusGCUAGCCUUGCGUUCC | 253 | SpCas9 |
| | | CCTTGCGT | | GGUUUUAGAgcuagaaauagcA | | |
| | | TCCG | | AGUUAAAAUAAGGCUAGUCCGU | | |
| | | | | UAUCAacuugaaaaaguggcac | | |
| | | | | cgagucggugcusususu | | |
| hcPCSK9 | GA003 | GGTGCTAG | 66 | gsgsusGCUAGCCUUGCGUUCC | 254 | SpCas9 |
| | | CCTTGCGT | | GGUUUUsAGAgcuagaaauagc | | |
| | | TCCG | | AAGUUsAAAAUsAAGGCUsAGU | | |
| | | | | CCGUUsAUCsAacuugaaaaag | | |
| | | | | uggcaccgagucggugcususu | | |
| | | | | su | | |
| hcPCSK9 | GA004 | GGTGCTAG | 66 | gsgsusGCUAGCCUUGCGUUCC | 255 | SpCas9 |
| | | CCTTGCGT | | GgUUUUAGagcuagaaauagca | | |
| | | TCCG | | aGUUaAaAuAaggcuaGUccGU | | |
| | | | | UAucAAcuugaaaaagugGcac | | |
| | | | | cgagucggugcuuuuu | | |
| hcPCSK9 | GA005 | GGTGCTAG | 66 | GsGsUsGCUAGCCUUGCGUUCC | 255 | SpCas9 |
| | | CCTTGCGT | | GgUUUUAGagcuagaaauagca | | |
| | | TCCG | | aGUUaAaAuAaggcuaGUccGU | | |
| | | | | UAucAAcuugaaaaagugGcac | | |
| | | | | cgagucggugcuuuuu | | |
| hcPCSK9 | GA006 | GGTGCTAG | 66 | GsGsUsGCUAGCCUUGCGUUCC | 253 | SpCas9 |
| | | CCTTGCGT | | GgUUUUAGagcuagaaauagca | | |
| | | TCCG | | aGUUaAaAuAaggcuaGUccGU | | |
| | | | | UAucAAcuugaaaaagugGcac | | |
| | | | | cgagucggugcusususu | | |
| hcPCSK9 | GA007 | GGTGCTAG | 66 | gsgsusGCUAGCCUUGCGUUCC | 253 | SpCas9 |
| | | CCTTGCGT | | GgUUUUAGagcuagaaauagca | | |
| | | TCCG | | aGUUaAaAuAaggcuaGUccGU | | |
| | | | | UAucAAcuugaaaaagugGcac | | |
| | | | | cgagucggugcusususu | | |
| hcPCSK9 | GA007/ | GGTGCTAG | 66 | gsgsusGCUAGCCUUGCGUUCC | 253 | SpCas9 |
| | GA252 | CCTTGCGT | | GgUUUUAGagcuagaaauagca | | |
| | | TCCG | | aGUUaAaAuAaggcuaGUccGU | | |
| | | | | UAucAAcuugaaaaagugGcac | | |
| | | | | cgagucggugcusususu | | |
| hcPCSK9 | GA008 | GGTGCTAG | 66 | gsgsusGCUAGCCUUGCGUUCC | 256 | SpCas9 |
| | | CCTTGCGT | | GgUUUUAGagcuagaaauagca | | |
| | | TCCG | | aGUUsaAaAuAaggcuaGUccG | | |
| | | | | UUsAucAAcuugaaaaagugGc | | |
| | | | | accgagucggugcusususu | | |
| hcPCSK9 | GA009 | GGTGCTAG | 66 | gsgsusGCUAGCCUUGCGUUCC | 253 | SpCas9 |
| | | CCTTGCGT | | GGUUUUAGAGCUAGAAAUAGCA | | |
| | | TCCG | | AGUUAAAAUAAGGCUAGUCCGU | | |
| | | | | UAUCAACUUGAAAAAGUGGCAC | | |
| | | | | CGAGUCGGUGCUsususu | | |
| mcPCSK9 | GA052 | CAGGTTCC | 81 | csasgsGUUCCAUGGGAUGCUC | 55 | SpCas9 |
| | | ATGGGATG | | UGUUUUAGAGCUAGAAAUAGCA | | |
| | | CTCT | | AGUUAAAAUAAGGCUAGUCCGU | | |
| | | | | UAUCAACUUGAAAAAGUGGCAC | | |
| | | | | CGAGUCGGUGCUsususu | | |
| mcPCK9 | GA053 | CAGGTTCC | 81 | csasgsGUUCCAUGGGAUGCUC | 55 | SpCas9 |
| | | ATGGGATG | | UGUUUUAGAgcuagaaauagcA | | |
| | | CTCT | | AGUUAAAAUAAGGCUAGUCCGU | | |
| | | | | UAUCAacuugaaaaaguggcac | | |
| | | | | cgagucggugcusususu | | |
| mcPCSK9 | GA054 | CAGGTTCC | 81 | csasgsGUUCCAUGGGAUGCUC | 55 | SpCas9 |
| | | ATGGGATG | | UgUUUUAGagcuaGaaauagca | | |
| | | CTCT | | aGUUaAaAuAaggCUaGUCcGU | | |
| | | | | UAucAAcuuGaaaaaguGgcac | | |
| | | | | cgAgUCggugcusususu | | |
| mcPCSK9 | GA055 | CAGGTTCC | 81 | csasgsGUUCCAUGGGAUGCUC | 55 | SpCas9 |
| | | ATGGGATG | | UgUUUUAGagcuagaaauagca | | |
| | | CTCT | | aGUUaAaAuAaggcuaGUccGU | | |
| | | | | UAucAAcuugaaaaagugGcac | | |
| | | | | cgagucggugcusususu | | |
| hcPCSK9 | GA066/ | CCCGCACC | 13 | cscscsGCACCUUGGCGCAGCG | 9 | ABE/ |
| | GA095 | TTGGCGCA | | GGUUUUAGAgcuagaaauagcA | | SpCas9 |
| | | GCGG | | AGUUAAAAUAAGGCUAGUCCGU | | |
| | | | | UAUCAacuugaaaaaguggcac | | |
| | | | | cgagucggugcusususu | | |
| cANG | GA067/ | AAGATACC | 14 | asasgsAUACCUGAAUAACUCU | 257 | ABE/ |
| PTL3 | GA101 | TGAATAAC | | CGUUUUAGAgcuagaaauagcA | | SpCas9 |
| | | TCTC | | AGUUAAAAUAAGGCUAGUCCGU | | |
| | | | | UAUCAacuugaaaaaguggcac | | |
| | | | | cgagucggugcusususu | | |
| hcPCSK9 | GA072 | GGTGGCTC | 82 | gsgsusGGCUCACCAGCUCCAG | 258 | ABE |
| | | ACCAGCTC | | CGUUUUAGAGCUAGAAAUAGCA | | |
| | | CAGC | | AGUUAAAAUAAGGCUAGUCCGU | | |
| | | | | UAUCAACUUGAAAAAGUGGCAC | | |
| | | | | CGAGUCGGUGCUsususu | | |
| hcPCSK9 | GA073 | GCTTACCT | 67 | gscsusUACCUGUCUGUGGAAG | 259 | ABE |
| | | GTCTGTGG | | CGUUUUAGAGCUAGAAAUAGCA | | |
| | | AAGC | | AGUUAAAAUAAGGCUAGUCCGU | | |
| | | | | UAUCAACUUGAAAAAGUGGCAC | | |
| | | | | CGAGUCGGUGCUsususu | | |
| hcPCSK9 | GA074 | TGCTTACC | 68 | usgscsUUACCUGUCUGUGGAA | 260 | ABE |
| | | TGTCTGTG | | GGUUUUAGAGCUAGAAAUAGCA | | |
| | | GAAG | | AGUUAAAAUAAGGCUAGUCCGU | | |
| | | | | UAUCAACUUGAAAAAGUGGCAC | | |
| | | | | CGAGUCGGUGCUsususu | | |
| hPCSK9 | GA075 | TTGGAAAG | 83 | ususgsGAAAGACGGAGGCAGC | 261 | ABE |
| | | ACGGAGG | | CGUUUUAGAGCUAGAAAUAGCA | | |
| | | CAGCC | | AGUUAAAAUAAGGCUAGUCCGU | | |
| | | | | UAUCAACUUGAAAAAGUGGCAC | | |
| | | | | CGAGUCGGUGCUsususu | | |
| hPCSK9 | GA076 | GAAAGAC | 84 | gsasasAGACGGAGGCAGCCUG | 262 | ABE |
| | | GGAGGCA | | GGUUUUAGAGCUAGAAAUAGCA | | |
| | | GCCTGG | | AGUUAAAAUAAGGCUAGUCCGU | | |
| | | | | UAUCAACUUGAAAAAGUGGCAC | | |
| | | | | CGAGUCGGUGCUsususu | | |
| hcPCSK9 | GA077 | TCCCAGGC | 85 | uscscsCAGGCCUGGAGUUUAU | 263 | ABE |
| | | CTGGAGTT | | UGUUUUAGAGCUAGAAAUAGCA | | |
| | | TATT | | AGUUAAAAUAAGGCUAGUCCGU | | |
| | | | | UAUCAACUUGAAAAAGUGGCAC | | |
| | | | | CGAGUCGGUGCUsususu | | |
| hPCSK9 | GA078 | AGCACCTA | 86 | asgscsACCUACCUCGGGAGCT | 264 | ABE |
| | | CCTCGGGA | | GGUUUUAGAGCUAGAAAUAGCA | | |
| | | GCTG | | AGUUAAAAUAAGGCUAGUCCGU | | |
| | | | | UAUCAACUUGAAAAAGUGGCAC | | |
| | | | | CGAGUCGGUGCUsususu | | |
| hcPCSK9 | GA079 | CTTTCCAG | 87 | csususUCCAGGUCAUCACAGU | 265 | ABE |
| | | GTCATCAC | | UGUUUUAGAGCUAGAAAUAGCA | | |
| | | AGTT | | AGUUAAAAUAAGGCUAGUCCGU | | |
| | | | | UAUCAACUUGAAAAAGUGGCAC | | |
| | | | | CGAGUCGGUGCUsususu | | |
| hcPCSK9 | GA080 | CCTTTCCA | 88 | cscsusUUCCAGGUCAUCACAG | 266 | ABE |
| | | GGTCATCA | | UGUUUUAGAGCUAGAAAUAGCA | | |
| | | CAGT | | AGUUAAAAUAAGGCUAGUCCGU | | |
| | | | | UAUCAACUUGAAAAAGUGGCAC | | |
| | | | | CGAGUCGGUGCUsususu | | |
| hcPCSK9 | GA081 | TTTCCAGG | 89 | usususCCAGGUCAUCACAGUU | 267 | ABE |
| | | TCATCACA | | GGUUUUAGAGCUAGAAAUAGCA | | |
| | | GTTG | | AGUUAAAAUAAGGCUAGUCCGU | | |
| | | | | UAUCAACUUGAAAAAGUGGCAC | | |
| | | | | CGAGUCGGUGCUsususu | | |
| hPCSK9 | GA082 | CTTACCTG | 90 | csususACCUGCCCCAUGGGUG | 268 | ABE |
| | | CCCCATGG | | CGUUUUAGAGCUAGAAAUAGCA | | |
| | | GTGC | | AGUUAAAAUAAGGCUAGUCCGU | | |
| | | | | UAUCAACUUGAAAAAGUGGCAC | | |
| | | | | CGAGUCGGUGCUsususu | | |
| hPCSK9 | GA083 | TAAGGCCC | 91 | usasasGGCCCAAGGGGGCAAG | 269 | ABE |
| | | AAGGGGG | | CGUUUUAGAGCUAGAAAUAGCA | | |
| | | CAAGC | | AGUUAAAAUAAGGCUAGUCCGU | | |
| | | | | UAUCAACUUGAAAAAGUGGCAC | | |
| | | | | CGAGUCGGUGCUsususu | | |
| hPCSK9 | GA084 | CCTCTTCA | 92 | cscsusCUUCACCUGCUCCUGA | 270 | ABE |
| | | CCTGCTCC | | GGUUUUAGAGCUAGAAAUAGCA | | |
| | | TGAG | | AGUUAAAAUAAGGCUAGUCCGU | | |
| | | | | UAUCAACUUGAAAAAGUGGCAC | | |
| | | | | CGAGUCGGUGCUsususu | | |
| hPCSK9 | GA085 | GCCTCTTC | 93 | gscscsUCUUCACCUGCUCCUG | 271 | ABE |
| | | ACCTGCTC | | AGUUUUAGAGCUAGAAAUAGCA | | |
| | | CTGA | | AGUUAAAAUAAGGCUAGUCCGU | | |
| | | | | UAUCAACUUGAAAAAGUGGCAC | | |
| | | | | CGAGUCGGUGCUsususu | | |
| hPCSK9 | GA086 | TTCACCTG | 94 | ususcsACCUGCUCCUGAGGGG | 272 | ABE |
| | | CTCCTGAG | | CGUUUUAGAGCUAGAAAUAGCA | | |
| | | GGGC | | AGUUAAAAUAAGGCUAGUCCGU | | |
| | | | | UAUCAACUUGAAAAAGUGGCAC | | |
| | | | | CGAGUCGGUGCUsususu | | |
| hcPCSK9 | GA087 | TCACCTGC | 95 | uscsasCCUGCUCCUGAGGGGC | 273 | ABE |
| | | TCCTGAGG | | CGUUUUAGAGCUAGAAAUAGCA | | |
| | | GGCC | | AGUUAAAAUAAGGCUAGUCCGU | | |
| | | | | UAUCAACUUGAAAAAGUGGCAC | | |
| | | | | CGAGUCGGUGCUsususu | | |
| hcPCSK9 | GA088 | CCCAGGCT | 96 | cscscsAGGCUGCAGCUCCCAC | 274 | ABE |
| | | GCAGCTCC | | UGUUUUAGAGCUAGAAAUAGCA | | |
| | | CACT | | AGUUAAAAUAAGGCUAGUCCGU | | |
| | | | | UAUCAACUUGAAAAAGUGGCAC | | |
| | | | | CGAGUCGGUGCUsususu | | |
| hPCSK9 | GA089 | CCCCAGGC | 97 | cscscsCAGGCUGCAGCUCCCA | 275 | ABE |
| | | TGCAGCTC | | CGUUUUAGAGCUAGAAAUAGCA | | |
| | | CCAC | | AGUUAAAAUAAGGCUAGUCCGU | | |
| | | | | UAUCAACUUGAAAAAGUGGCAC | | |
| | | | | CGAGUCGGUGCUsususu | | |
| hPCSK9 | GA090 | GCAGGTG | 98 | gscsasGGUGACCGUGGCCUGC | 276 | ABE |
| | | ACCGTGGC | | GGUUUUAGAGCUAGAAAUAGCA | | |
| | | CTGCG | | AGUUAAAAUAAGGCUAGUCCGU | | |
| | | | | UAUCAACUUGAAAAAGUGGCAC | | |
| | | | | CGAGUCGGUGCUsususu | | |
| hANG | GA091 | AAGATACC | 15 | asasgsAUACCUGAAUAACCCU | 59 | ABE |
| PTL3 | | TGAATAAC | | CGUUUUAGAGCUAGAAAUAGCA | | |
| | | CCTC | | AGUUAAAAUAAGGCUAGUCCGU | | |
| | | | | UAUCAACUUGAAAAAGUGGCAC | | |
| | | | | CGAGUCGGUGCUsususu | | |
| hcAN | GA092 | CTCCTTTA | 99 | csuscsCUUUAGGAGGCUGGUG | 277 | ABE |
| GPTL3 | | GGAGGCT | | GGUUUUAGAGCUAGAAAUAGCA | | |
| | | GGTGG | | AGUUAAAAUAAGGCUAGUCCGU | | |
| | | | | UAUCAACUUGAAAAAGUGGCAC | | |
| | | | | CGAGUCGGUGCUsususu | | |
| hANG | GA093 | TTTTCAGG | 100 | usususUCAGGAGAAUUUUGGU | 278 | ABE |
| PTL3 | | AGAATTTT | | UGUUUUAGAGCUAGAAAUAGCA | | |
| | | GGTT | | AGUUAAAAUAAGGCUAGUCCGU | | |
| | | | | UAUCAACUUGAAAAAGUGGCAC | | |
| | | | | CGAGUCGGUGCUsususu | | |
| hANG | GA094/ | CTTTTCAG | 101 | csususUUCAGGAGAAUUUUGG | 279 | ABE |
| PTL3 | GA153 | GAGAATTT | | UGUUUUAGAGCUAGAAAUAGCA | | |
| | | TGGT | | AGUUAAAAUAAGGCUAGUCCGU | | |
| | | | | UAUCAACUUGAAAAAGUGGCAC | | |
| | | | | CGAGUCGGUGCUsususu | | |
| hcPCSK9 | GA095/ | CCCGCACC | 13 | cscscsGCACCUUGGCGCAGCG | 9 | ABE |
| | GA066 | TTGGCGCA | | GgUUUUAGAgcuagaaauagcA | | |
| | | GCGG | | AGUUAAAAUAAGGCUAGUCCGU | | |
| | | | | UAUCAacuugaaaaaguggcac | | |
| | | | | cgagucggugcusususu | | |
| hcPCSK9 | GA096 | CCCGCACC | 13 | cscscsGCACCUUGGCGCAGCG | 9 | ABE |
| | | TTGGCGCA | | GgUUUUAGagcuaGaaauagca | | |
| | | GCGG | | aGUUaAaAuAaggCUaGUCcGU | | |
| | | | | UAucAAcuuGaaaaaguGgcac | | |
| | | | | cgAgUCggugcusususu | | |
| hcPCSK9 | GA097 | CCCGCACC | 13 | cscscsGCACCUUGGCGCAGCG | 9 | ABE |
| | | TTGGCGCA | | GgUUUUAGagcuagaaauagca | | |
| | | GCGG | | aGUUaAaAuAaggcuaGUccGU | | |
| | | | | UAucAAcuugaaaaagugGcac | | |
| | | | | cgagucggugcusususu | | |
| hANG | GA098 | AAGATACC | 15 | asasgsAUACCUGAAUAACCCU | 59 | ABE |
| PTL3 | | TGAATAAC | | CGUUUUAGAgcuagaaauagcA | | |
| | | CCTC | | AGUUAAAAUAAGGCUAGUCCGU | | |
| | | | | UAUCAacuugaaaaaguggcac | | |
| | | | | cgagucggugcusususu | | |
| hANG | GA099 | AAGATACC | 15 | asasgsAUACCUGAAUAACCCU | 59 | ABE |
| PTL3 | | TGAATAAC | | CgUUUUAGagcuaGaaauagca | | |
| | | CCTC | | aGUUaAaAuAaggCUaGUCcGU | | |
| | | | | UAucAAcuuGaaaaaguGgcac | | |
| | | | | cgAgUCggugcusususu | | |
| hANG | GA100 | AAGATACC | 15 | asasgsAUACCUGAAUAACCCU | 59 | ABE |
| PTL3 | | TGAATAAC | | CgUUUUAGagcuagaaauagca | | |
| | | CCTC | | aGUUaAaAuAaggcuaGUccGU | | |
| | | | | UAucAAcuugaaaaagugGcac | | |
| | | | | cgagucggugcusususu | | |
| cANG | GA101/ | AAGATACC | 14 | asasgsAUACCUGAAUAACUCU | 257 | ABE |
| PTL3 | GA067 | TGAATAAC | | CGUUUUAGAgcuagaaauagcA | | |
| | | TCTC | | AGUUAAAAUAAGGCUAGUCCGU | | |
| | | | | UAUCAacuugaaaaaguggcac | | |
| | | | | cgagucggugcusususu | | |
| cANG | GA102 | AAGATACC | 14 | asasgsAUACCUGAAUAACUCU | 257 | ABE |
| PTL3 | | TGAATAAC | | CgUUUUAGagcuaGaaauagca | | |
| | | TCTC | | aGUUaAaAuAaggCUaGUCcGU | | |
| | | | | UAucAAcuuGaaaaaguGgcac | | |
| | | | | cgAgUCggugcusususu | | |
| cANG | GA103 | AAGATACC | 14 | asasgsAUACCUGAAUAACUCU | 257 | ABE |
| PTL3 | | TGAATAAC | | CgUUUUAGagcuagaaauagca | | |
| | | TCTC | | aGUUaAaAuAaggcuaGUccGU | | |
| | | | | UAucAAcuugaaaaagugGcac | | |
| | | | | cgagucggugcusususu | | |
| hANG | GA104 | TAATTTGG | 102 | usasasUUUGGCCCUUCGUCUU | 280 | ABE |
| PTL3 | | CCCTTCGT | | AGUUUUAGAGCUAGAAAUAGCA | | |
| | | CTTA | | AGUUAAAAUAAGGCUAGUCCGU | | |
| | | | | UAUCAACUUGAAAAAGUGGCAC | | |
| | | | | CGAGUCGGUGCUsususu | | |
| hANG | GA105 | AGACTTTG | 103 | asgsasCUUUGUCCAUAAGACG | 281 | ABE |
| PTL3 | | TCCATAAG | | AGUUUUAGAGCUAGAAAUAGCA | | |
| | | ACGA | | AGUUAAAAUAAGGCUAGUCCGU | | |
| | | | | UAUCAACUUGAAAAAGUGGCAC | | |
| | | | | CGAGUCGGUGCUsususu | | |
| hANG | GA106 | GACTTTGT | 104 | gsascsUUUGUCCAUAAGACGA | 282 | ABE |
| PTL3 | | CCATAAGA | | AGUUUUAGAGCUAGAAAUAGCA | | |
| | | CGAA | | AGUUAAAAUAAGGCUAGUCCGU | | |
| | | | | UAUCAACUUGAAAAAGUGGCAC | | |
| | | | | CGAGUCGGUGCUsususu | | |
| hcANG | GA107 | AGCCAATG | 105 | asgscsCAAUGGCCUCCUUCAG | 283 | SpCas9 |
| PTL3 | | GCCTCCTT | | UGUUUUAGAGCUAGAAAUAGCA | | |
| | | CAGT | | AGUUAAAAUAAGGCUAGUCCGU | | |
| | | | | UAUCAACUUGAAAAAGUGGCAC | | |
| | | | | CGAGUCGGUGCUsususu | | |
| hcANG | GA108 | TCCCAACT | 106 | uscscsCAACUGAAGGAGGCCA | 284 | SpCas9 |
| PTL3 | | GAAGGAG | | UGUUUUAGAGCUAGAAAUAGCA | | |
| | | GCCAT | | AGUUAAAAUAAGGCUAGUCCGU | | |
| | | | | UAUCAACUUGAAAAAGUGGCAC | | |
| | | | | CGAGUCGGUGCUsususu | | |
| hcANG | GA109 | GGCCTCCT | 107 | gsgscsCUCCUUCAGUUGGGAC | 285 | SpCas9 |
| PTL3 | | TCAGTTGG | | AGUUUUAGAGCUAGAAAUAGCA | | |
| | | GACA | | AGUUAAAAUAAGGCUAGUCCGU | | |
| | | | | UAUCAACUUGAAAAAGUGGCAC | | |
| | | | | CGAGUCGGUGCUsususu | | |
| hcANG | GA110 | GACCATGT | 108 | gsascsCAUGUCCCAACUGAAG | 286 | SpCas9 |
| PTL3 | | CCCAACTG | | GGUUUUAGAGCUAGAAAUAGCA | | |
| | | AAGG | | AGUUAAAAUAAGGCUAGUCCGU | | |
| | | | | UAUCAACUUGAAAAAGUGGCAC | | |
| | | | | CGAGUCGGUGCUsususu | | |
| hcANG | GA111 | GCCAATGG | 109 | gscscsAAUGGCCUCCUUCAGU | 287 | SpCas9 |
| PTL3 | | CCTCCTTC | | UGUUUUAGAGCUAGAAAUAGCA | | |
| | | AGTT | | AGUUAAAAUAAGGCUAGUCCGU | | |
| | | | | UAUCAACUUGAAAAAGUGGCAC | | |
| | | | | CGAGUCGGUGCUsususu | | |
| hANG | GA112 | ATTGTCTT | 110 | asususGUCUUGAUCAAUUCUG | 288 | ABE/ |
| PTL3 | | GATCAATT | | GGUUUUAGAGCUAGAAAUAGCA | | SpCas9 |
| | | CTGG | | AGUUAAAAUAAGGCUAGUCCGU | | |
| | | | | UAUCAACUUGAAAAAGUGGCAC | | |
| | | | | CGAGUCGGUGCUsususu | | |
| hcANG | GA113 | ATTCTGGA | 111 | asususCUGGAGGAAAUAACUA | 289 | ABE/ |
| PTL3 | | GGAAATA | | GGUUUUAGAGCUAGAAAUAGCA | | SpCas9 |
| | | ACTAG | | AGUUAAAAUAAGGCUAGUCCGU | | |
| | | | | UAUCAACUUGAAAAAGUGGCAC | | |
| | | | | CGAGUCGGUGCUsususu | | |
| hANG | GA114 | TCTGGGTG | 112 | uscsusGGGUGUUCUGGAGUUU | 290 | SpCas9 |
| PTL3 | | TTCTGGAG | | CGUUUUAGAGCUAGAAAUAGCA | | |
| | | TTTC | | AGUUAAAAUAAGGCUAGUCCGU | | |
| | | | | UAUCAACUUGAAAAAGUGGCAC | | |
| | | | | CGAGUCGGUGCUsususu | | |
| hcANG | GA115 | AACATAGC | 113 | asascsAUAGCAAAUCUUGAUU | 291 | ABE/ |
| PTL3 | | AAATCTTG | | UGUUUUAGAGCUAGAAAUAGCA | | SpCas9 |
| | | ATTT | | AGUUAAAAUAAGGCUAGUCCGU | | |
| | | | | UAUCAACUUGAAAAAGUGGCAC | | |
| | | | | CGAGUCGGUGCUsususu | | |
| hcANG | GA116 | GTAGAATT | 114 | gsusasGAAUUUUUUCUUCUAG | 292 | ABE/ |
| PTL3 | | TTTTCTTC | | GGUUUUAGAGCUAGAAAUAGCA | | SpCas9 |
| | | TAGG | | AGUUAAAAUAAGGCUAGUCCGU | | |
| | | | | UAUCAACUUGAAAAAGUGGCAC | | |
| | | | | CGAGUCGGUGCUsususu | | |
| hcANG | GA117 | ACTACAAG | 115 | ascsusACAAGUCAAAAAUGAA | 293 | ABE/ |
| PTL3 | | TCAAAAAT | | GGUUUUAGAGCUAGAAAUAGCA | | SpCas9 |
| | | GAAG | | AGUUAAAAUAAGGCUAGUCCGU | | |
| | | | | UAUCAACUUGAAAAAGUGGCAC | | |
| | | | | CGAGUCGGUGCUsususu | | |
| hANG | GA118 | TATATTGG | 116 | usasusAUUGGUCUUCCACGGU | 294 | ABE/ |
| PTL3 | | TCTTCCAC | | CGUUUUAGAGCUAGAAAUAGCA | | SpCas9 |
| | | GGTC | | AGUUAAAAUAAGGCUAGUCCGU | | |
| | | | | UAUCAACUUGAAAAAGUGGCAC | | |
| | | | | CGAGUCGGUGCUsususu | | |
| hANG | GA119 | CAAAGAC | 117 | csasasAGACCUUCUCCAGACC | 295 | ABE/ |
| PTL3 | | CTTCTCCA | | GGUUUUAGAGCUAGAAAUAGCA | | SpCas9 |
| | | GACCG | | AGUUAAAAUAAGGCUAGUCCGU | | |
| | | | | UAUCAACUUGAAAAAGUGGCAC | | |
| | | | | CGAGUCGGUGCUsususu | | |
| hANG | GA120 | GGTCTTCC | 118 | gsgsusCUUCCACGGUCUGGAG | 296 | ABE/ |
| PTL3 | | ACGGTCTG | | AGUUUUAGAGCUAGAAAUAGCA | | SpCas9 |
| | | GAGA | | AGUUAAAAUAAGGCUAGUCCGU | | |
| | | | | UAUCAACUUGAAAAAGUGGCAC | | |
| | | | | CGAGUCGGUGCUsususu | | |
| hANG | GA121 | TTGTTTAT | 119 | ususgsUUUAUAUUGGUCUUCC | 297 | ABE/ |
| PTL3 | | ATTGGTCT | | AGUUUUAGAGCUAGAAAUAGCA | | SpCas9 |
| | | TCCA | | AGUUAAAAUAAGGCUAGUCCGU | | |
| | | | | UAUCAACUUGAAAAAGUGGCAC | | |
| | | | | CGAGUCGGUGCUsususu | | |
| hcANG | GA122 | CTTTTATT | 120 | csususUUAUUUGACUAUGCUG | 298 | ABE/ |
| PTL3 | | TGACTATG | | UGUUUUAGAGCUAGAAAUAGCA | | SpCas9 |
| | | CTGT | | AGUUAAAAUAAGGCUAGUCCGU | | |
| | | | | UAUCAACUUGAAAAAGUGGCAC | | |
| | | | | CGAGUCGGUGCUsususu | | |
| hANG | GA123 | AAAGTCTG | 121 | asasasGUCUGGAUAUAGAGAG | 299 | ABE/ |
| PTL3 | | GATATAGA | | UGUUUUAGAGCUAGAAAUAGCA | | SpCas9 |
| | | GAGT | | AGUUAAAAUAAGGCUAGUCCGU | | |
| | | | | UAUCAACUUGAAAAAGUGGCAC | | |
| | | | | CGAGUCGGUGCUsususu | | |
| hANG | GA124 | GTTGGTTT | 122 | gsususGGUUUAAUUGUUUAUA | 300 | ABE/ |
| PTL3 | | AATTGTTT | | UGUUUUAGAGCUAGAAAUAGCA | | SpCas9 |
| | | ATAT | | AGUUAAAAUAAGGCUAGUCCGU | | |
| | | | | UAUCAACUUGAAAAAGUGGCAC | | |
| | | | | CGAGUCGGUGCUsususu | | |
| hcANG | GA125 | TGATGGTA | 123 | usgsasUGGUAAGACACUUUGG | 301 | ABE/ |
| PTL3 | | AGACACTT | | GUUUUUAGAGCUAGAAAUAGCA | | SpCas9 |
| | | TGGT | | AGUUAAAAUAAGGCUAGUCCGU | | |
| | | | | UAUCAACUUGAAAAAGUGGCAC | | |
| | | | | CGAGUCGGUGCUsususu | | |
| hcANG | GA126 | GGAGTAGT | 124 | gsgsasGUAGUUCUUGGUGCUC | 302 | ABE/ |
| PTL3 | | TCTTGGTG | | UGUUUUAGAGCUAGAAAUAGCA | | SpCas9 |
| | | CTCT | | AGUUAAAAUAAGGCUAGUCCGU | | |
| | | | | UAUCAACUUGAAAAAGUGGCAC | | |
| | | | | CGAGUCGGUGCUsususu | | |
| hcANG | GAB127 | AACATGAT | 125 | asascsAUGAUGGUAAGACACU | 303 | ABE/ |
| PTL3 | | GGTAAGA | | UGUUUUAGAGCUAGAAAUAGCA | | SpCas9 |
| | | CACTT | | AGUUAAAAUAAGGCUAGUCCGU | | |
| | | | | UAUCAACUUGAAAAAGUGGCAC | | |
| | | | | CGAGUCGGUGCUsususu | | |
| hcANG | GA128 | TGAAGAA | 126 | usgsasAGAAAGGGAGUAGUUC | 304 | ABE/ |
| PTL3 | | AGGGAGT | | UGUUUUAGAGCUAGAAAUAGCA | | SpCas9 |
| | | AGTTCT | | AGUUAAAAUAAGGCUAGUCCGU | | |
| | | | | UAUCAACUUGAAAAAGUGGCAC | | |
| | | | | CGAGUCGGUGCUsususu | | |
| hcANG | GA129 | AGTTCTTG | 127 | asgsusUCUUGGUGCUCUUGGC | 305 | ABE/ |
| PTL3 | | GTGCTCTT | | UGUUUUAGAGCUAGAAAUAGCA | | SpCas9 |
| | | GGCT | | AGUUAAAAUAAGGCUAGUCCGU | | |
| | | | | UAUCAACUUGAAAAAGUGGCAC | | |
| | | | | CGAGUCGGUGCUsususu | | |
| hcANG | GA130 | ATGATGGT | 128 | asusgsAUGGUAAGACACUUUG | 306 | ABE/ |
| PTL3 | | AAGACACT | | GGUUUUAGAGCUAGAAAUAGCA | | SpCas9 |
| | | TTGG | | AGUUAAAAUAAGGCUAGUCCGU | | |
| | | | | UAUCAACUUGAAAAAGUGGCAC | | |
| | | | | CGAGUCGGUGCUsususu | | |
| hcANG | GA131 | GAAGATAG | 129 | gsasasGAUAGAGAAAUUUCUG | 307 | ABE/ |
| PTL3 | | AGAAATTT | | UGUUUUAGAGCUAGAAAUAGCA | | SpCas9 |
| | | CTGT | | AGUUAAAAUAAGGCUAGUCCGU | | |
| | | | | UAUCAACUUGAAAAAGUGGCAC | | |
| | | | | CGAGUCGGUGCUsususu | | |
| hcANG | GA132 | GGAAGATA | 130 | gsgsasAGAUAGAGAAAUUUCU | 308 | ABE/ |
| PTL3 | | GAGAAATT | | GGUUUUAGAGCUAGAAAUAGCA | | SpCas9 |
| | | TCTG | | AGUUAAAAUAAGGCUAGUCCGU | | |
| | | | | UAUCAACUUGAAAAAGUGGCAC | | |
| | | | | CGAGUCGGUGCUsususu | | |
| hANG | GA133 | TATTTCAT | 131 | usasusUUCAUUCAACUGAAGA | 309 | ABE/ |
| PTL3 | | TCAACTGA | | AGUUUUAGAGCUAGAAAUAGCA | | SpCas9 |
| | | AGAA | | AGUUAAAAUAAGGCUAGUCCGU | | |
| | | | | UAUCAACUUGAAAAAGUGGCAC | | |
| | | | | CGAGUCGGUGCUsususu | | |
| hANG | GA134 | ATTTCATT | 132 | asususUCAUUCAACUGAAGAA | 310 | ABE/ |
| PTL3 | | CAACTGAA | | AGUUUUAGAGCUAGAAAUAGCA | | SpCas9 |
| | | GAAA | | AGUUAAAAUAAGGCUAGUCCGU | | |
| | | | | UAUCAACUUGAAAAAGUGGCAC | | |
| | | | | CGAGUCGGUGCUsususu | | |
| hANG | GA135 | GTCTACTG | 133 | gsuscsUACUGUGAUGUUAUAU | 311 | ABE/ |
| PTL3 | | TGATGTTA | | CGUUUUAGAGCUAGAAAUAGCA | | SpCas9 |
| | | TATC | | AGUUAAAAUAAGGCUAGUCCGU | | |
| | | | | UAUCAACUUGAAAAAGUGGCAC | | |
| | | | | CGAGUCGGUGCUsususu | | |
| hANG | GA136 | TAAATGGT | 134 | usasasAUGGUGGUACAUUCAG | 312 | ABE/ |
| PTL3 | | GGTACATT | | CGUUUUAGAGCUAGAAAUAGCA | | SpCas9 |
| | | CAGC | | AGUUAAAAUAAGGCUAGUCCGU | | |
| | | | | UAUCAACUUGAAAAAGUGGCAC | | |
| | | | | CGAGUCGGUGCUsususu | | |
| hcANG | GA137 | TATCAGGT | 135 | usasusCAGGUAAAACCUGUCU | 313 | ABE/ |
| PTL3 | | AAAACCTG | | AGUUUUAGAGCUAGAAAUAGCA | | SpCas9 |
| | | TCTA | | AGUUAAAAUAAGGCUAGUCCGU | | |
| | | | | UAUCAACUUGAAAAAGUGGCAC | | |
| | | | | CGAGUCGGUGCUsususu | | |
| hANG | GA138 | TGTACCAC | 136 | usgsusACCACCAUUUAUAACA | 314 | ABE/ |
| PTL3 | | CATTTATA | | GGUUUUAGAGCUAGAAAUAGCA | | SpCas9 |
| | | ACAG | | AGUUAAAAUAAGGCUAGUCCGU | | |
| | | | | UAUCAACUUGAAAAAGUGGCAC | | |
| | | | | CGAGUCGGUGCUsususu | | |
| hANG | GA139 | TTCACCTC | 137 | ususcsACCUCUGUUAUAAAUG | 315 | ABE/ |
| PTL3 | | TGTTATAA | | GGUUUUAGAGCUAGAAAUAGCA | | SpCas9 |
| | | ATGG | | AGUUAAAAUAAGGCUAGUCCGU | | |
| | | | | UAUCAACUUGAAAAAGUGGCAC | | |
| | | | | CGAGUCGGUGCUsususu | | |
| hANG | GA140 | AACAGAG | 138 | asascsAGAGGUGAACAUACAA | 316 | ABE/ |
| PTL3 | | GTGAACAT | | GGUUUUAGAGCUAGAAAUAGCA | | SpCas9 |
| | | ACAAG | | AGUUAAAAUAAGGCUAGUCCGU | | |
| | | | | UAUCAACUUGAAAAAGUGGCAC | | |
| | | | | CGAGUCGGUGCUsususu | | |
| hcANG | GA141 | TTGAGAGT | 139 | ususgsAGAGUUGCUGGGUCUG | 317 | ABE/ |
| PTL3 | | TGCTGGGT | | AGUUUUAGAGCUAGAAAUAGCA | | SpCas9 |
| | | CTGA | | AGUUAAAAUAAGGCUAGUCCGU | | |
| | | | | UAUCAACUUGAAAAAGUGGCAC | | |
| | | | | CGAGUCGGUGCUsususu | | |
| hcANG | GA142 | TGAAAAA | 140 | usgsasAAAACUUGAGAGUUGC | 318 | SpCas9 |
| PTL3 | | CTTGAGAG | | UGUUUUAGAGCUAGAAAUAGCA | | |
| | | TTGCT | | AGUUAAAAUAAGGCUAGUCCGU | | |
| | | | | UAUCAACUUGAAAAAGUGGCAC | | |
| | | | | CGAGUCGGUGCUsususu | | |
| hcANG | GA143 | TTAATTCA | 141 | ususasAUUCAACAUCGAAUAG | 319 | ABE/ |
| PTL3 | | ACATCGAA | | AGUUUUAGAGCUAGAAAUAGCA | | SpCas9 |
| | | TAGA | | AGUUAAAAUAAGGCUAGUCCGU | | |
| | | | | UAUCAACUUGAAAAAGUGGCAC | | |
| | | | | CGAGUCGGUGCUsususu | | |
| hANG | GA144 | TTTGGGAG | 142 | usususGGGAGGCUUGAUGGUA | 320 | ABE/ |
| PTL3 | | GCTTGATG | | AGUUUUAGAGCUAGAAAUAGCA | | SpCas9 |
| | | GTAA | | AGUUAAAAUAAGGCUAGUCCGU | | |
| | | | | UAUCAACUUGAAAAAGUGGCAC | | |
| | | | | CGAGUCGGUGCUsususu | | |
| hcANG | GA145 | CATTATAT | 143 | csasusUAUAUUCAGGUAGUCC | 321 | ABE/ |
| PTL3 | | TCAGGTAG | | AGUUUUAGAGCUAGAAAUAGCA | | SpCas9 |
| | | TCCA | | AGUUAAAAUAAGGCUAGUCCGU | | |
| | | | | UAUCAACUUGAAAAAGUGGCAC | | |
| | | | | CGAGUCGGUGCUsususu | | |
| hANG | GA146 | TTGGGAGG | 144 | ususgsGGAGGCUUGAUGGUAA | 322 | ABE/ |
| PTL3 | | CTTGATGG | | GGUUUUAGAGCUAGAAAUAGCA | | SpCas9 |
| | | TAAG | | AGUUAAAAUAAGGCUAGUCCGU | | |
| | | | | UAUCAACUUGAAAAAGUGGCAC | | |
| | | | | CGAGUCGGUGCUsususu | | |
| hANG | GA147 | TTTTGGGA | 145 | usususUGGGAGGCUUGAUGGU | 323 | ABE/ |
| PTL3 | | GGCTTGAT | | AGUUUUAGAGCUAGAAAUAGCA | | SpCas9 |
| | | GGTA | | AGUUAAAAUAAGGCUAGUCCGU | | |
| | | | | UAUCAACUUGAAAAAGUGGCAC | | |
| | | | | CGAGUCGGUGCUsususu | | |
| hcANG | GA148 | ACAAAACT | 146 | ascsasAAACUUCAAUGAAACG | 324 | ABE/ |
| PTL3 | | TCAATGAA | | UGUUUUAGAGCUAGAAAUAGCA | | SpCas9 |
| | | ACGT | | AGUUAAAAUAAGGCUAGUCCGU | | |
| | | | | UAUCAACUUGAAAAAGUGGCAC | | |
| | | | | CGAGUCGGUGCUsususu | | |
| hANG | GA149 | TATGGTTT | 147 | usasusGGUUUUGGGAGGCUUG | 325 | ABE/ |
| PTL3 | | TGGGAGG | | AGUUUUAGAGCUAGAAAUAGCA | | SpCas9 |
| | | CTTGA | | AGUUAAAAUAAGGCUAGUCCGU | | |
| | | | | UAUCAACUUGAAAAAGUGGCAC | | |
| | | | | CGAGUCGGUGCUsususu | | |
| hANG | GA150 | ACTACAAA | 148 | ascsusACAAAUAUGGUUUUGG | 326 | ABE/ |
| PTL3 | | TATGGTTT | | GGUUUUAGAGCUAGAAAUAGCA | | SpCas9 |
| | | TGGG | | AGUUAAAAUAAGGCUAGUCCGU | | |
| | | | | UAUCAACUUGAAAAAGUGGCAC | | |
| | | | | CGAGUCGGUGCUsususu | | |
| hcANG | GA151 | GAGAACT | 149 | gsasgsAACUACAAAUAUGGUU | 327 | ABE/ |
| PTL3 | | ACAAATAT | | UGUUUUAGAGCUAGAAAUAGCA | | SpCas9 |
| | | GGTTT | | AGUUAAAAUAAGGCUAGUCCGU | | |
| | | | | UAUCAACUUGAAAAAGUGGCAC | | |
| | | | | CGAGUCGGUGCUsususu | | |
| hANG | GA152 | AGGACACT | 150 | asgsgsACACUUCAACUGUCCA | 328 | ABE/ |
| PTL3 | | TCAACTGT | | GGUUUUAGAGCUAGAAAUAGCA | | SpCas9 |
| | | CCAG | | AGUUAAAAUAAGGCUAGUCCGU | | |
| | | | | UAUCAACUUGAAAAAGUGGCAC | | |
| | | | | CGAGUCGGUGCUsususu | | |
| hANG | GA094/ | CTTTTCAG | 101 | csususUUCAGGAGAAUUUUGG | 279 | ABE/ |
| PTL3 | GA153 | GAGAATTT | | UGUUUUAGAGCUAGAAAUAGCA | | SpCas9 |
| | | TGGT | | AGUUAAAAUAAGGCUAGUCCGU | | |
| | | | | UAUCAACUUGAAAAAGUGGCAC | | |
| | | | | CGAGUCGGUGCUsususu | | |
| hcPCSK9 | GA156 | GGTGCTAG | 66 | gsgsusGCUAGCCUUGCGUUCC | 253 | SpCas9 |
| | | CCTTGCGT | | GGUUUUAGAGCUAGAAAUAGCA | | |
| | | TCCG | | AGUUAAAAUAAGGCUAGUCCGU | | |
| | | | | UAUCAACUUGAAAAAGUGGCAC | | |
| | | | | CGAGUCGGUGCUsususu | | |
| hcPCSK9 | GA157 | GCCGTCCT | 151 | gscscsGUCCUCCUCGGAACGC | 329 | SpCas9 |
| | | CCTCGGAA | | AGUUUUAGAGCUAGAAAUAGCA | | |
| | | CGCA | | AGUUAAAAUAAGGCUAGUCCGU | | |
| | | | | UAUCAACUUGAAAAAGUGGCAC | | |
| | | | | CGAGUCGGUGCUsususu | | |
| hcPCSK9 | GA158 | GCTAGCCT | 152 | gscsusAGCCUUGCGUUCCGAG | 330 | SpCas9 |
| | | TGCGTTCC | | GGUUUUAGAGCUAGAAAUAGCA | | |
| | | GAGG | | AGUUAAAAUAAGGCUAGUCCGU | | |
| | | | | UAUCAACUUGAAAAAGUGGCAC | | |
| | | | | CGAGUCGGUGCUsususu | | |
| hcPCSK9 | GA159 | GCGTTCCG | 153 | gscsgsUUCCGAGGAGGACGGC | 331 | SpCas9 |
| | | AGGAGGA | | CGUUUUAGAGCUAGAAAUAGCA | | |
| | | CGGCC | | AGUUAAAAUAAGGCUAGUCCGU | | |
| | | | | UAUCAACUUGAAAAAGUGGCAC | | |
| | | | | CGAGUCGGUGCUsususu | | |
| hcPCSK9 | GA160 | GCCTTGCG | 154 | gscscsUUGCGUUCCGAGGAGG | 332 | SpCas9 |
| | | TTCCGAGG | | AGUUUUAGAGCUAGAAAUAGCA | | |
| | | AGGA | | AGUUAAAAUAAGGCUAGUCCGU | | |
| | | | | UAUCAACUUGAAAAAGUGGCAC | | |
| | | | | CGAGUCGGUGCUsususu | | |
| hcPCSK9 | GA161 | GGACGAG | 155 | gsgsasCGAGGACGGCGACUAC | 333 | SpCas9 |
| | | GACGGCG | | GGUUUUAGAGCUAGAAAUAGCA | | |
| | | ACTACG | | AGUUAAAAUAAGGCUAGUCCGU | | |
| | | | | UAUCAACUUGAAAAAGUGGCAC | | |
| | | | | CGAGUCGGUGCUsususu | | |
| hcPCSK9 | GA162 | GGACGGC | 156 | gsgsasCGGCGACUACGAGGAG | 334 | SpCas9 |
| | | GACTACGA | | CGUUUUAGAGCUAGAAAUAGCA | | |
| | | GGAGC | | AGUUAAAAUAAGGCUAGUCCGU | | |
| | | | | UAUCAACUUGAAAAAGUGGCAC | | |
| | | | | CGAGUCGGUGCUsususu | | |
| hcPCSK9 | GA163 | CGTCCTCG | 157 | csgsusCCUCGUCCUCCUGCGC | 335 | SpCas9 |
| | | TCCTCCTG | | AGUUUUAGAGCUAGAAAUAGCA | | |
| | | CGCA | | AGUUAAAAUAAGGCUAGUCCGU | | |
| | | | | UAUCAACUUGAAAAAGUGGCAC | | |
| | | | | CGAGUCGGUGCUsususu | | |
| hcPCSK9 | GA164 | GTCCTCGT | 158 | gsuscsCUCGUCCUCCUGCGCA | 336 | SpCas9 |
| | | CCTCCTGC | | CGUUUUAGAGCUAGAAAUAGCA | | |
| | | GCAC | | AGUUAAAAUAAGGCUAGUCCGU | | |
| | | | | UAUCAACUUGAAAAAGUGGCAC | | |
| | | | | CGAGUCGGUGCUsususu | | |
| hcPCSK9 | GA165 | CCGTCAGC | 159 | cscsgsUCAGCUCCAGGCGGUC | 337 | SpCas9 |
| | | TCCAGGCG | | CGUUUUAGAGCUAGAAAUAGCA | | |
| | | GTCC | | AGUUAAAAUAAGGCUAGUCCGU | | |
| | | | | UAUCAACUUGAAAAAGUGGCAC | | |
| | | | | CGAGUCGGUGCUsususu | | |
| hcPCSK9 | GA166 | CGCCCGTG | 160 | csgscsCCGUGCGCAGGAGGAC | 338 | SpCas9 |
| | | CGCAGGA | | GGUUUUAGAGCUAGAAAUAGCA | | |
| | | GGACG | | AGUUAAAAUAAGGCUAGUCCGU | | |
| | | | | UAUCAACUUGAAAAAGUGGCAC | | |
| | | | | CGAGUCGGUGCUsususu | | |
| hcPCSK9 | GA167 | TCAGCTCC | 161 | uscsasGCUCCAGGCGGUCCUG | 339 | SpCas9 |
| | | AGGCGGTC | | GGUUUUAGAGCUAGAAAUAGCA | | |
| | | CTGG | | AGUUAAAAUAAGGCUAGUCCGU | | |
| | | | | UAUCAACUUGAAAAAGUGGCAC | | |
| | | | | CGAGUCGGUGCUsususu | | |
| hcPCSK9 | GA168 | CTTGGCGC | 162 | csususGGCGCAGCGGUGGAAG | 340 | SpCas9 |
| | | AGCGGTG | | GGUUUUAGAGCUAGAAAUAGCA | | |
| | | GAAGG | | AGUUAAAAUAAGGCUAGUCCGU | | |
| | | | | UAUCAACUUGAAAAAGUGGCAC | | |
| | | | | CGAGUCGGUGCUsususu | | |
| hcPCSK9 | GA169 | CGTGCGCA | 163 | csgsusGCGCAGGAGGACGAGG | 341 | SpCas9 |
| | | GGAGGAC | | AGUUUUAGAGCUAGAAAUAGCA | | |
| | | GAGGA | | AGUUAAAAUAAGGCUAGUCCGU | | |
| | | | | UAUCAACUUGAAAAAGUGGCAC | | |
| | | | | CGAGUCGGUGCUsususu | | |
| hcPCSK9 | GA170 | CCAGGACC | 164 | cscsasGGACCGCCUGGAGCUG | 342 | SpCas9 |
| | | GCCTGGAG | | AGUUUUAGAGCUAGAAAUAGCA | | |
| | | CTGA | | AGUUAAAAUAAGGCUAGUCCGU | | |
| | | | | UAUCAACUUGAAAAAGUGGCAC | | |
| | | | | CGAGUCGGUGCUsususu | | |
| hcPCSK9 | GA171 | TCTTGGTG | 165 | uscsusUGGUGAGGUAUCCCCG | 343 | SpCas9 |
| | | AGGTATCC | | GUUUUAGAGCUAGAAAUAGCAG | | |
| | | CCGG | | AGUUAAAAUAAGGCUAGUCCGU | | |
| | | | | UAUCAACUUGAAAAAGUGGCAC | | |
| | | | | CGAGUCGGUGCUsususu | | |
| hcPCSK9 | GA172 | CAGTGCGC | 166 | csasgsUGCGCUCUGACUGCGA | 344 | SpCas9 |
| | | TCTGACTG | | GGUUUUAGAGCUAGAAAUAGCA | | |
| | | CGAG | | AGUUAAAAUAAGGCUAGUCCGU | | |
| | | | | UAUCAACUUGAAAAAGUGGCAC | | |
| | | | | CGAGUCGGUGCUsususu | | |
| hcPCSK9 | GA173 | CTTGGTGA | 167 | csususGGUGAGGUAUCCCCGG | 345 | SpCas9 |
| | | GGTATCCC | | CGUUUUAGAGCUAGAAAUAGCA | | |
| | | CGGC | | AGUUAAAAUAAGGCUAGUCCGU | | |
| | | | | UAUCAACUUGAAAAAGUGGCAC | | |
| | | | | CGAGUCGGUGCUsususu | | |
| hcPCSK9 | GA174 | GGATCTTG | 168 | gsgsasUCUUGGUGAGGUAUCC | 346 | SpCas9 |
| | | GTGAGGTA | | CGUUUUAGAGCUAGAAAUAGCA | | |
| | | TCCC | | AGUUAAAAUAAGGCUAGUCCGU | | |
| | | | | UAUCAACUUGAAAAAGUGGCAC | | |
| | | | | CGAGUCGGUGCUsususu | | |
| hcPCSK9 | GA175 | GAAGATG | 169 | gsasasGAUGAGUGGCGACCUG | 347 | SpCas9 |
| | | AGTGGCG | | CGUUUUAGAGCUAGAAAUAGCA | | |
| | | ACCTGC | | AGUUAAAAUAAGGCUAGUCCGU | | |
| | | | | UAUCAACUUGAAAAAGUGGCAC | | |
| | | | | CGAGUCGGUGCUsususu | | |
| hcPCSK9 | GA176 | AGCACCAC | 170 | asgscsACCACCACGUAGGUGC | 348 | SpCas9 |
| | | CACGTAGG | | CGUUUUAGAGCUAGAAAUAGCA | | |
| | | TGCC | | AGUUAAAAUAAGGCUAGUCCGU | | |
| | | | | UAUCAACUUGAAAAAGUGGCAC | | |
| | | | | CGAGUCGGUGCUsususu | | |
| hcPCSK9 | GA177 | GGTCGCCA | 171 | gsgsusCGCCACUCAUCUUCAC | 349 | SpCas9 |
| | | CTCATCTT | | CGUUUUAGAGCUAGAAAUAGCA | | |
| | | CACC | | AGUUAAAAUAAGGCUAGUCCGU | | |
| | | | | UAUCAACUUGAAAAAGUGGCAC | | |
| | | | | CGAGUCGGUGCUsususu | | |
| hcPCSK9 | GA178 | CTCCTTCA | 172 | csuscsCUUCAGCACCACCACG | 350 | SpCas9 |
| | | GCACCACC | | UGUUUUAGAGCUAGAAAUAGCA | | |
| | | ACGT | | AGUUAAAAUAAGGCUAGUCCGU | | |
| | | | | UAUCAACUUGAAAAAGUGGCAC | | |
| | | | | CGAGUCGGUGCUsususu | | |
| hcPCSK9 | GA179 | GAGTGGGC | 173 | gsasgsUGGCGACCUGCUGGAG | 351 | SpCas9 |
| | | ACCTGCTG | | CGUUUUAGAGCUAGAAAUAGCA | | |
| | | GAGC | | AGUUAAAAUAAGGCUAGUCCGU | | |
| | | | | UAUCAACUUGAAAAAGUGGCAC | | |
| | | | | CGAGUCGGUGCUsususu | | |
| hcPCSK9 | GA180 | GCGCACTG | 174 | gscsgsCACUGCCCGCCGCCUG | 352 | SpCas9 |
| | | CCCGCCGC | | CGUUUUAGAGCUAGAAAUAGCA | | |
| | | CTGC | | AGUUAAAAUAAGGCUAGUCCGU | | |
| | | | | UAUCAACUUGAAAAAGUGGCAC | | |
| | | | | CGAGUCGGUGCUsususu | | |
| hcPCSK9 | GA181 | GGCTTCCT | 175 | gsgscsUUCCUGGUGAAGAUGA | 353 | SpCas9 |
| | | GGTGAAGA | | GGUUUUAGAGCUAGAAAUAGCA | | |
| | | TGAG | | AGUUAAAAUAAGGCUAGUCCGU | | |
| | | | | UAUCAACUUGAAAAAGUGGCAC | | |
| | | | | CGAGUCGGUGCUsususu | | |
| hcPCSK9 | GA182 | CACCTACG | 176 | csascsCUACGUGGUGGUGCUG | 354 | SpCas9 |
| | | TGGTGGTG | | AGUUUUAGAGCUAGAAAUAGCA | | |
| | | CTGA | | AGUUAAAAUAAGGCUAGUCCGU | | |
| | | | | UAUCAACUUGAAAAAGUGGCAC | | |
| | | | | CGAGUCGGUGCUsususu | | |
| hcPCSK9 | GA183 | CTACGTGG | 177 | csusasCGUGGUGGUGCUGAAG | 355 | SpCas9 |
| | | TGGTGCTG | | GGUUUUAGAGCUAGAAAUAGCA | | |
| | | AAGG | | AGUUAAAAUAAGGCUAGUCCGU | | |
| | | | | UAUCAACUUGAAAAAGUGGCAC | | |
| | | | | CGAGUCGGUGCUsususu | | |
| hcPCSK9 | GA184 | ATGGAAGA | 178 | asusgsGAAGACAUGCAGGAUC | 356 | SpCas9 |
| | | CATGCAGG | | UGUUUUAGAGCUAGAAAUAGCA | | |
| | | ATCT | | AGUUAAAAUAAGGCUAGUCCGU | | |
| | | | | UAUCAACUUGAAAAAGUGGCAC | | |
| | | | | CGAGUCGGUGCUsususu | | |
| hcPCSK9 | GA185 | AGACATGC | 179 | asgsasCAUGCAGGAUCUUGGU | 357 | SpCas9 |
| | | AGGATCTT | | GGUUUUAGAGCUAGAAAUAGCA | | |
| | | GGTG | | AGUUAAAAUAAGGCUAGUCCGU | | |
| | | | | UAUCAACUUGAAAAAGUGGCAC | | |
| | | | | CGAGUCGGUGCUsususu | | |
| hcPCSK9 | GA186 | CTCATCTT | 180 | csuscsAUCUUCACCAGGAAGC | 358 | SpCas9 |
| | | CACCAGGA | | CGUUUUAGAGCUAGAAAUAGCA | | |
| | | AGCC | | AGUUAAAAUAAGGCUAGUCCGU | | |
| | | | | UAUCAACUUGAAAAAGUGGCAC | | |
| | | | | CGAGUCGGUGCUsususu | | |
| hcPCSK9 | GA187 | CTCCTCGA | 181 | csuscsCUCGAUGUAGUCGACA | 359 | SpCas9 |
| | | TGTAGTCG | | UGUUUUAGAGCUAGAAAUAGCA | | |
| | | ACAT | | AGUUAAAAUAAGGCUAGUCCGU | | |
| | | | | UAUCAACUUGAAAAAGUGGCAC | | |
| | | | | CGAGUCGGUGCUsususu | | |
| hcPCSK9 | GA188 | TATTCATC | 182 | usasusUCAUCCGCCCGGUACC | 360 | SpCas9 |
| | | CGCCCGGT | | GGUUUUAGAGCUAGAAAUAGCA | | |
| | | ACCG | | AGUUAAAAUAAGGCUAGUCCGU | | |
| | | | | UAUCAACUUGAAAAAGUGGCAC | | |
| | | | | CGAGUCGGUGCUsususu | | |
| hcPCSK9 | GA189 | TCCTCGAT | 183 | uscscsUCGAUGUAGUCGACAU | 361 | SpCas9 |
| | | GTAGTCGA | | GGUUUUAGAGCUAGAAAUAGCA | | |
| | | CATG | | AGUUAAAAUAAGGCUAGUCCGU | | |
| | | | | UAUCAACUUGAAAAAGUGGCAC | | |
| | | | | CGAGUCGGUGCUsususu | | |
| hcPCSK9 | GA190 | CCTCCTCG | 184 | cscsusCCUCGAUGUAGUCGAC | 362 | SpCas9 |
| | | ATGTAGTC | | AGUUUUAGAGCUAGAAAUAGCA | | |
| | | GACA | | AGUUAAAAUAAGGCUAGUCCGU | | |
| | | | | UAUCAACUUGAAAAAGUGGCAC | | |
| | | | | CGAGUCGGUGCUsususu | | |
| hcPCSK9 | GA191 | GCCCCATG | 185 | gscscsCCAUGUCGACUACAUC | 363 | SpCas9 |
| | | TCGACTAC | | GGUUUUAGAGCUAGAAAUAGCA | | |
| | | ATCG | | AGUUAAAAUAAGGCUAGUCCGU | | |
| | | | | UAUCAACUUGAAAAAGUGGCAC | | |
| | | | | CGAGUCGGUGCUsususu | | |
| hcPCSK9 | GA192 | CCATGTCG | 186 | cscsasUGUCGACUACAUCGAG | 364 | SpCas9 |
| | | ACTACATC | | GGUUUUAGAGCUAGAAAUAGCA | | |
| | | GAGG | | AGUUAAAAUAAGGCUAGUCCGU | | |
| | | | | UAUCAACUUGAAAAAGUGGCAC | | |
| | | | | CGAGUCGGUGCUsususu | | |
| hcPCSK9 | GA193 | GGGGCTGG | 187 | gsgsgsGCUGGUAUUCAUCCGC | 365 | SpCas9 |
| | | TATTCATC | | CGUUUUAGAGCUAGAAAUAGCA | | |
| | | CGCC | | AGUUAAAAUAAGGCUAGUCCGU | | |
| | | | | UAUCAACUUGAAAAAGUGGCAC | | |
| | | | | CGAGUCGGUGCUsususu | | |
| hcPCSK9 | GA194 | GTCGACAT | 188 | gsuscsGACAUGGGGCAACUUC | 366 | SpCas9 |
| | | GGGGCAAC | | AGUUUUAGAGCUAGAAAUAGCA | | |
| | | TTCA | | AGUUAAAAUAAGGCUAGUCCGU | | |
| | | | | UAUCAACUUGAAAAAGUGGCAC | | |
| | | | | CGAGUCGGUGCUsususu | | |
| hcPCSK9 | GA195 | ACCACCGG | 189 | ascscsACCGGGAAAUCGAGGG | 367 | SpCas9 |
| | | GAAATCGA | | CGUUUUAGAGCUAGAAAUAGCA | | |
| | | GGGC | | AGUUAAAAUAAGGCUAGUCCGU | | |
| | | | | UAUCAACUUGAAAAAGUGGCAC | | |
| | | | | CGAGUCGGUGCUsususu | | |
| hcPCSK9 | GA196 | GAGTGACC | 190 | gsasgsUGACCACCGGGAAAUC | 368 | SpCas9 |
| | | ACCGGGAA | | GGUUUUAGAGCUAGAAAUAGCA | | |
| | | ATCG | | AGUUAAAAUAAGGCUAGUCCGU | | |
| | | | | UAUCAACUUGAAAAAGUGGCAC | | |
| | | | | CGAGUCGGUGCUsususu | | |
| hcPCSK9 | GA197 | AGTGACCA | 191 | asgsusGACCACCGGGAAAUCG | 369 | SpCas9 |
| | | CCGGGAAA | | AGUUUUAGAGCUAGAAAUAGCA | | |
| | | TCGA | | AGUUAAAAUAAGGCUAGUCCGU | | |
| | | | | UAUCAACUUGAAAAAGUGGCAC | | |
| | | | | CGAGUCGGUGCUsususu | | |
| hcPCSK9 | GA198 | CCACCGGG | 192 | cscsasCCGGGAAAUCGAGGGC | 370 | SpCas9 |
| | | AAATCGAG | | AGUUUUAGAGCUAGAAAUAGCA | | |
| | | GGCA | | AGUUAAAAUAAGGCUAGUCCGU | | |
| | | | | UAUCAACUUGAAAAAGUGGCAC | | |
| | | | | CGAGUCGGUGCUsususu | | |
| hcPCSK9 | GA199 | GAAGCGGG | 193 | gsasasGCGGGUCCCGUCCUCC | 371 | SpCas9 |
| | | TCCCGTCC | | UGUUUUAGAGCUAGAAAUAGCA | | |
| | | TCCT | | AGUUAAAAUAAGGCUAGUCCGU | | |
| | | | | UAUCAACUUGAAAAAGUGGCAC | | |
| | | | | CGAGUCGGUGCUsususu | | |
| hcPCSK9 | GA200 | CTAGGAGA | 194 | csusasGGAGAUACACCUCCAC | 372 | SpCas9 |
| | | TACACCTC | | CGUUUUAGAGCUAGAAAUAGCA | | |
| | | CACC | | AGUUAAAAUAAGGCUAGUCCGU | | |
| | | | | UAUCAACUUGAAAAAGUGGCAC | | |
| | | | | CGAGUCGGUGCUsususu | | |
| hcPCSK9 | GA201 | CAGCATAC | 195 | csasgsCAUACAGAGUGACCAC | 373 | SpCas9 |
| | | AGAGTGAC | | CGUUUUAGAGCUAGAAAUAGCA | | |
| | | CACC | | AGUUAAAAUAAGGCUAGUCCGU | | |
| | | | | UAUCAACUUGAAAAAGUGGCAC | | |
| | | | | CGAGUCGGUGCUsususu | | |
| hcPCSK9 | GA202 | AAGCGGGT | 196 | asasgsCGGGUCCCGUCCUCCU | 374 | SpCas9 |
| | | CCCGTCCT | | CGUUUUAGAGCUAGAAAUAGCA | | |
| | | CCTC | | AGUUAAAAUAAGGCUAGUCCGU | | |
| | | | | UAUCAACUUGAAAAAGUGGCAC | | |
| | | | | CGAGUCGGUGCUsususu | | |
| hcPCSK9 | GA203 | TGACCCTG | 197 | usgsasCCCUGCCCUCGAUUUC | 375 | SpCas9 |
| | | CCCTCGAT | | CGUUUUAGAGCUAGAAAUAGCA | | |
| | | TTCC | | AGUUAAAAUAAGGCUAGUCCGU | | |
| | | | | UAUCAACUUGAAAAAGUGGCAC | | |
| | | | | CGAGUCGGUGCUsususu | | |
| hcPCSK9 | GA204 | CACTCTGT | 198 | csascsUCUGUAUGCUGGUGUC | 376 | SpCas9 |
| | | ATGCTGGT | | UGUUUUAGAGCUAGAAAUAGCA | | |
| | | GTCT | | AGUUAAAAUAAGGCUAGUCCGU | | |
| | | | | UAUCAACUUGAAAAAGUGGCAC | | |
| | | | | CGAGUCGGUGCUsususu | | |
| hcPCSK9 | GA205 | CCCTGCCC | 199 | cscscsUGCCCUCGAUUUCCCG | 377 | SpCas9 |
| | | TCGATTTC | | GGUUUUAGAGCUAGAAAUAGCA | | |
| | | CCGG | | AGUUAAAAUAAGGCUAGUCCGU | | |
| | | | | UAUCAACUUGAAAAAGUGGCAC | | |
| | | | | CGAGUCGGUGCUsususu | | |
| hcPCSK9 | GA206 | CCGGTGGT | 200 | cscsgsGUGGUCACUCUGUAUG | 378 | SpCas9 |
| | | CACTCTGT | | CGUUUUAGAGCUAGAAAUAGCA | | |
| | | ATGC | | AGUUAAAAUAAGGCUAGUCCGU | | |
| | | | | UAUCAACUUGAAAAAGUGGCAC | | |
| | | | | CGAGUCGGUGCUsususu | | |
| hcPCSK9 | GA207 | GGAAATCG | 201 | gsgsasAAUCGAGGGCAGGGUC | 379 | SpCas9 |
| | | AGGGCAGG | | AGUUUUAGAGCUAGAAAUAGCA | | |
| | | GTCA | | AGUUAAAAUAAGGCUAGUCCGU | | |
| | | | | UAUCAACUUGAAAAAGUGGCAC | | |
| | | | | CGAGUCGGUGCUsususu | | |
| hcPCSK9 | GA208 | CCAGCATA | 202 | cscsasGCAUACAGAGUGACCA | 380 | SpCas9 |
| | | CAGAGTGA | | CGUUUUAGAGCUAGAAAUAGCA | | |
| | | CCAC | | AGUUAAAAUAAGGCUAGUCCGU | | |
| | | | | UAUCAACUUGAAAAAGUGGCAC | | |
| | | | | CGAGUCGGUGCUsususu | | |
| hcPCSK9 | GA209 | CTTGGCAG | 203 | csususGGCAGUUGAGCACGCG | 381 | SpCas9 |
| | | TTGAGCAC | | CGUUUUAGAGCUAGAAAUAGCA | | |
| | | GCGC | | AGUUAAAAUAAGGCUAGUCCGU | | |
| | | | | UAUCAACUUGAAAAAGUGGCAC | | |
| | | | | CGAGUCGGUGCUsususu | | |
| hcPCSK9 | GA210 | CTGCGCGT | 204 | csusgsCGCGUGCUCAACUGCC | 382 | SpCas9 |
| | | GCTCAACT | | AGUUUUAGAGCUAGAAAUAGCA | | |
| | | GCCA | | AGUUAAAAUAAGGCUAGUCCGU | | |
| | | | | UAUCAACUUGAAAAAGUGGCAC | | |
| | | | | CGAGUCGGUGCUsususu | | |
| hcPCSK9 | GA211 | TGCGCGTG | 205 | usgscsGCGUGCUCAACUGCCA | 383 | SpCas9 |
| | | CTCAACTG | | AGUUUUAGAGCUAGAAAUAGCA | | |
| | | CCAA | | AGUUAAAAUAAGGCUAGUCCGU | | |
| | | | | UAUCAACUUGAAAAAGUGGCAC | | |
| | | | | CGAGUCGGUGCUsususu | | |
| hcPCSK9 | GA212 | CGGGATGC | 206 | csgsgsGAUGCCGGCGUGGCCA | 384 | SpCas9 |
| | | CGGCGTGG | | AGUUUUAGAGCUAGAAAUAGCA | | |
| | | CCAA | | AGUUAAAAUAAGGCUAGUCCGU | | |
| | | | | UAUCAACUUGAAAAAGUGGCAC | | |
| | | | | CGAGUCGGUGCUsususu | | |
| hcPCSK9 | GA213 | CGTGCTCA | 207 | csgsusGCUCAACUGCCAAGGG | 385 | SpCas9 |
| | | ACTGCCAA | | AGUUUUAGAGCUAGAAAUAGCA | | |
| | | GGGA | | AGUUAAAAUAAGGCUAGUCCGU | | |
| | | | | UAUCAACUUGAAAAAGUGGCAC | | |
| | | | | CGAGUCGGUGCUsususu | | |
| hcPCSK9 | GA214 | CCTTGGCC | 208 | cscsusUGGCCACGCCGGCAUC | 386 | SpCas9 |
| | | ACGCCGGC | | CGUUUUAGAGCUAGAAAUAGCA | | |
| | | ATCC | | AGUUAAAAUAAGGCUAGUCCGU | | |
| | | | | UAUCAACUUGAAAAAGUGGCAC | | |
| | | | | CGAGUCGGUGCUsususu | | |
| hcPCSK9 | GA215 | CAGCGGCC | 209 | csasgsCGGCCGGGAUGCCGGC | 387 | SpCas9 |
| | | GGGATGCC | | GGUUUUAGAGCUAGAAAUAGCA | | |
| | | GGCG | | AGUUAAAAUAAGGCUAGUCCGU | | |
| | | | | UAUCAACUUGAAAAAGUGGCAC | | |
| | | | | CGAGUCGGUGCUsususu | | |
| hcPCSK9 | GA216 | CCGGGATG | 210 | cscsgsGGAUGCCGGCGUGGCC | 388 | SpCas9 |
| | | CCGGCGTG | | AGUUUUAGAGCUAGAAAUAGCA | | |
| | | GCCA | | AGUUAAAAUAAGGCUAGUCCGU | | |
| | | | | UAUCAACUUGAAAAAGUGGCAC | | |
| | | | | CGAGUCGGUGCUsususu | | |
| hcPCSK9 | GA217 | GTGGTCAG | 211 | gsusgsGUCAGCGGCCGGGAUG | 389 | SpCas9 |
| | | CGGCCGGG | | CGUUUUAGAGCUAGAAAUAGCA | | |
| | | ATGC | | AGUUAAAAUAAGGCUAGUCCGU | | |
| | | | | UAUCAACUUGAAAAAGUGGCAC | | |
| | | | | CGAGUCGGUGCUsususu | | |
| hcPCSK9 | GA218 | CGCTGACC | 212 | csgscsUGACCACCCCUGCCAG | 390 | SpCas9 |
| | | ACCCCTGC | | GGUUUUAGAGCUAGAAAUAGCA | | |
| | | CAGG | | AGUUAAAAUAAGGCUAGUCCGU | | |
| | | | | UAUCAACUUGAAAAAGUGGCAC | | |
| | | | | CGAGUCGGUGCUsususu | | |
| hcPCSK9 | GA219 | GGCAGGGG | 213 | gsgscsAGGGGUGGUCAGCGGC | 391 | SpCas9 |
| | | TGGTCAGC | | GUUUUAGAGCUAGAAAUAGCAC | | |
| | | GGCC | | AGUUAAAAUAAGGCUAGUCCGU | | |
| | | | | UAUCAACUUGAAAAAGUGGCAC | | |
| | | | | CGAGUCGGUGCUsususu | | |
| hcPCSK9 | GA220 | GTGCTCAA | 214 | gsusgsCUCAACUGCCAAGGGA | 392 | SpCas9 |
| | | CTGCCAAG | | AGUUUUAGAGCUAGAAAUAGCA | | |
| | | GGAA | | AGUUAAAAUAAGGCUAGUCCGU | | |
| | | | | UAUCAACUUGAAAAAGUGGCAC | | |
| | | | | CGAGUCGGUGCUsususu | | |
| hPCSK9 | GA221 | TCATGGCA | 215 | uscsasUGGCACCCACCUGGCA | 393 | SpCas9 |
| | | CCCACCTG | | GGUUUUAGAGCUAGAAAUAGCA | | |
| | | GCAG | | AGUUAAAAUAAGGCUAGUCCGU | | |
| | | | | UAUCAACUUGAAAAAGUGGCAC | | |
| | | | | CGAGUCGGUGCUsususu | | |
| hcPCSK9 | GA222 | TGGCAGGG | 216 | usgsgsCAGGGGUGGUCAGCGG | 394 | SpCas9 |
| | | GTGGTCAG | | CGUUUUAGAGCUAGAAAUAGCA | | |
| | | CGGC | | AGUUAAAAUAAGGCUAGUCCGU | | |
| | | | | UAUCAACUUGAAAAAGUGGCAC | | |
| | | | | CGAGUCGGUGCUsususu | | |
| hcPCSK9 | GA223 | GCTGACCA | 217 | gscsusGACCACCCCUGCCAGG | 395 | SpCas9 |
| | | CCCCTGCC | | UGUUUUAGAGCUAGAAAUAGCA | | |
| | | AGGT | | AGUUAAAAUAAGGCUAGUCCGU | | |
| | | | | UAUCAACUUGAAAAAGUGGCAC | | |
| | | | | CGAGUCGGUGCUsususu | | |
| hcPCSK9 | GA224 | GGCCGCTG | 218 | gsgscsCGCUGACCACCCCUGC | 396 | SpCas9 |
| | | ACCACCCC | | CGUUUUAGAGCUAGAAAUAGCA | | |
| | | TGCC | | AGUUAAAAUAAGGCUAGUCCGU | | |
| | | | | UAUCAACUUGAAAAAGUGGCAC | | |
| | | | | CGAGUCGGUGCUsususu | | |
| hcPCSK9 | GA225 | GGCATCGT | 219 | gsgscsAUCGUCCCGGAAGUUG | 397 | SpCas9 |
| | | CCCGGAAG | | CGUUUUAGAGCUAGAAAUAGCA | | |
| | | TTGC | | AGUUAAAAUAAGGCUAGUCCGU | | |
| | | | | UAUCAACUUGAAAAAGUGGCAC | | |
| | | | | CGAGUCGGUGCUsususu | | |
| hcPCSK9 | GA226 | GGCTTTTC | 220 | gsgscsUUUUCCGAAUAAACUC | 398 | SpCas9 |
| | | CGAATAAA | | CGUUUUAGAGCUAGAAAUAGCA | | |
| | | CTCC | | AGUUAAAAUAAGGCUAGUCCGU | | |
| | | | | UAUCAACUUGAAAAAGUGGCAC | | |
| | | | | CGAGUCGGUGCUsususu | | |
| hcPCSK9 | GA227 | GTCCCGGA | 221 | gsuscsCCGGAAGUUGCCGGCA | 399 | SpCas9 |
| | | AGTTGCCG | | GGUUUUAGAGCUAGAAAUAGCA | | |
| | | GCAG | | AGUUAAAAUAAGGCUAGUCCGU | | |
| | | | | UAUCAACUUGAAAAAGUGGCAC | | |
| | | | | CGAGUCGGUGCUsususu | | |
| hcPCSK9 | GA228 | CGGCTGTA | 222 | csgsgsCUGUACCCACCCGCCA | 400 | SpCas9 |
| | | CCCACCCG | | GGUUUUAGAGCUAGAAAUAGCA | | |
| | | CCAG | | AGUUAAAAUAAGGCUAGUCCGU | | |
| | | | | UAUCAACUUGAAAAAGUGGCAC | | |
| | | | | CGAGUCGGUGCUsususu | | |
| hcPCSK9 | GA229 | GTCGTGCT | 223 | gsuscsGUGCUGGUCACCGCUG | 401 | SpCas9 |
| | | GGTCACCG | | CGUUUUAGAGCUAGAAAUAGCA | | |
| | | CTGC | | AGUUAAAAUAAGGCUAGUCCGU | | |
| | | | | UAUCAACUUGAAAAAGUGGCAC | | |
| | | | | CGAGUCGGUGCUsususu | | |
| hcPCSK9 | GA230 | AGTAGAGG | 224 | asgsusAGAGGCAGGCAUCGUC | 402 | SpCas9 |
| | | CAGGCATC | | CGUUUUAGAGCUAGAAAUAGCA | | |
| | | GTCC | | AGUUAAAAUAAGGCUAGUCCGU | | |
| | | | | UAUCAACUUGAAAAAGUGGCAC | | |
| | | | | CGAGUCGGUGCUsususu | | |
| hcPCSK9 | GA231 | TCCGAATA | 225 | uscscsGAAUAAACUCCAGGCC | 403 | SpCas9 |
| | | AACTCCAG | | UGUUUUAGAGCUAGAAAUAGCA | | |
| | | GCCT | | AGUUAAAAUAAGGCUAGUCCGU | | |
| | | | | UAUCAACUUGAAAAAGUGGCAC | | |
| | | | | CGAGUCGGUGCUsususu | | |
| hcPCSK9 | GA232 | GTTTATTC | 226 | gsususUAUUCGGAAAAGCCAG | 404 | SpCas9 |
| | | GGAAAAGC | | CGUUUUAGAGCUAGAAAUAGCA | | |
| | | CAGC | | AGUUAAAAUAAGGCUAGUCCGU | | |
| | | | | UAUCAACUUGAAAAAGUGGCAC | | |
| | | | | CGAGUCGGUGCUsususu | | |
| hPCSK9 | GA233 | GCGGCTGT | 227 | gscsgsGCUGUACCCACCCGCC | 405 | SpCas9 |
| | | ACCCACCC | | AGUUUUAGAGCUAGAAAUAGCA | | |
| | | GCCA | | AGUUAAAAUAAGGCUAGUCCGU | | |
| | | | | UAUCAACUUGAAAAAGUGGCAC | | |
| | | | | CGAGUCGGUGCUsususu | | |
| hcPCSK9 | GA235 | CACCGCTG | 228 | csascsCGCUGCCGGCAACUUC | 406 | SpCas9 |
| | | CCGGCAAC | | CGUUUUAGAGCUAGAAAUAGCA | | |
| | | TTCC | | AGUUAAAAUAAGGCUAGUCCGU | | |
| | | | | UAUCAACUUGAAAAAGUGGCAC | | |
| | | | | CGAGUCGGUGCUsususu | | |
| hcPCSK9 | GA236 | AGCCCTCG | 229 | asgscsCCUCGCCAGGCGCUGG | 407 | SpCas9 |
| | | CCAGGCGC | | CGUUUUAGAGCUAGAAAUAGCA | | |
| | | TGGC | | AGUUAAAAUAAGGCUAGUCCGU | | |
| | | | | UAUCAACUUGAAAAAGUGGCAC | | |
| | | | | CGAGUCGGUGCUsususu | | |
| hcPCSK9 | GA237 | CAACGCCG | 230 | csasasCGCCGCCUGCCAGCGC | 408 | SpCas9 |
| | | CCTGCCAG | | CGUUUUAGAGCUAGAAAUAGCA | | |
| | | CGCC | | AGUUAAAAUAAGGCUAGUCCGU | | |
| | | | | UAUCAACUUGAAAAAGUGGCAC | | |
| | | | | CGAGUCGGUGCUsususu | | |
| hcPCSK9 | GA238 | GCACGACC | 231 | gscsasCGACCCCAGCCCUCGC | 409 | SpCas9 |
| | | CCAGCCCT | | CGUUUUAGAGCUAGAAAUAGCA | | |
| | | CGCC | | AGUUAAAAUAAGGCUAGUCCGU | | |
| | | | | UAUCAACUUGAAAAAGUGGCAC | | |
| | | | | CGAGUCGGUGCUsususu | | |
| hcPCSK9 | GA239 | CCGCCTGC | 232 | cscsgsCCUGCCAGCGCCUGGC | 410 | SpCas9 |
| | | CAGCGCCT | | GGUUUUAGAGCUAGAAAUAGCA | | |
| | | GGCG | | AGUUAAAAUAAGGCUAGUCCGU | | |
| | | | | UAUCAACUUGAAAAAGUGGCAC | | |
| | | | | CGAGUCGGUGCUsususu | | |
| hcPCSK9 | GA240 | TGCCAGCG | 233 | usgscsCAGCGCCUGGCGAGGG | 411 | SpCas9 |
| | | CCTGGCGA | | CGUUUUAGAGCUAGAAAUAGCA | | |
| | | GGGC | | AGUUAAAAUAAGGCUAGUCCGU | | |
| | | | | UAUCAACUUGAAAAAGUGGCAC | | |
| | | | | CGAGUCGGUGCUsususu | | |
| hcPCSK9 | GA241 | TGCTGCTG | 234 | usgscsUGCUGCCCCUGGCGGG | 412 | SpCas9 |
| | | CCCCTGGC | | UGUUUUAGAGCUAGAAAUAGCA | | |
| | | GGGT | | AGUUAAAAUAAGGCUAGUCCGU | | |
| | | | | UAUCAACUUGAAAAAGUGGCAC | | |
| | | | | CGAGUCGGUGCUsususu | | |
| hcPCSK9 | GA242 | TCACCGCT | 235 | uscsasCCGCUGCCGGCAACUU | 413 | SpCas9 |
| | | GCCGGCA | | CGUUUUAGAGCUAGAAAUAGCA | | |
| | | ACTTC | | AGUUAAAAUAAGGCUAGUCCGU | | |
| | | | | UAUCAACUUGAAAAAGUGGCAC | | |
| | | | | CGAGUCGGUGCUsususu | | |
| hcPCSK9 | GA243 | GGCGAGGG | 236 | gsgscsGAGGGCUGGGGUCGUG | 414 | SpCas9 |
| | | CTGGGGTC | | CGUUUUAGAGCUAGAAAUAGCA | | |
| | | GTGC | | AGUUAAAAUAAGGCUAGUCCGU | | |
| | | | | UAUCAACUUGAAAAAGUGGCAC | | |
| | | | | CGAGUCGGUGCUsususu | | |
| hcPCSK9 | GA244 | TTCCGAAT | 237 | ususcsCGAAUAAACUCCAGGC | 415 | SpCas9 |
| | | AAACTCCA | | CGUUUUAGAGCUAGAAAUAGCA | | |
| | | GGCC | | AGUUAAAAUAAGGCUAGUCCGU | | |
| | | | | UAUCAACUUGAAAAAGUGGCAC | | |
| | | | | CGAGUCGGUGCUsususu | | |
| hcPCSK9 | GA245 | GTGCTGCT | 238 | gsusgsCUGCUGCCCCUGGCGG | 416 | SpCas9 |
| | | GCCCCTGG | | GGUUUUAGAGCUAGAAAUAGCA | | |
| | | CGGG | | AGUUAAAAUAAGGCUAGUCCGU | | |
| | | | | UAUCAACUUGAAAAAGUGGCAC | | |
| | | | | CGAGUCGGUGCUsususu | | |
| hcPCSK9 | GA246 | GCCAGCGC | 239 | gscscsAGCGCCUGGCGAGGGC | 417 | SpCas9 |
| | | CTGGCGAG | | UGUUUUAGAGCUAGAAAUAGCA | | |
| | | GGCT | | AGUUAAAAUAAGGCUAGUCCGU | | |
| | | | | UAUCAACUUGAAAAAGUGGCAC | | |
| | | | | CGAGUCGGUGCUsususu | | |
| hcPCSK9 | GA247 | CCTCGCCA | 240 | cscsusCGCCAGGCGCUGGCAG | 418 | SpCas9 |
| | | GGCGCTGG | | GGUUUUAGAGCUAGAAAUAGCA | | |
| | | CAGG | | AGUUAAAAUAAGGCUAGUCCGU | | |
| | | | | UAUCAACUUGAAAAAGUGGCAC | | |
| | | | | CGAGUCGGUGCUsususu | | |
| hcPCSK9 | GA248 | GGTGCTAG | 66 | gsgsusG(cPACE)UAGCCUUG | 419 | SpCas9 |
| | | CCTTGCGT | | CGUUCCGGUUUUAGAgcuagaa | | |
| | | TCCG | | auagcAAGUUAAAAUAAGGCUA | | |
| | | | | GUCCGUUAUCAacuugaaaaag | | |
| | | | | uggcaccgagucggugcususu | | |
| | | | | su | | |
| hcPCSK9 | GA249 | GGTGCTAG | 66 | gsgsusGCUAGCC(uPACE)UG | 420 | SpCas9 |
| | | CCTTGCGT | | CGUUCCGGUUUUAGAgcuagaa | | |
| | | TCCG | | auagcAAGUUAAAAUAAGGCUA | | |
| | | | | GUCCGUUAUCAacuugaaaaag | | |
| | | | | uggcaccgagucggugcususu | | |
| | | | | su | | |
| hcPCSK9 | GA250 | GGTGCTAG | 66 | gsgsusGcUAGCCUUGCGUUCC | 253 | SpCas9 |
| | | CCTTGCGT | | GGUUUUAGAgcuagaaauagcA | | |
| | | TCCG | | AGUUAAAAUAAGGCUAGUCCGU | | |
| | | | | UAUCAacuugaaaaaguggcac | | |
| | | | | cgagucggugcusususu | | |
| hcPCSK9 | GA251 | GGTGCTAG | 66 | gsgsusGCUAGCCuUGCGUUCC | 253 | SpCas9 |
| | | CCTTGCGT | | GGUUUUAGAgcuagaaauagcA | | |
| | | TCCG | | AGUUAAAAUAAGGCUAGUCCGU | | |
| | | | | UAUCAacuugaaaaaguggcac | | |
| | | | | cgagucggugcusususu | | |
| hcPCSK9 | GA253 | GGTGCTAG | 66 | gsgsusG(cPACE)UAGCCUUG | 419 | SpCas9 |
| | | CCTTGCGT | | CGUUCCGgUUUUAGagcuagaa | | |
| | | TCCG | | auagcaaGUUaAaAuAaggcua | | |
| | | | | GUccGUUAucAAcuugaaaaag | | |
| | | | | ugGcaccgagucggugcususu | | |
| | | | | su | | |
| hcPCSK9 | GA254 | GGTGCTAG | 66 | gsgsusGCUAGCC(uPACE)UG | 420 | SpCas9 |
| | | CCTTGCGT | | CGUUCCGgUUUUAGagcuagaa | | |
| | | TCCG | | auagcaaGUUaAaAuAaggcua | | |
| | | | | GUccGUUAucAAcuugaaaaag | | |
| | | | | ugGcaccgagucggugcususu | | |
| | | | | su | | |
| mPCSK9 | GA255 | CCCATACC | 69 | cscscsAUACCUUGGAGCAACG | 421 | ABE |
| | | TTGGAGCA | | GgUUUUAGagcuaGaaauagca | | |
| | | ACGG | | aGUUaAaAuAaggCUaGUCcGU | | |
| | | | | UAucAAcuuGaaaaaguGgcac | | |
| | | | | cgAgUCggugcusususu | | |
| mPCSK9 | GA256 | CCCATACC | 69 | cscscsAUACCUUGGAGCAACG | 421 | ABE |
| | | TTGGAGCA | | GgUUUUAGagcuagaaauagca | | |
| | | ACGG | | aGUUaAaAuAaggcuaGUccGU | | |
| | | | | UAucAAcuugaaaaagugGcac | | |
| | | | | cgagucggugcusususu | | |
| mPCSK9 | GA257 | CCCATACC | 69 | cscscsAUACCUUGGAGCAACG | 421 | ABE |
| | | TTGGAGCA | | GgUUUUAGagcuaGaaauagca | | |
| | | ACGG | | aGUUaAaAuAaggcuaGUccGU | | |
| | | | | UAucAAcuuGaaaaagugGcac | | |
| | | | | cgagucggugcusususu | | |
| mANG | GA258 | GAGATACC | 241 | gsasgsAUACCUGAGUAACUUU | 422 | ABE |
| PTL3 | | TGAGTAAC | | CgUUUUAGagcuaGaaauagca | | |
| | | TTTC | | aGUUaAaAuAaggCUaGUCcGU | | |
| | | | | UAucAAcuuGaaaaaguGgcac | | |
| | | | | cgAgUCggugcusususu | | |
| mANG | GA259 | GAGATACC | 241 | gsasgsAUACCUGAGUAACUUU | 422 | ABE |
| PTL3 | | TGAGTAAC | | CgUUUUAGagcuagaaauagca | | |
| | | TTTC | | aGUUaAaAuAaggcuaGUccGU | | |
| | | | | UAucAAcuugaaaaagugGcac | | |
| | | | | cgagucggugcusususu | | |
| mANG | GA260 | GAGATACC | 241 | gsasgsAUACCUGAGUAACUUU | 422 | ABE |
| PTL3 | | TGAGTAAC | | CgUUUUAGagcuaGaaauagca | | |
| | | TTTC | | aGUUaAaAuAaggcuaGUccGU | | |
| | | | | UAucAAcuuGaaaaagugGcac | | |
| | | | | cgagucggugcusususu | | |
| hcANG | GA276 | ACGTGGGA | 242 | ascsgsUGGGAGAACUACAAAU | 423 | ABE |
| PTL3 | | GAACTACA | | AGUUUUAGAGCUAGAAAUAGCA | | |
| | | AATA | | AGUUAAAAUAAGGCUAGUCCGU | | |
| | | | | UAUCAACUUGAAAAAGUGGCAC | | |
| | | | | CGAGUCGGUGCUsususu | | |
| hcANG | GA277 | CGATGTTG | 243 | csgsasUGUUGAAUUAAUGUCC | 424 | ABE |
| PTL3 | | AATTAATG | | AGUUUUAGAGCUAGAAAUAGCA | | |
| | | TCCA | | AGUUAAAAUAAGGCUAGUCCGU | | |
| | | | | UAUCAACUUGAAAAAGUGGCAC | | |
| | | | | CGAGUCGGUGCUsususu | | |
| hcANG | GA278 | CACAAAAC | 244 | csascsAAAACUUCAAUGAAAC | 425 | ABE |
| PTL3 | | TTCAATGA | | GGUUUUAGAGCUAGAAAUAGCA | | |
| | | AACG | | AGUUAAAAUAAGGCUAGUCCGU | | |
| | | | | UAUCAACUUGAAAAAGUGGCAC | | |
| | | | | CGAGUCGGUGCUsususu | | |
| hcANG | GA279 | TACGAATT | 245 | usascsGAAUUGAGUUGGAAGA | 426 | ABE |
| PTL3 | | GAGTTGGA | | CGUUUUAGAGCUAGAAAUAGCA | | |
| | | AGAC | | AGUUAAAAUAAGGCUAGUCCGU | | |
| | | | | UAUCAACUUGAAAAAGUGGCAC | | |
| | | | | CGAGUCGGUGCUsususu | | |
| hcANG | GA284 | CTATGGAG | 246 | csusasUGGAGUAUAUCUUCUC | 427 | ABE |
| PTL3 | | TATATCTT | | UGUUUUAGAGCUAGAAAUAGCA | | |
| | | CTCT | | AGUUAAAAUAAGGCUAGUCCGU | | |
| | | | | UAUCAACUUGAAAAAGUGGCAC | | |
| | | | | CGAGUCGGUGCUsususu | | |
| hcPCSK9 | GA343 | CCCGCACC | 13 | cscscsGCACCUUGGCGCAGCG | 9 | ABE |
| | | TTGGCGCA | | GGUUUUAGAGCUAGAAAUAGCA | | |
| | | GCGG | | AGUUAAAAUAAGGCUAGUCCGU | | |
| | | | | UAUCAACUUGAAAAAGUGGCAC | | |
| | | | | CGAGUCGGUGCUsususu | | |
| cANG | GA344 | AAGATACC | 14 | asasgsAUACCUGAAUAACUCU | 257 | ABE |
| PTL3 | | TGAATAAC | | CGUUUUAGAGCUAGAAAUAGCA | | |
| | | TCTC | | AGUUAAAAUAAGGCUAGUCCGU | | |
| | | | | UAUCAACUUGAAAAAGUGGCAC | | |
| | | | | CGAGUCGGUGCUsususu | | |
| hcPCSK9 | GA346 | CCCGCACC | 13 | cscscsGCACCUUGGCGCAGCG | 9 | ABE |
| | | TTGGCGCA | | GgUUUUAGagcuaGaaauagca | | |
| | | GCGG | | aGUUaAaAuAaggcuaGUccGU | | |
| | | | | UAucAAcuuGaaaaagugGcac | | |
| | | | | cgagucggugcusususu | | |
| cANG | GA347 | AAGATACC | 14 | asasgsAUACCUGAAUAACUCU | 257 | ABE |
| PTL3 | | TGAATAAC | | CgUUUUAGagcuaGaaauagca | | |
| | | TCTC | | aGUUaAaAuAaggcuaGUccGU | | |
| | | | | UAucAAcuuGaaaaagugGcac | | |
| | | | | cgagucggugcusususu | | |
| mANG | GA349 | GAGATACC | 241 | gsasgsAUACCUGAGUAACUUU | 422 | ABE |
| PTL3 | | TGAGTAAC | | CGUUUUAGAgcuagaaauagcA | | |
| | | TTTC | | AGUUAAAAUAAGGCUAGUCCGU | | |
| | | | | UAUCAacuugaaaaaguggcac | | |
| | | | | cgagucggugcusususu | | |
| mANG | GA353 | GAGATACC | 241 | gsasgsAUACCUGAGUAACUUU | 422 | ABE |
| PTL3 | | TGAGTAAC | | CGUUUUAGAGCUAGAAAUAGCA | | |
| | | TTTC | | AGUUAAAAUAAGGCUAGUCCGU | | |
| | | | | UAUCAACUUGAAAAAGUGGCAC | | |
| | | | | CGAGUCGGUGCUsususu | | |
| hcPCSK9 | GA375 | CCCGCACC | 13 | cscscsGCACCUUGGCGCAGCG | 428 | ABE |
| | | TTGGCGCA | | GgUUUUAGagcuagaaauagca | | |
| | | GCGG | | aGUUaAaAuAaggcuaGUccGU | | |
| | | | | UAacAAcgggaaaccgugGcac | | |
| | | | | cgagucggugcusususu | | |
| hcPCSK9 | GA376 | CCCGCACC | 13 | cscscsdGCdACdCUdUGdGCd | 429 | ABE |
| | | TTGGCGCA | | GCdAGdCGdGgUUUUAGagcua | | |
| | | GCGG | | GaaauagcaaGUUaAaAuAagg | | |
| | | | | cuaGUccGUUAucAAcuuGaaa | | |
| | | | | aagugGcaccgagucggugcus | | |
| | | | | ususu | | |
| hcPCSK9 | GA377 | CCCGCACC | 13 | cscscsGdCAdCCdUUdGGdCG | 430 | ABE |
| | | TTGGCGCA | | dCAdGCdGGgUUUUAGagcuaG | | |
| | | GCGG | | aaauagcaaGUUaAaAuAaggc | | |
| | | | | uaGUccGUUAucAAcuuGaaaa | | |
| | | | | agugGcaccgagucggugcusu | | |
| | | | | susu | | |
| hcPCSK9 | GA380 | CCCGCACC | 13 | cscscsGdCACCUUGGCGdCAG | 431 | ABE |
| | | TTGGCGCA | | CGGgUUUUAGagcuaGaaauag | | |
| | | GCGG | | caaGUUaAaAuAaggcuaGUcc | | |
| | | | | GUUAucAAcuuGaaaaagugGc | | |
| | | | | accgagucggugcusususu | | |
| hcPCSK9 | GA381 | CCCGCACC | 13 | cscscsGCdACCUUGGCGCdAG | 432 | ABE |
| | | TTGGCGCA | | CGGgUUUUAGagcuaGaaauag | | |
| | | GCGG | | caaGUUaAaAuAaggcuaGUcc | | |
| | | | | GUUAucAAcuuGaaaaagugGc | | |
| | | | | accgagucggugcusususu | | |
| hcPCSK9 | GA382 | CCCGCACC | 13 | cscscsGCACCUdUGGdCGCAG | 433 | ABE |
| | | TTGGCGCA | | dCGGgUUUUAGagcuaGaaaua | | |
| | | GCGG | | gcaaGUUaAaAuAaggcuaGUc | | |
| | | | | cGUUAucAAcuuGaaaaagugG | | |
| | | | | caccgagucggugcusususu | | |
| hcPCSK9 | GA383 | CCCGCACC | 13 | cscscsGCACCUUdGGCdGCAG | 434 | ABE |
| | | TTGGCGCA | | CdGGgUUUUAGagcuaGaaaua | | |
| | | GCGG | | gcaaGUUaAaAuAaggcuaGUc | | |
| | | | | cGUUAucAAcuuGaaaaagugG | | |
| | | | | caccgagucggugcusususu | | |
| hcPCSK9 | GA384 | CCCGCACC | 13 | cscscsdGdCdACCdUdUGGdC | 435 | ABE |
| | | TTGGCGCA | | GCAdGCGdGgUUUUAGagcuaG | | |
| | | GCGG | | aaauagcaaGUUaAaAuAaggc | | |
| | | | | uaGUccGUUAucAAcuuGaaaa | | |
| | | | | agugGcaccgagucggugcuSU | | |
| | | | | susu | | |
| hcPCSK9 | GA385 | CCCGCACC | 13 | cscscsGCACCUUGGCGCAGCG | 11 | ABE |
| | | TTGGCGCA | | GgUUUUAGagcuagaaauagca | | |
| | | GCGG | | aGUUaAaAuAaggcuaGUccGU | | |
| | | | | UAucAAcuugaaaaagugGcac | | |
| | | | | cgagucggugcusususuuuu | | |
| hcPCSK9 | GA386 | CCCGCACC | 13 | cscscsGCACCUUGGCGCAGCG | 11 | ABE |
| | | TTGGCGCA | | GgUUUUAGagcuagaaauagca | | |
| | | GCGG | | aGUUaAaAuAaggcuaGUccGU | | |
| | | | | UAucAAcuugaaaaagugGcac | | |
| | | | | cgagucggugcusususuuUu | | |
| hcPCSK9 | GA387 | CCCGCACC | 13 | cscscsGCACCUUGGCGCAGCG | 436 | ABE |
| | | TTGGCGCA | | gUUUUAGagcuaGaaauagcaa | | |
| | | GCGG | | GUUaAaAuAaggcuaGUccGUU | | |
| | | | | AucAAcuuGaaaaagugGcacc | | |
| | | | | gagucggugcuususuuuu | | |
| hcPCSK9 | GA388 | CCCGCACC | 13 | cscscsGCACCUUGGCGCAGCG | 9 | ABE |
| | | TTGGCGCA | | GgUUUUAGagcuagaaauagca | | |
| | | GCGG | | aGUUaAaAuAaggcuaGUCcGU | | |
| | | | | UAucAAcuugaaaaaguggcac | | |
| | | | | cgagucggugcusususu | | |
| hcPCSK9 | GA389 | CCCGCACC | 13 | cscscsGCACCUUGGCGCAGCG | 9 | ABE |
| | | TTGGCGCA | | GgUUUUAGagcuagaaauagca | | |
| | | GCGG | | aGUUaAaAuAaggcuaGuCcGU | | |
| | | | | UaucAAcuugaaaaaguggcac | | |
| | | | | cgagucggugcusususu | | |
| hcPCSK9 | GA391 | CCGCACCT | 247 | cscsGCACCUUGGCGCAGCGGg | 437 | ABE |
| | | TGGCGCAG | | UUUUAGagcuaGaaauagcaaG | | |
| | | CGG | | UUaAaAuAaggcuaGUccGUUA | | |
| | | | | ucAAcuuGaaaaagugGcaccg | | |
| | | | | agucggugcusususu | | |
| hANG | GA441 | AAGATACC | 15 | asasgsAUACCUGAAUAACCCU | 59 | ABE |
| PTL3 | | TGAATAAC | | CgUUUUAGagcuaGaaauagca | | |
| | | CCTC | | aGUUaAaAuAaggcuaGUccGU | | |
| | | | | UAucAAcuuGaaaaagugGcac | | |
| | | | | cgagucggugcusususu | | |
| hANG | GA442 | AAGATACC | 15 | asasgsAUACCUGAAUAACCCU | 438 | ABE |
| PTL3 | | TGAATAAC | | CgUUUUAGagcuaGaaauagca | | |
| | | CCTC | | aGUUaAaAuAaggcuaGUccGU | | |
| | | | | UAucAAcuuGaaaaagugGcac | | |
| | | | | cgagucggugcusususuUUU | | |
| hANG | GA472 | AAGATACC | 15 | asasisAUACCUGAAUAACCCU | 439 | ABE |
| PTL3 | | TGAATAAC | | CgUUUUAGagcuaGaaauagca | | |
| | | CCTC | | aGUUaAaAuAaggcuaGUccGU | | |
| | | | | UAucAAcuuGaaaaagugGcac | | |
| | | | | cgagucggugcusususu | | |
| hANG | GA473 | AAGATACC | 15 | asasisAUACCUIAAUAACCCU | 440 | ABE |
| PTL3 | | TGAATAAC | | CgUUUUAGagcuaGaaauagca | | |
| | | CCTC | | aGUUaAaAuAaggcuaGUccGU | | |
| | | | | UAucAAcuuGaaaaagugGcac | | |
| | | | | cgagucggugcusususu | | |
| hANG | GA474 | AAGATACC | 15 | asasgsAUACCUIAAUAACCCU | 441 | ABE |
| PTL3 | | TGAATAAC | | CgUUUUAGagcuaGaaauagca | | |
| | | CCTC | | aGUUaAaAuAaggcuaGUccGU | | |
| | | | | UAucAAcuuGaaaaagugGcac | | |
| | | | | cgagucggugcusususu | | |
| hANG | GA475 | AGATACCT | 248 | asgsasUACCUGAAUAACCCUC | 442 | ABE |
| PTL3 | | GAATAACC | | gUUUUAGagcuaGaaauagcaa | | |
| | | CTC | | GUUaAaAuAaggcuaGUccGUU | | |
| | | | | AucAAcuuGaaaaagugGcacc | | |
| | | | | gagucggugcusususu | | |
| hANG | GA476 | GATACCTG | 249 | gsasUACCUGAAUAACCCUCgU | 443 | ABE |
| PTL3 | | AATAACCC | | UUUAGagcuaGaaauagcaaGU | | |
| | | TC | | UaAaAuAaggcuaGUccGUUAu | | |
| | | | | cAAcuuGaaaaagugGcaccga | | |
| | | | | gucggugcusususu | | |
| hANG | GA477 | ATACCTGA | 250 | asusACCUGAAUAACCCUCgUU | 444 | ABE |
| PTL3 | | ATAACCCT | | UUAGagcuaGaaauagcaaGUU | | |
| | | C | | aAaAuAaggcuaGUccGUUAuc | | |
| | | | | AAcuuGaaaaagugGcaccgag | | |
| | | | | ucggugcusususu | | |
| hANG | GA547 | AAGATACC | 14 | asasgsAUACCUGAAUAACUCU | 445 | ABE |
| PTL3 | | TGAATAAC | | CgUUUUAGagcuaGaaauagca | | |
| | | TCTC | | aGUUaAaAuAaggcuaGUccGU | | |
| | | | | UAucAAcuuGaaaaaguggcac | | |
| | | | | cgagucggugcusususuUUu | | |
| mPCSK9 | GA0l0 | GGCTGATG | 251 | 5′gsgscsUGAUGAGGCCGCAC | 446 | SpCas9 |
| | | AGGCCGCA | | AUGGUUUUAGAgcuagaaauag | | |
| | | CATG | | cAAGUUAAAAUAAGGCUAGUCC | | |
| | | | | GUUAUCAacuugaaaaaguggc | | |
| | | | | accgagucggugcususus | | |
| | | | | u-3′ | | |
| mPCSK9 | GA0l1 | GGCTGATG | 251 | 5′gsgscsUGAUGAGGCCGCAC | 446 | SpCas9 |
| | | AGGCCGCA | | AUGGUUUUAGAgcuagaaauag | | |
| | | CATG | | cAAGUUAAAAUAAGGCUAGUCC | | |
| | | | | GUUAUCAacuugaaaaaguggc | | |
| | | | | accgagucggugcususus | | |
| | | | | u-3′ | | |
| hcANG | GA0l6 | GGCCTCCT | 107 | 5′gsgscsCUCCUUCAGUUGGG | 285 | SpCas9 |
| PTL3 | | TCAGTTGG | | ACAGUUUUAGAgcuagaaauag | | |
| | | GACA | | cAAGUUAAAAUAAGGCUAGUCC | | |
| | | | | GUUAUCAacuugaaaaaguggc | | |
| | | | | accgagucggugcususus | | |
| | | | | u-3′ | | |
| hcANG | GA0l7 | GCCAATGG | 109 | 5′gscscsAAUGGCCUCCUUCA | 287 | SpCas9 |
| PTL3 | | CCTCCTTC | | GUUGUUUUAGAgcuagaaauag | | |
| | | AGTT | | cAAGUUAAAAUAAGGCUAGUCC | | |
| | | | | GUUAUCAacuugaaaaaguggc | | |
| | | | | accgagucggugcususus | | |
| | | | | u-3′ | | |
| hcPCSK9 | GA395 | TCAGCTCC | 161 | 5′uscsasGCUCCAGGCGGUCC | 447 | SpCas9 |
| | | AGGCGGTC | | UGGgUUUUAGagcuaGaaauag | | |
| | | CTGG | | caaGUUaAaAuAaggcuaGUcc | | |
| | | | | GUUAucAAcuuGaaaaagugGc | | |
| | | | | accgagucggugcusususuuu | | |
| | | | | u-3′ | | |

| | | | | | | |
|---|---|---|---|---|---|---|
| hcPCSK9 | GA396 | TCAGCTCC | 161 | 5′uscsasGCUCCAGGCGGUCC | 448 | SpCas9 |
| | | AGGCGGTC | | UGGgUUUUAGagcuaGaaauag | | |
| | | CTGG | | caaGUUsaAaAuAaggcuaGUc | | |
| | | | | cGUUAucAAcuuGaaaaagugG | | |
| | | | | caccgagucggugcusususuu | | |
| | | | | uu-3′ | | |
| hcPCSK9 | GA397 | TCAGCTCC | 161 | 5′uscsasGCUCCAGGCGGUCC | 449 | SpCas9 |
| | | AGGCGGTC | | UGGgUUUUAGagcuaGaaauag | | |
| | | CTGG | | caaGUUaAaAuAaggcuaGUcc | | |
| | | | | GUUsAucAAcuuGaaaaagugG | | |
| | | | | caccgagucggugcusususuu | | |
| | | | | uu-3′ | | |
| hcPCSK9 | GA398 | TCAGCTCC | 161 | 5′uscsasGCUCCAGGCGGUCC | 447 | SpCas9 |
| | | AGGCGGTC | | UGGgUUUUAGagcuagaaauag | | |
| | | CTGG | | caaGUUaAaAuAaggcuaGUCc | | |
| | | | | GUUAucAAcuugaaaaaguggc | | |
| | | | | accgagucggugcusususuuu | | |
| | | | | u-3′ | | |
| hcPCSK9 | GA399 | TCAGCTCC | 161 | 5′uscsasGCUCCAGGCGGUCC | 447 | SpCas9 |
| | | AGGCGGTC | | UGGgUUUUAGagcuagaaauag | | |
| | | CTGG | | caaGUUaAaAuAaggcuaGuCc | | |
| | | | | GUUaucAAcuugaaaaaguggc | | |
| | | | | accgagucggugcusususuuu | | |
| | | | | u-3′ | | |
| hcPCSK9 | GA400 | TCAGCTCC | 161 | 5′uscsasGCUCCAGGCGGUCC | 447 | SpCas9 |
| | | AGGCGGTC | | UGGgUUUuagagcuagaaauag | | |
| | | CTGG | | caaGUUaAaAuaaggcuaGucc | | |
| | | | | gUUaucaacuugaaaaaguggc | | |
| | | | | accgagucggugcusususuuu | | |
| | | | | u-3′ | | |
| hcPCSK9 | GA401 | TCAGCTCC | 161 | 5′uscsasGCUCCAGGCGGUCC | 447 | SpCas9 |
| | | AGGCGGTC | | UGGgUUUUAGagcuagaaauag | | |
| | | CTGG | | caaGUUaAaAuAaggcuaGUcc | | |
| | | | | GUUAucAAcuugaaaaagugGc | | |
| | | | | accgagucggugcusususuuu | | |
| | | | | u-3′ | | |
| hcPCSK9 | GA402 | TCAGCTCC | 161 | 5′uscsasGCUCCAGGCGGUCC | 447 | SpCas9 |
| | | AGGCGGTC | | UGGgUUUUAGagcuaGaaauag | | |
| | | CTGG | | caaGUUaAaAuAaggcuaGUcc | | |
| | | | | GUUAucAAcuuGaaaaagugGc | | |
| | | | | accgagucggugcusususuuU | | |
| | | | | u-3′ | | |
| hcPCSK9 | GA403 | TCAGCTCC | 161 | 5′uscsasGCUCCAGGCGGUCC | 448 | SpCas9 |
| | | AGGCGGTC | | UGGgUUUUAGagcuaGaaauag | | |
| | | CTGG | | caaGUUsaAaAuAaggcuaGUc | | |
| | | | | cGUUAucAAcuuGaaaaagugG | | |
| | | | | caccgagucggugcusususuu | | |
| | | | | Uu-3′ | | |
| hcPCSK9 | GA404 | TCAGCTCC | 161 | 5′uscsasGCUCCAGGCGGUCC | 449 | SpCas9 |
| | | AGGCGGTC | | UGGgUUUUAGagcuaGaaauag | | |
| | | CTGG | | caaGUUaAaAuAaggcuaGUcc | | |
| | | | | GUUsAucAAcuuGaaaaagugG | | |
| | | | | caccgagucggugcusususuu | | |
| | | | | Uu-3′ | | |
| hcPCSK9 | GA405 | TCAGCTCC | 161 | 5′uscsasGCUCCAGGCGGUCC | 447 | SpCas9 |
| | | AGGCGGTC | | UGGgUUUUAGagcuagaaauag | | |
| | | CTGG | | caaGUUaAaAuAaggcuaGUCc | | |
| | | | | GUUAucAAcuugaaaaaguggc | | |
| | | | | accgagucggugcusususuuU | | |
| | | | | u-3′ | | |
| hcPCSK9 | GA406 | TCAGCTCC | 161 | 5′uscsasGCUCCAGGCGGUCC | 447 | SpCas9 |
| | | AGGCGGTC | | UGGgUUUUAGagcuagaaauag | | |
| | | CTGG | | caaGUUaAaAuAaggcuaGuCc | | |
| | | | | GUUaucAAcuugaaaaaguggc | | |
| | | | | accgagucggugcusususuuU | | |
| | | | | u-3′ | | |
| hcPCSK9 | GA407 | TCAGCTCC | 161 | 5′uscsasGCUCCAGGCGGUCC | 447 | SpCas9 |
| | | AGGCGGTC | | UGGgUUUuagagcuagaaauag | | |
| | | CTGG | | caaGUUaAaAuaaggcuaGucc | | |
| | | | | gUUaucaacuugaaaaaguggc | | |
| | | | | accgagucggugcusususuuU | | |
| | | | | u-3′ | | |
| hcPCSK9 | GA408 | TCAGCTCC | 161 | 5′uscsasGCUCCAGGCGGUCC | 447 | SpCas9 |
| | | AGGCGGTC | | UGGgUUUUAGagcuagaaauag | | |
| | | CTGG | | caaGUUaAaAuAaggcuaGUcc | | |
| | | | | GUUAucAAcuugaaaaagugGc | | |
| | | | | accgagucggugcusususuuU | | |
| | | | | u-3′ | | |
| hcPCSK9 | GA409 | TCAGCTCC | 161 | 5′uscsasG(C-PACE)UCCAG | 450 | SpCas9 |
| | | AGGCGGTC | | GCGGUCCUGGgUUUUAGagcua | | |
| | | CTGG | | gaaauagcaaGUUaAaAuAagg | | |
| | | | | cuaGUccGUUAucAAcuugaaa | | |
| | | | | aagugGcaccgagucggugcus | | |
| | | | | ususu-3′ | | |
| hcPCSK9 | GA410 | TCAGCTCC | 161 | 5′uscsasGCUCCAG(G- | 451 | SpCas9 |
| | | AGGCGGTC | | PACE)CGGUCCUGGgUUUUAGa | | |
| | | CTGG | | gcuagaaauagcaaGUUaAaAu | | |
| | | | | AaggcuaGUccGUUAucAAcuu | | |
| | | | | gaaaaagugGcaccgagucggu | | |
| | | | | gcusususu-3′ | | |
| hcPCSK9 | GA439 | CCCGCACC | 13 | 5′cscscsGCACCUUGGCGCAG | 11 | ABE |
| | | TTGGCGCA | | CGGgUUUUAGagcuaGaaauag | | |
| | | GCGG | | caaGUUaAaAuAaggcuaGUcc | | |
| | | | | GUUAucAAcuuGaaaaagugGc | | |
| | | | | accgagucggugcusususuUU | | |
| | | | | u-3′ | | |
| hcPCSK9 | GA440 | CCCGCACC | 13 | 5′cscscsGCACCUUGGCGCAG | 11 | ABE |
| | | TTGGCGCA | | CGGgUUUUAGagcuagaaauag | | |
| | | GCGG | | caaGUUaAaAuAaggcuaGUcc | | |
| | | | | GUUAucAAcuugaaaaagugGc | | |
| | | | | accgagucggugcusususuUU | | |
| | | | | u-3′ | | |
| hcPCSK9 | GA234 | CGCCTGCC | 252 | csgscsCUGCCAGCGCCUGGCG | 452 | SpCas9 |
| | | AGCGCCTG | | AGUUUUAGAGCUAGAAAUAGCA | | |
| | | GCGA | | AGUUAAAAUAAGGCUAGUCCGU | | |
| | | | | UAUCAACUUGAAAAAGUGGCAC | | |
| | | | | CGAGUCGGUGCUsususu | | |
| hcANG | GA261 | TGAAGAAA | 126 | 5′usgsasAGAAAGGGAGUAGU | 304 | SpCas9 |
| PTL3 | | GGGAGTAG | | UCUgUUUUAGagcuagaaauag | | |
| | | TTCT | | caaGUUaAaAuAaggcuaGUcc | | |
| | | | | GUUAucAAcuugaaaaagugGc | | |
| | | | | accgagucggugcususus | | |
| | | | | u-3′ | | |
| hcANG | GA262 | CATTATAT | 143 | 5′csasusUAUAUUCAGGUAGU | 321 | SpCas9 |
| PTL3 | | TCAGGTAG | | CCAgUUUUAGagcuagaaauag | | |
| | | TCCA | | caaGUUaAaAuAaggcuaGUcc | | |
| | | | | GUUAucAAcuugaaaaagugGc | | |
| | | | | accgagucggugcususus | | |
| | | | | u-3′ | | |
| hcANG | GA263 | ACAAAACT | 146 | 5′ascsasAAACUUCAAUGAAA | 324 | SpCas9 |
| PTL3 | | TCAATGAA | | CGUgUUUUAGagcuagaaauag | | |
| | | ACGT | | caaGUUaAaAuAaggcuaGUcc | | |
| | | | | GUUAucAAcuugaaaaagugGc | | |
| | | | | accgagucggugcususus | | |
| | | | | u-3′ | | |
| hcANG | GA264 | GCCAATGG | 109 | 5′gscscsAAUGGCCUCCUUCA | 287 | SpCas9 |
| PTL3 | | CCTCCTTC | | GUUgUUUUAGagcuagaaauag | | |
| | | AGTT | | caaGUUaAaAuAaggcuaGUcc | | |
| | | | | GUUAucAAcuugaaaaagugGc | | |
| | | | | accgagucggugcususus | | |
| | | | | u-3′ | | |
| hcANG | GA265 | GCCAATGG | 109 | 5′gscscsAAUGGCCUCCUUCA | 287 | SpCas9 |
| PTL3 | | CCTCCTTC | | GUUgUUUUAGagcuaGaaauag | | |
| | | AGTT | | caaGUUaAaAuAaggCUaGUCc | | |
| | | | | GUUAucAAcuuGaaaaaguGgc | | |
| | | | | accgAgUCggugcususus | | |
| | | | | u-3′ | | |
| hcPCSK9 | GA266 | TCAGCTCC | 161 | 5′uscsasGCUCCAGGCGGUCC | 339 | SpCas9 |
| | | AGGCGGTC | | UGGgUUUUAGagcuagaaauag | | |
| | | CTGG | | caaGUUaAaAuAaggcuaGUcc | | |
| | | | | GUUAucAAcuugaaaaagugGc | | |
| | | | | accgagucggugcususus | | |
| | | | | u-3′ | | |
| hcPCSK9 | GA267 | GCCCCATG | 185 | 5′gscscsCCAUGUCGACUACA | 363 | SpCas9 |
| | | TCGACTAC | | UCGgUUUUAGagcuagaaauag | | |
| | | ATCG | | caaGUUaAaAuAaggcuaGUcc | | |
| | | | | GUUAucAAcuugaaaaagugGc | | |
| | | | | accgagucggugcususus | | |
| | | | | u-3′ | | |
| hcPCSK9 | GA268 | GGGGCTGG | 187 | 5′gsgsgsGCUGGUAUUCAUCC | 365 | SpCas9 |
| | | TATTCATC | | GCCgUUUUAGagcuagaaauag | | |
| | | CGCC | | caaGUUaAaAuAaggcuaGUcc | | |
| | | | | GUUAucAAcuugaaaaagugGc | | |
| | | | | accgagucggugcususus | | |
| | | | | u-3′ | | |
| hcPCSK9 | GA269 | CTAGGAGA | 194 | 5′csusasGGAGAUACACCUCC | 372 | SpCas9 |
| | | TACACCTC | | ACCgUUUUAGagcuagaaauag | | |
| | | CACC | | caaGUUaAaAuAaggcuaGUcc | | |
| | | | | GUUAucAAcuugaaaaagugGc | | |
| | | | | accgagucggugcususus | | |
| | | | | u-3′ | | |
| hcPCSK9 | GA270 | CTGCGCGT | 204 | 5′csusgsCGCGUGCUCAACUG | 382 | SpCas9 |
| | | GCTCAACT | | CCAgUUUUAGagcuagaaauag | | |
| | | GCCA | | caaGUUaAaAuAaggcuaGUcc | | |
| | | | | GUUAucAAcuugaaaaagugGc | | |
| | | | | accgagucggugcususus | | |
| | | | | u-3′ | | |
| hcPCSK9 | GA271 | CGGGATGC | 206 | 5′csgsgsGAUGCCGGCGUGGC | 384 | SpCas9 |
| | | CGGCGTGG | | CAAgUUUUAGagcuagaaauag | | |
| | | CCAA | | caaGUUaAaAuAaggcuaGUcc | | |
| | | | | GUUAucAAcuugaaaaagugGc | | |
| | | | | accgagucggugcususus | | |
| | | | | u-3′ | | |
| hcPCSK9 | GA272 | CGCTGACC | 212 | 5′csgscsUGACCACCCCUGCC | 390 | SpCas9 |
| | | ACCCCTGC | | AGGgUUUUAGagcuagaaauag | | |
| | | CAGG | | caaGUUaAaAuAaggcuaGUcc | | |
| | | | | GUUAucAAcuugaaaaagugGc | | |
| | | | | accgagucggugcususus | | |
| | | | | u-3′ | | |
| mPCSK9 | GA292 | cccatacC | 69 | 5′cscscsAUACCUUGGAGCAA | 421 | ABE |
| | | TTGGAGCA | | CGGGUUUUAGAGCUAGAAAUAG | | |
| | | ACGG | | CAAGUUAAAAUAAGGCUAGUCC | | |
| | | | | GUUAUCAACUUGAAAAAGUGGC | | |
| | | | | ACCGAGUCGGUGCUsusus | | |
| | | | | u-3′ | | |

[0687] As used in Table 1 above, Table 23, and Table 24, in the Protospacer: uppercase nucleotides (A, G, C, I and T) indicate 2′-deoxyribonucleotides, adenine, guanine, cytosine, inosine, and thymine, respectively; in Guide RNA sequence: uppercase nucleotides (A, C, G, I and U) indicate ribonucleotides, adenine, guanine, cytosine, inosine, and uracil, respectively and lowercase nucleotides (a, g, c, i and u) indicate 2′-O-methylribonucleotide (2′-OMe) unless otherwise specified. It is understood that the DNA protospacer is converted to RNA or RNA-equivalent in the guide RNA design except when other modifications including 2′-deoxyribonucleotides are introduced into the spacer section of the single guide RNA; s: phosphorothioate (PS), X=ribonebularine; x=2′-O-methylnebularine; dX=2′-deoxynebularine; 5′-NNN-3′ indicates uniform A, C, G, I, U, dA, dG, dC, dI, T, X, x, dX, and combinations thereof. 5′-nnn-3′ indicates uniform a, c, g, i, u, dA, dG, dC or T, x, dX, and combinations thereof mANGPTL3: mouse ANGPTL3; hANGPTL3: human ANGPTL3; cANGPTL3: cynomolgus ANGPTL3; mcANGPTL3: mouse, cynomolgus cross-reactive ANGPTL3; hcANGPTL3: human, cynomolgus cross-reactive ANGPTL3; mPCSK9: mouse PCSK9; hPCSK9: human PCSK9; cPCSK9: cynomolgus PCSK9; mcPCSK9: mouse, cynomolgus cross-reactive PCSK9; hcPCSK9: human, cynomolgus cross-reactive PCSK9; hcAPOC3: human, cynomolgus cross-reactive APOC3. As disclosed herein, the nucleotide sequences and modification patterns encompass all length, structure, and type of RNAs or fragments thereof, CRISPR guide RNAs, e.g. sgRNAs, dual guide RNAs, or mRNAs. For example, nucleotide sequences and modification patterns as described in the Table above may indicate RNA sequences and modification patterns in a single guide RNA, a dual guide RNA, a nuclease mRNA, or any fragment or segment thereof. In Table 23, u′ indicates N¹-methylpseudouridine.

### Example 2. PCSK9 and ANGPTL3 Cas9 Editing In Vitro

[0688] In set of experiments, PCSK9 gRNAs were co-transfected with an equivalent amount (1:1 ratio by weight) of in vitro transcribed commercially available SpCas9 mRNA MS002 purchased from TriLink Biotechnologies into primary human hepatocytes at 2500, 500, or 100 ng/RNA/mL and processed as described in detailed methods. Extracted genomic DNA was analyzed for gene editing at the target site with next-generation sequencing of PCR amplicons generated around the target sites. Samples were prepared using the Nextera XT DNA library preparation kit (Illumina) according to the manufacturer's protocol. Briefly, two rounds of PCR were performed first to amplify the region of interest and second to add DNA sequences required for next generation sequencing and sample identification to the initial product. The final amplicon was sequenced on the Illumina MiSeq instrument according to the manufacturer's protocol. A wide range of editing activities (Table 2) were observed. In a second set of experiments, ANGPTL3 gRNAs were co-transfected with an equivalent amount of in vitro transcribed SpCas9 mRNA (1:1 ratio by weight) into primary human hepatocytes and processed and analyzed similarly (Table 3).

TABLE 2
PCSK9 gRNA/SpCas9 editing in primary hepatocytes

| | | | Human Primary | | | Cyno Primary | | |
|---|---|---|---|---|---|---|---|---|
| | Protospacer | | Hepatocyte Editing % | | | Hepatocyte Editing % | | |
| gRNA | (5′-3′) | SEQ ID NO: | 2500 | 500 | 100 | 2500 | 500 | 100 |
| GA156 | GGTGCTAGCCT | 66 | 26.34 | 6.22 | 1.48 | 33.94 | 14.31 | 2.34 |
| | TGCGTTCCG | | | | | | | |
| GA157 | GCCGTCCTCCT | 151 | 10.03 | 2.82 | 0.62 | 13.78 | 2.93 | 0.78 |
| | CGGAACGCA | | | | | | | |
| GA158 | GCTAGCCTTGC | 152 | 37.94 | 6.55 | 2 | 18.27 | 4.42 | 1.04 |
| | GTTCCGAGG | | | | | | | |
| GA159 | GCGTTCCGAGG | 153 | 14.68 | 3.74 | 1.35 | 12.21 | 3.69 | 1.19 |
| | AGGACGGCC | | | | | | | |
| GA160 | GCCTTGCGTTC | 154 | 23.3 | 5.58 | 1.19 | 23.15 | 6.60 | 1.38 |
| | CGAGGAGGA | | | | | | | |
| GA161 | GGACGAGGACG | 155 | 35.08 | 8.74 | 3.65 | 48.24 | 14.98 | 4.52 |
| | GCGACTACG | | | | | | | |
| GA162 | GGACGGCGACT | 156 | 42.8 | 12.97 | 2.14 | 28.26 | 11.18 | 1.62 |
| | ACGAGGAGC | | | | | | | |
| GA163 | CGTCCTCGTCC | 157 | 29.32 | 9.2 | 2.31 | 49.50 | 17.69 | 5.99 |
| | TCCTGCGCA | | | | | | | |
| GA164 | GTCCTCGTCCT | 158 | 25.77 | 11.12 | 2.68 | 34.89 | 13.96 | 2.75 |
| | CCTGCGCAC | | | | | | | |
| GA165 | CCGTCAGCTCC | 159 | 40.27 | 22.3 | 4.99 | 35.57 | 18.00 | 5.43 |
| | AGGCGGTCC | | | | | | | |
| GA166 | CGCCCGTGCGC | 160 | 36.89 | 10.99 | 2.89 | 44.77 | 14.39 | 3.93 |
| | AGGAGGACG | | | | | | | |
| GA167 | TCAGCTCCAGG | 161 | 53.71 | 25.87 | 8.2 | 66.07 | 35.98 | 11.98 |
| | CGGTCCTGG | | | | | | | |
| GA168 | CTTGGCGCAGC | 162 | 54.99 | 25.77 | ND | 41.49 | 15.90 | 4.75 |
| | GGTGGAAGG | | | | | | | |
| GA169 | CGTGCGCAGGA | 163 | 46.65 | 15.15 | 5.49 | 42.38 | 18.28 | 3.45 |
| | GGACGAGGA | | | | | | | |
| GA170 | CCAGGACCGCC | 164 | 31.35 | 15.84 | 2.9 | 23.17 | 11.48 | 4.03 |
| | TGGAGCTGA | | | | | | | |
| GA171 | TCTTGGTGAGG | 165 | 31.75 | 9.38 | 2.37 | 27.79 | 9.06 | 1.29 |
| | TATCCCCGG | | | | | | | |
| GA172 | CAGTGCGCTCT | 166 | 14.01 | 3.52 | 0.32 | 15.58 | 2.11 | 0.51 |
| | GACTGCGAG | | | | | | | |
| GA173 | CTTGGTGAGGT | 167 | 23.38 | 3.94 | 0.69 | 35.03 | 8.70 | 2.06 |
| | ATCCCCGGC | | | | | | | |
| GA174 | GGATCTTGGTG | 168 | 14.74 | 5.24 | 1.18 | 18.65 | 4.88 | 1.60 |
| | AGGTATCCC | | | | | | | |
| GA175 | GAAGATGAGTG | 169 | 24.81 | 7.53 | 1.55 | 44.77 | 12.37 | 1.45 |
| | GCGACCTGC | | | | | | | |
| GA176 | AGCACCACCAC | 170 | 4.98 | 1.26 | 0.36 | 22.65 | 8.11 | 2.11 |
| | GTAGGTGCC | | | | | | | |
| GA177 | GGTCGCCACTC | 171 | 12.57 | 2.67 | 0.65 | 15.91 | 4.68 | 0.38 |
| | ATCTTCACC | | | | | | | |
| GA178 | CTCCTTCAGCA | 172 | 18.29 | 5.43 | 1.26 | 25.22 | 5.78 | 2.21 |
| | CCACCACGT | | | | | | | |
| GA179 | GAGTGGCGACC | 173 | 21.87 | 6 | 1.29 | 12.94 | 4.21 | 1.06 |
| | TGCTGGAGC | | | | | | | |
| GA180 | GCGCACTGCCC | 174 | 17.16 | 2.22 | 0.22 | 14.12 | 2.45 | 0.91 |
| | GCCGCCTGC | | | | | | | |
| GA181 | GGCTTCCTGGT | 175 | ND | ND | 28.87 | 45.12 | 15.43 | 3.66 |
| | GAAGATGAG | | | | | | | |
| GA182 | CACCTACGTGG | 176 | 17.44 | 4.49 | 0.95 | 22.89 | 6.14 | 1.55 |
| | TGGTGCTGA | | | | | | | |
| GA183 | CTACGTGGTGG | 177 | 32.35 | 9.89 | 2.21 | 39.56 | 15.99 | 2.87 |
| | TGCTGAAGG | | | | | | | |
| GA184 | ATGGAAGACAT | 178 | 29.55 | 8.29 | 2.65 | 31.87 | 10.54 | 2.90 |
| | GCAGGATCT | | | | | | | |
| GA185 | AGACATGCAGG | 179 | 27.98 | 10.91 | 1.6 | 20.29 | 7.75 | 1.14 |
| | ATCTTGGTG | | | | | | | |
| GA186 | CTCATCTTCAC | 180 | 12.01 | 3.57 | 0.79 | 33.48 | 7.59 | 1.96 |
| | CAGGAAGCC | | | | | | | |
| GA187 | CTCCTCGATGT | 181 | ND | 6.47 | 2.44 | 29.24 | 12.30 | 3.77 |
| | AGTCGACAT | | | | | | | |
| GA188 | TATTCATCCGC | 182 | 41.02 | 15.38 | 4.21 | 0.06 | 0.01 | 0.01 |
| | CCGGTACCG | | | | | | | |
| GA189 | TCCTCGATGTA | 183 | 31.23 | 8.94 | 1.76 | 41.70 | 15.58 | 3.30 |
| | GTCGACATG | | | | | | | |
| GA190 | CCTCCTCGATG | 184 | 25.39 | 9.73 | 2.78 | 26.78 | 5.53 | 1.17 |
| | TAGTCGACA | | | | | | | |
| GA191 | GCCCCATGTCG | 185 | 34.6 | 12.2 | 3 | 51.79 | 26.79 | 5.46 |
| | ACTACATCG | | | | | | | |
| GA192 | CCATGTCGACT | 186 | 16.7 | 6.02 | 1.14 | 10.26 | 1.50 | 0.60 |
| | ACATCGAGG | | | | | | | |
| GA193 | GGGGCTGGTAT | 187 | 35.77 | 15.68 | 3.92 | 52.89 | 32.02 | 8.70 |
| | TCATCCGCC | | | | | | | |
| GA194 | GTCGACATGGG | 188 | 32.97 | 12.39 | 2.32 | 30.91 | 9.49 | 2.38 |
| | GCAACTTCA | | | | | | | |
| GA195 | ACCACCGGGAA | 189 | 12.57 | 13.3 | 3.58 | 18.78 | 4.77 | 0.69 |
| | ATCGAGGGC | | | | | | | |
| GA196 | GAGTGACCACC | 190 | 17.19 | 2.9 | 0.75 | 27.79 | 3.4 | 1.09 |
| | GGGAAATCG | | | | | | | |
| GA197 | AGTGACCACCG | 191 | 15.03 | 3.29 | 1.22 | 18.21 | 3.89 | 0.9 |
| | GGAAATCGA | | | | | | | |
| GA198 | CCACCGGGAAA | 192 | 30.93 | 10.58 | 0.04 | 49 | 16.15 | 3.53 |
| | TCGAGGGCA | | | | | | | |
| GA199 | GAAGCGGGTCC | 193 | 29.95 | 6.89 | 1.17 | 45.32 | 15.11 | 3.07 |
| | CGTCCTCCT | | | | | | | |
| GA200 | CTAGGAGATAC | 194 | 5.31 | 8.68 | 3.8 | 54.36 | 20.51 | 5.15 |
| | ACCTCCACC | | | | | | | |
| GA201 | CAGCATACAGA | 195 | 31.51 | 12.92 | 3.29 | 44.01 | 14.37 | 4.33 |
| | GTGACCACC | | | | | | | |
| GA202 | AAGCGGGTCCC | 196 | 34.75 | 10.75 | 2.54 | 31.13 | 8.91 | 1.54 |
| | GTCCTCCTC | | | | | | | |
| GA203 | TGACCCTGCCC | 197 | 37.02 | 12.76 | 2.57 | 32.85 | 10.49 | 3.66 |
| | TCGATTTCC | | | | | | | |
| GA204 | CACTCTGTATG | 198 | 24.98 | 8.98 | 1.27 | 19.37 | 5.27 | 0.91 |
| | CTGGTGTCT | | | | | | | |
| GA205 | CCCTGCCCTCG | 199 | 38.04 | 12.42 | 3.74 | 36.43 | 12.04 | 3.01 |
| | ATTTCCCGG | | | | | | | |
| GA206 | CCGGTGGTCAC | 200 | 20.73 | 2.7 | 0.85 | 16.9 | 2.73 | 0.84 |
| | TCTGTATGC | | | | | | | |
| GA207 | GGAAATCGAGG | 201 | 20.79 | 3.46 | 0.84 | 19.16 | 2.72 | 1.05 |
| | GCAGGGTCA | | | | | | | |
| GA208 | CCAGCATACAG | 202 | 25.76 | 5.72 | 1.38 | 25.07 | 6.01 | 1.15 |
| | AGTGACCAC | | | | | | | |
| GA209 | CTTGGCAGTTG | 203 | 33.23 | 8.76 | 0.02 | 40.78 | 13.96 | 3.59 |
| | AGCACGCGC | | | | | | | |
| GA210 | CTGCGCGTGCT | 204 | 14.3 | 5.86 | 0.04 | 54.88 | 19.72 | 4.5 |
| | CAACTGCCA | | | | | | | |
| GA211 | TGCGCGTGCTC | 205 | 38.07 | 10.29 | 1.31 | 28.63 | 8.3 | 1.01 |
| | AACTGCCAA | | | | | | | |
| GA212 | CGGGATGCCGG | 206 | 12.45 | 5.59 | 1.17 | 54.89 | 16.53 | 1.96 |
| | CGTGGCCAA | | | | | | | |
| GA213 | CGTGCTCAACT | 207 | 24.28 | 8.77 | 2.17 | 45.22 | 16.35 | 2.73 |
| | GCCAAGGGA | | | | | | | |
| GA214 | CCTTGGCCACG | 208 | 22.92 | 6.28 | 1.94 | 50.35 | 14.84 | 3.06 |
| | CCGGCATCC | | | | | | | |
| GA215 | CAGCGGCCGGG | 209 | 4.94 | 1.01 | 0.13 | 7.52 | 1.07 | |
| | ATGCCGGCG | | | | | | | |
| GA216 | CCGGGATGCCG | 210 | 14.65 | 3.7 | 0.95 | 37.79 | 4.97 | 1.77 |
| | GCGTGGCCA | | | | | | | |
| GA217 | GTGGTCAGCGG | 211 | 15.31 | 2.75 | 0.77 | 39.21 | 10.2 | 2.6 |
| | CCGGGATGC | | | | | | | |
| GA218 | CGCTGACCACC | 212 | 31.71 | 8.96 | 3.81 | 58.66 | 19.95 | 5.42 |
| | CCTGCCAGG | | | | | | | |
| GA219 | GGCAGGGGTGG | 213 | 15.97 | 4.57 | 1.28 | 48.67 | 11.89 | 0.35 |
| | TCAGCGGCC | | | | | | | |
| GA220 | GTGCTCAACTG | 214 | 21.87 | 9.12 | 2.17 | 45.17 | 12.39 | 3.13 |
| | CCAAGGGAA | | | | | | | |
| GA221 | TCATGGCACCC | 215 | 29.35 | 7.48 | 1.11 | 57.4 | 20.27 | 2.82 |
| | ACCTGGCAG | | | | | | | |
| GA222 | TGGCAGGGGTG | 216 | 2.04 | 0.66 | 0.5 | 16.7 | 3.32 | 0.88 |
| | GTCAGCGGC | | | | | | | |
| GA223 | GCTGACCACCC | 217 | 17.5 | 7.28 | 1.44 | 57.58 | 21.4 | 3.46 |
| | CTGCCAGGT | | | | | | | |
| GA224 | GGCCGCTGACC | 218 | 13.02 | 2.19 | 1.01 | 47.5 | 12.34 | 2.61 |
| | ACCCCTGCC | | | | | | | |
| GA225 | GGCATCGTCCC | 219 | 18.82 | 6.39 | 0.89 | 8.57 | 3.11 | 2.03 |
| | GGAAGTTGC | | | | | | | |
| GA226 | GGCTTTTCCGA | 220 | 7.61 | 2.99 | 0.4 | ND | ND | ND |
| | ATAAACTCC | | | | | | | |
| GA227 | GTCCCGGAAGT | 221 | 32.09 | 8.29 | 0.02 | 32.41 | 4.58 | 0.56 |
| | TGCCGGCAG | | | | | | | |
| GA228 | CGGCTGTACCC | 222 | 37.1 | 10.96 | 5.9 | 31.36 | 7.89 | 1.95 |
| | ACCCGCCAG | | | | | | | |
| GA229 | GTCGTGCTGGT | 223 | 30.41 | 6.85 | 0.47 | 34.28 | 5.39 | 0.75 |
| | CACCGCTGC | | | | | | | |
| GA230 | AGTAGAGGCAG | 224 | 29.31 | 12.83 | ND | 35.86 | ND | ND |
| | GCATCGTCC | | | | | | | |
| GA231 | TCCGAATAAAC | 225 | ND | ND | ND | ND | ND | ND |
| | TCCAGGCCT | | | | | | | |
| GA232 | GTTTATTCGGA | 226 | ND | ND | ND | ND | ND | ND |
| | AAAGCCAGC | | | | | | | |
| GA233 | GCGGCTGTACC | 227 | 19.97 | 5.39 | 3.08 | 37.8 | 10.84 | 2.38 |
| | CACCCGCCA | | | | | | | |
| GA234 | CGCCTGCCAGC | 252 | 5.45 | 2.29 | 0.06 | 6.44 | 1.53 | 0.21 |
| | GCCTGGCGA | | | | | | | |
| GA235 | CACCGCTGCCG | 228 | ND | ND | ND | 50.03 | 17.51 | 2.51 |
| | GCAACTTCC | | | | | | | |
| GA236 | AGCCCTCGCCA | 229 | 22.41 | 3.13 | 6.92 | 37.44 | 11.62 | 2.31 |
| | GGCGCTGGC | | | | | | | |
| GA237 | CAACGCCGCCT | 230 | 36.78 | 15.83 | 4.53 | 46.01 | 13.46 | 2.17 |
| | GCCAGCGCC | | | | | | | |
| GA238 | GCACGACCCCA | 231 | ND | ND | ND | 17.92 | 4.01 | 0.94 |
| | GCCCTCGCC | | | | | | | |
| GA239 | CCGCCTGCCAG | 232 | 3.49 | 1.73 | 0.06 | 4.55 | 0.55 | 0.02 |
| | CGCCTGGCG | | | | | | | |
| GA240 | TGCCAGCGCCT | 233 | 7.94 | 0.24 | 1.05 | 10.62 | 1.9 | 0.52 |
| | GGCGAGGGC | | | | | | | |
| GA241 | TGCTGCTGCCC | 234 | 5.39 | 1.49 | 0.61 | 16.11 | 2.94 | 0.97 |
| | CTGGCGGGT | | | | | | | |
| GA242 | TCACCGCTGCC | 235 | ND | ND | ND | 31.71 | 7.13 | 1.79 |
| | GGCAACTTC | | | | | | | |
| GA243 | GGCGAGGGCTG | 236 | ND | ND | ND | 10.18 | 1.84 | 0.51 |
| | GGGTCGTGC | | | | | | | |
| GA244 | TTCCGAATAAA | 237 | ND | ND | ND | 28.16 | 7.89 | 1.63 |
| | CTCCAGGCC | | | | | | | |
| GA245 | GTGCTGCTGCC | 238 | 2.9 | 2.97 | 1.68 | 7.07 | 0.88 | 0.19 |
| | CCTGGCGGG | | | | | | | |
| GA246 | GCCAGCGCCTG | 239 | 17.95 | 2.17 | 0.08 | 24.63 | 5.78 | 1.11 |
| | GCGAGGGCT | | | | | | | |
| GA247 | CCTCGCCAGGC | 240 | 6.76 | 0.17 | 0.25 | 11.48 | 2.62 | 0.71 |
| | GCTGGCAGG | | | | | | | |

TABLE 3
ANGPTL3 gRNA/SpCas9 editing in primary hepatocytes

| | | | Human Primary Hepatocyte | | Cyno Primary Hepatocyte | |
|---|---|---|---|---|---|---|
| | Protospacer | | Editing % | | Editing % | |
| gRNA | (5′-3′) | SEQ ID NO: | 500 ng/mL | 100 ng/mL | 500 ng/mL | 100 ng/mL |
| GA107 | AGCCAATGGCC | 105 | 5.09 | 3.72 | ND | 32.58 |
| | TCCTTCAGT | | | | | |
| GA108 | TCCCAACTGAA | 106 | 19.43 | 4.95 | 15.49 | 4.11 |
| | GGAGGCCAT | | | | | |
| GA109 | GGCCTCCTTCA | 107 | 18.07 | 6.60 | 15.11 | 4.15 |
| | GTTGGGACA | | | | | |
| GA110 | GACCATGTCCC | 108 | 13.63 | 5.37 | 15.99 | 8.59 |
| | AACTGAAGG | | | | | |
| GA111 | GCCAATGGCCT | 109 | 24.08 | 10.72 | 28.98 | 22.61 |
| | CCTTCAGTT | | | | | |
| GA113 | ATTCTGGAGGA | 111 | 19.97 | 6.00 | 26.67 | 12.07 |
| | AATAACTAG | | | | | |
| GA115 | AACATAGCAAA | 113 | ND | ND | 25.51 | 12.58 |
| | TCTTGATTT | | | | | |
| GA116 | GTAGAATTTTT | 114 | 16.33 | 3.78 | 19.83 | 10.84 |
| | TCTTCTAGG | | | | | |
| GA117 | ACTACAAGTCA | 115 | 16.55 | 7.08 | 26.11 | 10.01 |
| | AAAATGAAG | | | | | |
| GA122 | CTTTTATTTGA | 120 | 13.82 | 4.45 | 16.76 | 7.28 |
| | CTATGCTGT | | | | | |
| GA125 | TGATGGTAAGA | 123 | 16.27 | 5.04 | 19.72 | 12.91 |
| | CACTTTGGT | | | | | |
| GA126 | GGAGTAGTTCT | 124 | 15.21 | 6.73 | 17.57 | 8.29 |
| | TGGTGCTCT | | | | | |
| GA127 | AACATGATGGT | 125 | 18.74 | 5.77 | 33.67 | 19.89 |
| | AAGACACTT | | | | | |
| GA128 | TGAAGAAAGGG | 126 | 25.39 | 10.29 | 32.55 | 0.19 |
| | AGTAGTTCT | | | | | |
| GA129 | AGTTCTTGGTG | 127 | ND | ND | 20.06 | 5.36 |
| | CTCTTGGCT | | | | | |
| GA130 | ATGATGGTAAG | 128 | 17.09 | 7.51 | 25.90 | 14.60 |
| | ACACTTTGG | | | | | |
| GA131 | GAAGATAGAGA | 129 | 18.64 | ND | 27.57 | 10.10 |
| | AATTTCTGT | | | | | |
| GA132 | GGAAGATAGAG | 130 | 28.39 | 15.25 | 26 | 15 |
| | AAATTTCTG | | | | | |
| GA137 | TATCAGGTAAA | 135 | 29.70 | 11.44 | 30.57 | 28.01 |
| | ACCTGTCTA | | | | | |
| GA141 | TTGAGAGTTGC | 139 | 14.87 | 5.80 | 10.32 | 5.49 |
| | TGGGTCTGA | | | | | |
| GA142 | TGAAAAACTTG | 140 | 24.90 | 10.50 | 27.59 | 20.09 |
| | AGAGTTGCT | | | | | |
| GA143 | TTAATTCAACA | 141 | 19.36 | 9.30 | 21.16 | 14.84 |
| | TCGAATAGA | | | | | |
| GA145 | CATTATATTCA | 143 | 26.33 | 12.55 | 30.34 | 18.77 |
| | GGTAGTCCA | | | | | |
| GA148 | ACAAAACTTCA | 146 | 31.67 | 12.01 | 69.75 | 28.57 |
| | ATGAAACGT | | | | | |
| GA151 | GAGAACTACAA | 149 | 31.88 | 10.56 | 38.91 | 11.32 |
| | ATATGGTTT | | | | | |

[0689] The modes of operation of Cas9, cytidine base editors (CBE), and adenine base editors (ABE) respectively, along with relevant terminology used in this application including “protospacer”, “PAM”, “spacer” are illustrated (FIGS. 1A-1C). For one of the guides that performed well, GA156, with spacer sequence 5′-GGTGCTAGCCTTGCGTTCCG-3′ (SEQ ID NO: 66), additional guides were synthesized with modifications to the tracrRNA sequence. Additionally, an X-ray crystal structure-guided approach was used (FIG. 1D). Structure-guided spacer and tracr designs were informed by the crystal structures of S. pyogenes Cas9 in complex with sgRNA (Jiang et al., 2015, PDB ID 4ZT0) and S. pyogenes Cas9 in a pre-catalytic ternary complex (Jiang et al., 2016, PDB ID 5F9R) (FIG. 2). Any positions in the crystal structures where there appeared to be a hydrogen bond between the 2′-OH of a given nucleotide and the Cas9 protein (or another part of the sgRNA) were left unmodified. Additionally, any positions where a steric clash was predicted to occur between a 2′-OMe and the protein were left unmodified. At sites where the 2′-OH was solvent-exposed or otherwise distant from protein residues, a 2′-OMe substitution was made. In cases where the two crystal structures disagreed, no modification was made. This strategy was applied to the entire sgRNA or just the tracr region. Exemplary structures are shown in FIGS. 3-7.

[0690] PCSK9 gRNAs were co-transfected with an equivalent amount of in vitro transcribed SpCas9 mRNA MS002 (1:1 ratio by weight) into primary human hepatocytes and processed as described in detailed methods. A wide range of editing activities were observed (Table 4; ND=Not determined). The guides with the highest editing activity at five days post transfection were GA001, GA002, GA007, and GA008. The structure-guided 2′-OMe heavy guide RNA (gRNA) designs GA007 and GA008 showed improved editing over minimally modified control gRNA GA009.

TABLE 4
In vitro evaluation of modified gRNA via SpCas9
editing in primary human hepatocytes

| gRNA | % Editing, day 3 | % Editing, day 5 |
|---|---|---|
| GA001 | 16 | 27 |
| GA002 | 28 | 23 |
| GA003 | ND | 7 |
| GA004 | 7 | 12 |
| GA005 | 1 | 15 |
| GA006 | ND | 12 |
| GA007 | 30 | 27 |
| GA008 | 20 | 28 |
| GA009 | 4 | 19 |

### Example 3. PCSK9 and ANGPTL3 Base Editing In Vitro

[0691] Editing of PCSK9 by ABE8.8 was observed in primary hepatocytes. PCSK9 gRNAs were co-transfected with an equivalent amount of in vitro transcribed ABE8.8 mRNA MA002 (1:1 ratio by weight) into primary hepatocytes and processed as described in detailed methods. In one set of experiments, extracted genomic DNA was analyzed for base editing of the target splice site with next-generation sequencing of PCR amplicons generated around the target sites. Samples were prepared using the Nextera XT DNA library preparation kit (Illumina) according to the manufacturer's protocol. Briefly, two rounds of PCR were performed first to amplify the region of interest and second to add DNA sequences required for next generation sequencing and sample identification to the initial product. The final amplicon was sequenced on the Illumina MiSeq instrument according to the manufacturer's protocol. A wide range of editing activities (Table 5; FIG. 8) were observed, with guides GA066, GA073, and GA074 performing the best.

TABLE 5
ABE8.8/PCSK9 gRNA editing in primary hepatocytes

| | | Human Primary | | | Cynomolgous Primary | | |
|---|---|---|---|---|---|---|---|
| | | Hepatocytes-splice | | | Hepatocytes-splice site | | |
| | | site editing % | | | editing % | | |
| | | 5000 | 2500 | 1250 | 5000 | 2500 | 1250 |
| gRNA | Species | ng/mL | ng/mL | ng/mL | ng/mL | ng/mL | ng/mL |
| GA066 | Human/Cyno | 25.9 | 18.7 | 13.6 | 24.3 | 29.1 | 21.4 |
| GA072 | Human/Cyno | 2.5 | 2.2 | 1.5 | 2.2 | 1.7 | 2.3 |
| GA073 | Human/Cyno | 25.4 | 17.5 | 11.2 | 29.2 | 23.2 | 24.7 |
| GA074 | Human/Cyno | 23.8 | 18.8 | 11.6 | 18.7 | 20.1 | 17.5 |
| GA075 | Human/Cyno | 5.5 | 3.1 | 1.8 | ND | ND | ND |
| GA076 | Human/Cyno | 4.9 | 3.9 | 1.6 | ND | ND | ND |
| GA077 | Human/Cyno | 6.0 | 5.7 | 2.8 | 5.4 | 5.7 | 4.1 |
| GA078 | Human/Cyno | 12.6 | 10.0 | 6.5 | ND | ND | ND |
| GA079 | Human/Cyno | 6.5 | 4.9 | 2.2 | 0.5 | 0.5 | 0.6 |
| GA080 | Human/Cyno | 0.6 | 0.5 | 0.4 | 7.0 | 8.8 | 7.1 |
| GA081 | Human/Cyno | 8.3 | 6.1 | 4.3 | 0.3 | 0.3 | 0.3 |
| GA082 | Human/Cyno | 9.8 | 9.6 | 5.6 | ND | ND | ND |
| GA083 | Human/Cyno | 0.2 | 0.2 | 0.2 | ND | ND | ND |
| GA084 | Human/Cyno | 8.6 | 7.6 | 4.9 | ND | ND | ND |
| GA085 | Human/Cyno | 2.4 | 1.8 | 1.2 | ND | ND | ND |
| GA086 | Human/Cyno | 5.7 | 4.9 | 2.9 | ND | ND | ND |
| GA087 | Human/Cyno | 1.9 | 1.4 | 1.0 | 0.2 | 0.2 | 0.2 |
| GA088 | Human/Cyno | 7.2 | 6.2 | 3.6 | 24.8 | 23.0 | 17.0 |
| GA089 | Human/Cyno | 18.1 | 14.1 | 5.4 | ND | ND | ND |
| GA090 | Human/Cyno | 0.4 | 0.5 | 0.3 | ND | ND | ND |

[0692] When considering the data from primary human hepatocytes, PCSK9-targeting gRNAs were identified that matched the following three protospacer sequences as having the best cross-species activity between both primary human hepatocytes and primary cynomolgous hepatocytes: 5′-CCCGCACCTTGGCGCAGCGG-3′ (SEQ ID NO: 13) (GA066), 5′-GCTTACCTGTCTGTGGAAGC-3′ (SEQ ID NO: 67) (GA073), and 5′-TGCTTACCTGTCTGTGGAAG-3′ (SEQ ID NO: 68) (GA074). The GA066 sequence targets the splice donor at the 5′ end of human PCSK9 intron 1 and is predicted to result in an aberrant PCSK9 protein translated from exon 1, followed by several amino acids translated from the beginning of intron 1 (read through from exon 1 into intron 1), followed by a premature stop codon (FIG. 9). The GA073 and GA074 sequences each target the splice donor at the 5′ end of human PCSK9 intron 4 and is predicted to result in an aberrant PCSK9 protein translated from exons 1, 2, 3, and 4, followed by several amino acids translated from the beginning of intron 4 (readthrough from exon 4 into intron 4), followed by a premature stop codon. The predicted prematurely truncated protein in each of these cases is likely to have complete loss of function as well as having minimal immunogenicity due to the near-identical match to part of the naturally occurring wild-type human PCSK9 amino acid sequence. The same protospacer sequence, 5′-CCCGCACCTTGGCGCAGCGG-3′ (SEQ ID NO: 13) (GA066), is found in the cynomolgus monkey genome, similarly targeting the splice donor at the 5′ end of cyno PCSK9 intron 1.

[0693] Editing of ANGPTL3 by ABE8.8 was observed in primary hepatocytes. ANGPTL3 gRNAs were co-transfected with an equivalent amount of in vitro transcribed ABE8.8 mRNA MA004 (1:1 ratio by weight) into primary hepatocytes and processed as described in detailed methods. A human ANGPTL3-targeting gRNA matching the following protospacer sequence 5′-AAGATACCTGAATAACCCTC-3′ (SEQ ID NO: 15) (GA091) was identified. The GA091 sequence targets the splice donor at the 5′ end of human ANGPTL3 intron 6 and is predicted to result in an aberrant ANGPTL3 protein translated from exons 1, 2, 3, 4, 5, and 6, followed by several amino acids translated from the beginning of intron 6 (readthrough from exon 6 into intron 6), followed by a premature stop codon (FIG. 10). Notably, there is a naturally occurring rare human DNA variant that disrupts the same splice donor and bears the designation rs398122985. A gRNA was synthesized with the orthologous cynomolgous spacer sequence, differing by 1 nucleotide: 5′-AAGATACCTGAATAACTCTC-3′ (SEQ ID NO: 14) (GA067) and bearing modest chemical modifications (Table 1). Both GA091 in human primary hepatocytes, and GA067 in cynomolgus primary hepatocytes, lead to substantial splice editing when co-transfected with ABE8.8 mRNA (protocol described in the detailed methods section) (Table 6). RNA was transfected at 2500, 1250, 625, and 312.5 ng/test article/mL, with two replicates reported (rep 1 and rep 2).

TABLE 6
ABE8.8/ANGPTL3 gRNA editing in primary hepatocytes

| | | Human Primary Hepatocytes-splice site editing % (Dose, Replicate #) | | | | | | | |
|---|---|---|---|---|---|---|---|---|---|
| | | 2500, | 2500, | 1250, | 1250, | 625, | 625, | 312.5, | 312.5, |
| gRNA | Species | rep 1 | rep 2 | rep 1 | rep 2 | rep 1 | rep 2 | rep 1 | rep 2 |
| GA091 | Human | 72.23 | 72.04 | 62.01 | 65.15 | 47.85 | 47.3 | 30.71 | 29.62 |
| GA092 | Human/ | 38.39 | 41.71 | 33.38 | 29.83 | 20.73 | 19.94 | 8.54 | 10.92 |
| | Cyno | | | | | | | | |
| GA093 | Human | 63.53 | 66.9 | 55.54 | 56.2 | 39.22 | 39.8 | 20.7 | 17.32 |
| GA094 | Human | 44.84 | 46.65 | 39.62 | 46.8 | 28.75 | 14.74 | 14.12 | 26.7 |
| | | Cyno Primary Hepatocytes-splice site editing (Dose, Replicate #) | | | | | | | |
| | | 2500, | 2500, | 1250, | 1250, | 625, | 625, | 312.5, | 312.5, |
| | | rep 1 | rep 2 | rep 1 | rep 2 | rep 1 | rep 2 | rep 1 | rep 2 |
| GA067 | Cyno | 66.06 | 64.84 | 64.92 | 63.78 | 53.56 | 53.66 | 37.05 | 39.36 |
| GA092 | Human/ | 45.76 | 43.27 | 43 | 44.28 | 32.42 | 32.56 | 25.72 | 19.87 |
| | Cyno | | | | | | | | |

[0694] Another strategy by which adenine base editors might be used to disrupt gene function is to introduce a missense mutation(s) into the coding region of the gene that results in production of a less functional, or non-functional protein. Guide RNAs targeting protospacers in ANGPTL3 exons were assessed for base editing activity to introduce missense mutation(s). Each of the gRNAs with an equivalent amount of in vitro transcribed ABE8.8 mRNA MA004 (1:1 ratio by weight) were co-transfected in two replicates (rep 1 and rep 2) at 2500, 1250, 625, and 312.5 ng/RNA/mL into primary human hepatocytes and processed as described in detailed methods. The resulting base editing efficiency, as well as one potential amino acid substitution, is listed in Table 7.

[0695] In some embodiments, adenine base editors disrupts gene function by replacing any one amino acid selected from A, R, N, D, C, Q, E, G, H, I, L, K, M, F, P, S, T, W, Y, and V with a non-identical amin acid A, R, N, D, C, Q, E, G, H, I, L, K, M, F, P, S, T, W, Y, and V. In some embodiments, adenine base editors disrupt gene function by substituting I with T or V. In some embodiments, adenine base editors disrupt gene function by substituting D with G. In some embodiments, adenine base editors disrupt gene function by substituting E with G. In some embodiments, adenine base editors disrupt gene function by substituting F with L or P. In some embodiments, adenine base editors disrupt gene function by substituting H with R. In some embodiments, adenine base editors disrupt gene function by substituting L with P. In some embodiments, adenine base editors disrupt gene function by substituting S with P. In some embodiments, adenine base editors disrupt gene function by substituting M with T. In some embodiments, adenine base editors disrupt gene function by substituting N with G. In some embodiments, adenine base editors disrupt gene function by substituting Q with R. In some embodiments, adenine base editors disrupt gene function by substituting R with G. In some embodiments, adenine base editors disrupt gene function by substituting T with A. In some embodiments, adenine base editors disrupt gene function by substituting V with A. In some embodiments, adenine base editors disrupt gene function by substituting Y with C or H. In some embodiments, adenine base editors disrupt gene function by substituting K with G. In some embodiments, adenine base editors disrupt gene function by introducing an amino acid substitute as listed in Table 7.

TABLE 7
ANGPTL3 gRNA ABE editing can introduce missense mutations

| | | | | Human Primary Hepatocytes- | | | | | | | |
|---|---|---|---|---|---|---|---|---|---|---|---|
| | | | Example | Editing % (Dose, Replicate #) | | | | | | | |
| | Protospace | SEQ | Amino Acid | 2500, | 2500, | 1250, | 1250, | 625, | 625, | 3125, | 3125, |
| gRNA | (5′-3′) | ID NO | Substitution | rep 1 | rep 2 | rep 1 | rep 2 | rep 1 | rep 2 | rep 1 | rep 2 |
| GA | TAATTT | 102 | I68T | 0.27 | 0.31 | 0.17 | 0.29 | 0.27 | 0.31 | 0.21 | 0.27 |
| 104 | GGCCCT | | | | | | | | | | |
| | TCGTCT | | | | | | | | | | |
| | TA | | | | | | | | | | |
| GA | AGACTT | 103 | D59G | 1.12 | 1.06 | 0.98 | 1 | 0.95 | 1.28 | 1.07 | 1.01 |
| 105 | TGTCCA | | | | | | | | | | |
| | TAAGAC | | | | | | | | | | |
| | GA | | | | | | | | | | |
| GA | GACTTT | 104 | N/A (D59G) | 1.24 | 1.08 | 1.15 | 1.13 | 1.28 | 1.24 | 1.07 | 1.34 |
| 106 | GTCCAT | | | | | | | | | | |
| | AAGACG | | | | | | | | | | |
| | AA | | | | | | | | | | |
| GA | ATTGTC | 110 | N/A | 0.53 | 0.44 | 0.46 | 0.54 | 0.49 | 0.35 | 0.39 | 0.5 |
| 112 | TTGATC | | | | | | | | | | |
| | AATTCT | | | | | | | | | | |
| | GG | | | | | | | | | | |
| GA | ATTCTG | 111 | S17P | 1.22 | 1.31 | 1.17 | 1.26 | 1.23 | 1.19 | 1.21 | 1.13 |
| 113 | GAGGAA | | | | | | | | | | |
| | ATAACT | | | | | | | | | | |
| | AG | | | | | | | | | | |
| GA | AACATA | 113 | M39T | 58.3 | ND | 50.19 | ND | 29.2 | ND | 16.5 | ND |
| 115 | GCAAAT | | | | | | | | | | |
| | CTTGAT | | | | | | | | | | |
| | TT | | | | | | | | | | |
| GA | GTAGAA | 114 | I132T | 54.78 | ND | 65.37 | ND | 33.93 | ND | 19.8 | ND |
| 116 | TTTTTTC | | | | | | | | | | |
| | TTCTAG | | | | | | | | | | |
| | G | | | | | | | | | | |
| GA | ACTACA | 115 | Q107R | 56.97 | 57.99 | 42.71 | 48.24 | 25.63 | 27.9 | 13.13 | 12.8 |
| 117 | AGTCAA | | | | | | | | | | |
| | AAATGA | | | | | | | | | | |
| | AG | | | | | | | | | | |
| GA | TATATT | 116 | Y186C | 37.26 | 37.2 | 30.38 | 30.76 | 20.85 | 20.44 | 9.23 | 11.01 |
| 118 | GGTCTT | | | | | | | | | | |
| | CCACGG | | | | | | | | | | |
| | TC | | | | | | | | | | |
| GA | CAAAGA | 117 | D177G | 54.92 | 55.55 | 14.06 | 42.4 | 25.96 | 25.9 | 10.84 | 12.43 |
| 119 | CCTTCT | | | | | | | | | | |
| | CCAGAC | | | | | | | | | | |
| | CG | | | | | | | | | | |
| GA | GGTCTT | 118 | V182A | 1.79 | 2.04 | 1.41 | 1.59 | 1.21 | 0.89 | 0.73 | 0.76 |
| 120 | CCACGG | | | | | | | | | | |
| | TCTGGA | | | | | | | | | | |
| | GA | | | | | | | | | | |
| GA | TTGTTT | 119 | Y186H | 57.04 | 65.91 | 45.78 | 45.61 | 30.15 | 33.83 | 15.68 | 13.37 |
| 121 | ATATTG | | | | | | | | | | |
| | GTCTTC | | | | | | | | | | |
| | CA | | | | | | | | | | |
| GA | CTTTTA | 120 | I196T | 40.76 | 37.69 | 37.03 | 34.27 | 21.08 | 18.83 | 11.25 | 7.49 |
| 122 | TTTGAC | | | | | | | | | | |
| | TATGCT | | | | | | | | | | |
| | GT | | | | | | | | | | |
| GA | AAAGTC | 121 | F167L | 12.51 | 13.68 | 8.79 | 12.05 | 8.1 | 5.76 | 3.63 | 2.83 |
| 123 | TGGATA | | | | | | | | | | |
| | TAGAGA | | | | | | | | | | |
| | GT | | | | | | | | | | |
| GA | GTTGGT | 122 | L189P | 4.43 | 4.46 | 4.13 | 4.34 | 2.5 | 2.4 | 1.2 | 0.71 |
| 124 | TTAATT | | | | | | | | | | |
| | GTTTAT | | | | | | | | | | |
| | AT | | | | | | | | | | |
| GA | TGATGG | 123 | N/A | 23.46 | 26.03 | 20.98 | 24.59 | 13.15 | 15.36 | 6.44 | 5.84 |
| 125 | TAAGAC | | | | | | | | | | |
| | ACTTTG | | | | | | | | | | |
| | GT | | | | | | | | | | |
| GA | GGAGTA | 124 | N/A | 30.93 | 32.19 | 18.11 | 28.57 | 15.14 | 14.56 | 7.37 | 5.22 |
| 126 | GTTCTT | | | | | | | | | | |
| | GGTGCT | | | | | | | | | | |
| | CT | | | | | | | | | | |
| GA | AACATG | 125 | H239R | 43.8 | 45.03 | 35.09 | 34.98 | 23.07 | 24.46 | 12.12 | 12.5 |
| 127 | ATGGTA | | | | | | | | | | |
| | AGACAC | | | | | | | | | | |
| | TT | | | | | | | | | | |
| GA | TGAAGA | 126 | F228P, | 57.41 | 74.82 | 54.67 | 60.9 | 34.35 | 48.55 | 22.73 | 17.55 |
| 128 | AAGGGA | | L229P | | | | | | | | |
| | GTAGTT | | | | | | | | | | |
| | CT | | | | | | | | | | |
| GA | AGTTCT | 127 | N/A | 0.19 | 0.07 | 0.07 | 0.13 | 0.05 | 0.11 | 0.1 | 0.08 |
| 129 | TGGTGC | | | | | | | | | | |
| | TCTTGG | | | | | | | | | | |
| | CT | | | | | | | | | | |
| GA | ATGATG | 128 | D240G | 22.16 | 22.73 | 18.57 | 20.93 | 10.79 | 10.52 | 5.93 | 5.09 |
| 130 | GTAAGA | | | | | | | | | | |
| | CACTTT | | | | | | | | | | |
| | GG | | | | | | | | | | |
| GA | GAAGAT | 129 | L216P, | 73.63 | 82.24 | 65.4 | 74.19 | 42.42 | 47.99 | 25.24 | 27.14 |
| 131 | AGAGAA | | S217P | | | | | | | | |
| | ATTTCT | | | | | | | | | | |
| | GT | | | | | | | | | | |
| GA | GGAAGA | 130 | S217P | 76.43 | 88.77 | 69.65 | 70.55 | 49.49 | 46.32 | 22.36 | 23.83 |
| 132 | TAGAGA | | | | | | | | | | |
| | AATTTC | | | | | | | | | | |
| | TG | | | | | | | | | | |
| GA | TATTTC | 131 | I234T | 33.9 | 31.49 | 26.95 | 30.48 | 14.09 | 21.88 | 12.1 | 11.31 |
| 133 | ATTCAA | | | | | | | | | | |
| | CTGAAG | | | | | | | | | | |
| | AA | | | | | | | | | | |
| GA | ATTTCA | 132 | N/A | 41.07 | 47.04 | 38.09 | 38.78 | 24.71 | 21 | 15.48 | 15.68 |
| 134 | TTCAAC | | | | | | | | | | |
| | TGAAGA | | | | | | | | | | |
| | AA | | | | | | | | | | |
| GA | GTCTAC | 133 | Y273C | 34.5 | 36.73 | 31.33 | 31.88 | 19.77 | 19.85 | 12.12 | 10.61 |
| 135 | TGTGAT | | | | | | | | | | |
| | GTTATA | | | | | | | | | | |
| | TC | | | | | | | | | | |
| GA | TAAATG | 134 | I249T | 31.45 | 31.46 | 22.08 | 22.42 | 12.96 | 13.18 | 6.23 | 5 |
| 136 | GTGGTA | | | | | | | | | | |
| | CATTCA | | | | | | | | | | |
| | GC | | | | | | | | | | |
| GA | TATCAG | 135 | N/A | 39.23 | 45.5 | 35.54 | 35.24 | 20.93 | 15.07 | 10.3 | 9.13 |
| 137 | GTAAAA | | | | | | | | | | |
| | CCTGTC | | | | | | | | | | |
| | TA | | | | | | | | | | |
| GA | TGTACC | 136 | T247A | 38.65 | 38.24 | 29.16 | 29.42 | 19.7 | 17.09 | 10.32 | 8.59 |
| 138 | ACCATT | | | | | | | | | | |
| | TATAAC | | | | | | | | | | |
| | AG | | | | | | | | | | |
| GA | TTCACC | 137 | N/A | 13 | 11.96 | 10.47 | 9.45 | 6.86 | 4.95 | 3.51 | 3.78 |
| 139 | TCTGTT | | | | | | | | | | |
| | ATAAAT | | | | | | | | | | |
| | GG | | | | | | | | | | |
| GA | AACAGA | 138 | R252G | 30.27 | 41.96 | 32.49 | 33.65 | 18.78 | 17.9 | 9.48 | 7.7 |
| 140 | GGTGAA | | | | | | | | | | |
| | CATACA | | | | | | | | | | |
| | AG | | | | | | | | | | |
| GA | TTGAGA | 139 | S267P | 0.4 | 0.41 | 0.37 | 0.51 | 0.4 | 0.67 | 0.44 | 0.45 |
| 141 | GTTGCT | | | | | | | | | | |
| | GGGTCT | | | | | | | | | | |
| | GA | | | | | | | | | | |
| GA | TTAATT | 141 | 1285V | 12.33 | 10.68 | 9.23 | 8.81 | 5.47 | 4.63 | 3.05 | 2.94 |
| 143 | CAACAT | | | | | | | | | | |
| | CGAATA | | | | | | | | | | |
| | GA | | | | | | | | | | |
| GA | TTTGGG | 142 | R308G | 15.05 | 15.17 | 10.82 | 12.69 | 7.52 | 8.04 | 4.16 | 4.56 |
| 144 | AGGCTT | | | | | | | | | | |
| | GATGGT | | | | | | | | | | |
| | AA | | | | | | | | | | |
| GA | CATTAT | 143 | N/A (intron) | 66.32 | 62.98 | 55.96 | 58.5 | 37.77 | 37.26 | 20.55 | 17.46 |
| 145 | ATTCAG | | | | | | | | | | |
| | GTAGTC | | | | | | | | | | |
| | CA | | | | | | | | | | |
| GA | TTGGGA | 144 | R308G | 22.26 | 23.4 | 16.22 | 18.81 | 9.91 | 10.61 | 4.57 | 4.62 |
| 146 | GGCTTG | | | | | | | | | | |
| | ATGGTA | | | | | | | | | | |
| | AG | | | | | | | | | | |
| GA | TTTTGG | 145 | R308G | 3.99 | 3.67 | 3.46 | 2.72 | 1.96 | 2.41 | 1.03 | 1.2 |
| 147 | GAGGCT | | | | | | | | | | |
| | TGATGG | | | | | | | | | | |
| | TA | | | | | | | | | | |
| GA | ACAAAA | 146 | N294G | 25.08 | 21.83 | 22.57 | 21.33 | 12.96 | 16.13 | 8.62 | 7.59 |
| 148 | CTTCAA | | | | | | | | | | |
| | TGAAAC | | | | | | | | | | |
| | GT | | | | | | | | | | |
| GA | TATGGT | 147 | Y304C | 0.47 | 0.43 | 0.42 | 0.48 | 0.52 | 0.47 | 0.45 | 0.47 |
| 149 | TTTGGG | | | | | | | | | | |
| | AGGCTT | | | | | | | | | | |
| | GA | | | | | | | | | | |
| GA | ACTACA | 148 | Y302C, | 51.08 | 51.83 | 40.09 | 43.73 | 23.76 | 22.55 | 10.14 | 9.52 |
| 150 | AATATG | | K303G | | | | | | | | |
| | GTTTTG | | | | | | | | | | |
| | GG | | | | | | | | | | |
| GA | GAGAAC | 149 | N301G | 45.3 | 44.63 | 31.68 | 35.7 | 22.72 | 20.85 | 10.83 | 12.4 |
| 151 | TACAAA | | | | | | | | | | |
| | TATGGT | | | | | | | | | | |
| | TT | | | | | | | | | | |
| GA | AGGACA | 150 | H391R | 15.32 | 14.78 | 9.37 | 11.5 | 6.33 | 6.89 | 4.95 | 4.38 |
| 152 | CTTCAA | | | | | | | | | | |
| | CTGTCC | | | | | | | | | | |
| | AG | | | | | | | | | | |
| GA | CTTTTC | 101 | N/A (intron) | 22.82 | 23.57 | 18.25 | 16.17 | 8.41 | 7.17 | 4.79 | ND |
| 153 | AGGAGA | | | | | | | | | | |
| | ATTTTG | | | | | | | | | | |
| | GT | | | | | | | | | | |
| GA | ACGTGG | 242 | E300G | 4.85 | 5.62 | 3.78 | 4 | 2.98 | 2.75 | 2.38 | 1.96 |
| 276 | GAGAAC | | | | | | | | | | |
| | TACAAA | | | | | | | | | | |
| | TA | | | | | | | | | | |
| GA | CGATGT | 243 | N/A | 2.36 | 2.43 | 1.69 | 1.87 | 1.53 | 1.72 | 1.16 | 1.17 |
| 277 | TGAATT | | | | | | | | | | |
| | AATGTC | | | | | | | | | | |
| | CA | | | | | | | | | | |
| GA | CACAAA | 244 | Q293R | 4.09 | 4.48 | 2.43 | 2.81 | 2.2 | 2.01 | 1.68 | 1.74 |
| 278 | ACTTCA | | | | | | | | | | |
| | ATGAAA | | | | | | | | | | |
| | CG | | | | | | | | | | |
| GA | TACGAA | 245 | I333V | 22.69 | 29.48 | 19.35 | 21.19 | 12.41 | 15.31 | 7.23 | 7.37 |
| 279 | TTGAGT | | | | | | | | | | |
| | TGGAAG | | | | | | | | | | |
| | AC | | | | | | | | | | |
| GA | CTATGG | 246 | S322P | 22.78 | 30.95 | 22.27 | 19.12 | 16.01 | 16.29 | 11.29 | 5.95 |
| 284 | AGTATA | | | | | | | | | | |
| | TCTTCT | | | | | | | | | | |
| | CT | | | | | | | | | | |

[0696] The gRNAs GA066/GA095, GA096, G097, GA346, matching the 5′-CCCGCACCTTGGCGCAGCGG-3′ (SEQ ID NO: 13) (GA066) protospacer sequence but with more extensive chemical modifications of various kinds (Table 1) were synthesized. Similarly, three gRNAs (GA098, GA099, GA100) were synthesized matching the 5′-AAGATACCTGAATAACCCTC-3′ (SEQ ID NO: 15) (GA091) human protospacer sequence, as well as four gRNAs (GA067/GA101, GA102, GA103, GA347) matching the 5′-AAGATACCTGAATAACTCTC-3′ (SEQ ID NO: 14) (GA067) cynomolgus protospacer sequence, but with more extensive chemical modifications of various kinds (Table 1). GA066 and GA095 contain the same chemical composition and modification pattern, as do GA067 and GA101 with one another. It is contemplated that such gRNAs may improve stability against nucleases and gRNA-base editor complex, and reduce or suppress gRNA-triggered immune reaction. Each of the gRNAs described in Table 8, with an equivalent amount of in vitro transcribed ABE8.8 mRNA MA002 (1:1 ratio by weight), were co-transfected into primary human hepatocytes and primary cynomolgus hepatocytes via MessengerMax reagent, using various dilutions to assess for editing activity at different concentrations of test article. Three days after transfection, genomic DNA was harvested from the hepatocytes, and then assessed for base editing of the target splice site with next-generation sequencing. In both human and cynomolgus hepatocytes, as high as 60%-70% editing of the target splice site (PCSK9 intron 1 splice donor; ANGPTL3 intron 6 splice donor) were observed (Table 8).

TABLE 8
Chemically modified gRNAs have high editing efficiency
in human and cynomolgus primary hepatocytes

| | | Human Primary Hepatocytes- | | | | Cynomolgus Primary Hepatocytes- | | | |
|---|---|---|---|---|---|---|---|---|---|
| | | splice site editing % | | | | splice site editing % | | | |
| | | 2500 | 500 | 100 | 20 | 2500 | 500 | 100 | 20 |
| gRNA | Species | ng/mL | ng/mL | ng/mL | ng/mL | ng/mL | ng/mL | ng/mL | ng/mL |
| GA066 | Human/ | 67.7 | 55.1 | 38.9 | 13.3 | 48.2 | 55.3 | 43.8 | 19.0 |
| | Cyno | | | | | | | | |
| GA096 | Human/ | 62.8 | 49.9 | 41.2 | 15.6 | 65.9 | 51.4 | 48.0 | 19.6 |
| | Cyno | | | | | | | | |
| GA097 | Human/ | 67.3 | 68.1 | 54.1 | 22.6 | 62.2 | 58.1 | 56.8 | 28.0 |
| | Cyno | | | | | | | | |
| GA098 | Human | 70.7 | 51.3 | 36.3 | 10.9 | ND | ND | ND | ND |
| GA099 | Human | 70.3 | 47.0 | 34.4 | 11.5 | ND | ND | ND | ND |
| GA100 | Human | 69.2 | 48.6 | 38.5 | 12.4 | ND | ND | ND | ND |
| GA066/ | Cyno | ND | ND | ND | ND | 61.4 | 49.0 | 45.9 | 16.0 |
| GA101 | | | | | | | | | |
| GA102 | Cyno | ND | ND | ND | ND | 62.5 | 51.7 | 58.1 | 25.9 |
| GA103 | Cyno | ND | ND | ND | ND | 62.7 | 44.2 | 44.6 | 17.2 |

[0697] The method by which classical CRISPR/Cas9 disrupts a gene by ultimately introducing an indel, is distinctly and significantly different than base editing. Specifically, base editing is used to introduce a base mutation(s) within a target window closer to the 5′ region of the protospacer, as opposed to 3-4 bp away from the PAM, as routinely seen with CRISPR/Cas9. Further, a target region that is highly amenable to CRISPR/Cas9 editing does not necessarily mean base editing at that location will occur, and vice versa. LNPs containing either: (1) Cas9 mRNA MS010 and a gRNA matching 5′-CCCGCACCTTGGCGCAGCGG-3′ (SEQ ID NO: 13) (GA097) protospacer sequence; or (2) ABE8.8 mRNA MA004 and gRNA matching 5′-CCCGCACCTTGGCGCAGCGG-3′ (SEQ ID NO: 13) (GA097) protospacer sequence, were transfected in human primary hepatocytes. Sanger sequencing of the edited genomic DNA was performed and illustrated the difference in gene editing that occurred from CRISPR/Cas9 compared to base editing (FIG. 11). The arrow highlights the main base editing position, while the scissors highlight the general region where Cas9 cuts.

[0698] To demonstrate that base editing of a splice site disrupts splicing, reverse transcription-PCR of mRNA from treated primary human hepatocytes, using primers in exon 1 and exon 2, was performed. Results confirmed that splice site disruption resulted in the use of alternative splice donor sites within intron 1, well downstream of the in-frame TAG stop codon (FIG. 12, Table 9). The table reports the number of mapped reads for each splice site donor as determined from next generation sequencing.

TABLE 9
Alternative splice donor sites within PCSK9 intron 1 resulting from editing of
PCSK9 exon 1 splice-donor adenine base in primary human hepatocytes.

| | | Number of aligned reads corresponding to: | | | | | |
|---|---|---|---|---|---|---|---|
| | | Intron | Intron | Intron | Intron | Intron | Intron |
| | | length | length | length | length | length | length |
| | | 0 | 83 | 87 | 135 | 153 | 154 |
| | Mapped | (GT | (CC | (GT | (CG | (GC | (CA |
| Sample* | reads | donor) | donor) | donor) | donor) | donor) | donor) |
| control | 7827 | 3187 | 0 | 0 | 0 | 0 | 0 |
| (1) | | | | | | | |
| control | 10584 | 5956 | 0 | 0 | 0 | 0 | 0 |
| (2) | | | | | | | |
| control | 8575 | 2307 | 0 | 0 | 0 | 0 | 0 |
| (3) | | | | | | | |
| control | 6721 | 5153 | 0 | 0 | 0 | 0 | 0 |
| (4) | | | | | | | |
| treated | 8278 | 2368 | 0 | 243 | 184 | 984 | 0 |
| (1) | | | | | | | |
| treated | 4127 | 1851 | 19 | 235 | 0 | 785 | 0 |
| (2) | | | | | | | |
| treated | 5694 | 1096 | 21 | 563 | 0 | 392 | 130 |
| (3) | | | | | | | |
| treated | 4214 | 2036 | 0 | 70 | 0 | 1203 | 0 |
| (4) | | | | | | | |

*Four different primer pairs were used for RT-PCR of the contro/treated samples.

### Example 4. PCSK9 and ANGPTL3 Off-Target Validation In Vitro

[0699] With a view towards establishing the safety of a base-editing therapy knocking down PCSK9 in the human liver in vivo, off-target mutagenesis analysis was assessed. A list of candidate sites in the human genome for off-target mutagenesis was assembled using two different methods. The first method used bioinformatic analysis of the human genome, identifying all sites with a PAM sequence compatible with Streptococcus pyogenes Cas9 (and therefore ABE 8.8) and a protospacer sequence with up to 4 single-nucleotide mismatches with the GA066 spacer sequence 5′-CCCGCACCTTGGCGCAGCGG-3′ (SEQ ID NO: 13). The second method to generate candidate sites used an in vitro biochemical assay, ONE-seq, that determined the propensity of a ribonucleoprotein comprising the ABE8.8 base editor protein and PCSK9 gRNA (5′-CCCGCACCTTGGCGCAGCGG-3′(SEQ ID NO: 13)) to cleave oligonucleotides in a library. The reference human genome (GRCh38) was searched for sites with up to 6 mismatches to the protospacer sequence specified by the PCSK9 gRNA (5′-CCCGCACCTTGGCGCAGCGG-3′ (SEQ ID NO: 13)), and sites with up to 4 mismatches plus up to 2 DNA or RNA bulges using Cas-Designer were identified. More specifics on ONE-seq library preparation, experimental protocol, and bioinformatic analysis are described in the additional detailed methods section.

[0700] Any cleaved oligonucleotides are PCR-amplified and undergo next-generation sequencing. Oligonucleotides with higher sequence counts reflect a higher propensity for Cas9/gRNA cleavage in vitro and represent the sites most likely to suffer off-target mutagenesis in cells. The top site identified by the ONE-seq assay was the on-target PCSK9 site. The list of candidate off-target sites comprises more than 250 sites, and warranted further investigation (Table 10).

[0701] Primary human hepatocytes were treated with lipid nanoparticle (LNP) encapasulating ABE8.8 mRNA MA004 and PCSK9 gRNA (GA097 or GA346) at 1:1 weight ratio (see Lipid Nanoparticle Formulation and Analysis for details of LNP preparation) Upon next-generation sequencing using the Agilent SureSelect technology (Table 11), when the observed base editing rates in control cells were subtracted from the observed base editing rates in LNP-treated cells across the on-target site and candidate off-target sites (to account for background sequencing errors inherent in next-generation sequencing), appreciable base editing was observed at the on-target PCSK9 target site. These results were replicated in three different primary hepatocyte lots (STL, HLY, and JLP) from two male and one female patients.

[0702] Additionally, using hepatocytes from four individual donors (including lot TLY from a female patient, in addition to the three lots listed above), more than 50 off-target sites were assessed by performing next-generation sequencing of targeted PCR amplicons from LNP-treated versus untreated hepatocytes. Editing at none of these potential off-target sites, and only on-target editing at the PCSK9 target site, was observed (FIG. 13).

TABLE 10
PCSK9 gRNA (Protospacer 5′-CCCGCACCTTGGCGCAGCGG-3′(SEQ ID NO: 13))
candidate off-target sites as determined by ONE-seq

| | | Potential Off-target | SEQ | |
|---|---|---|---|---|
| Chromosome | Location | sequence (5′-3′) | ID NO: | Alignment |
| 1 | 55040029-55040051 | CCCGCACCTTGGCGCAGCGGTGG | 80 | X00 |
| 1 | 6888039-6888061 | CTAGCACC-TGCCCCAGCGGTGG | 453 | RNA41 |
| 1 | 10640222-10640244 | TCCCTACCCTGGCACAGCAGGGG | 454 | X60 |
| 1 | 15101074-15101096 | CCCACACTCAGACGCAGCGAGGG | 455 | X60 |
| 1 | 20712184-20712206 | CCCGCAC-TGGAGCAGCAGGGA | 456 | RNA32 |
| 1 | 22256342-22256365 | CTTGCACCTTGGTAGCAGCTGGGG | 457 | DNA41 |
| 1 | 25103342-25103364 | CTGGCACCATGGCCCAGCAGTGG | 458 | X50 |
| 1 | 29882027-29882049 | ACTGCATCTTAGTGCAGAGGTGG | 459 | X60 |
| 1 | 40866872-40866894 | TCCACACCTTGGCGCACTGGAAG | 460 | X50 |
| 1 | 43692630-43692652 | CATTCACCTTGTCACAGCTGGGG | 461 | X60 |
| 1 | 44163492-44163514 | ACCGCACCATTGCACAGCCTAGG | 462 | X60 |
| 1 | 54256943-54256966 | GCCGCACCATGGGCACAGCGGGGA | 463 | DNA41 |
| 1 | 60335313-60335335 | CCCATACC-TGGCACAGCGGTGG | 464 | RNA31 |
| 1 | 64198527-64198549 | CAAGCACC-TGGCTCAGAGGTGG | 465 | RNA41 |
| 1 | 64266524-64266546 | ACCGCACC-TGGCACAGTGGAAG | 466 | RNA41 |
| 1 | 110096163-110096185 | CCCCACCCTTGGCACAGAGCAGG | 467 | X60 |
| 1 | 121262583-121262605 | CCAGCACC-TAGCGCAGAGCTGG | 468 | RNA41 |
| 1 | 145017699-145017721 | CCAGCACC-TAGCGCAGAGCTGG | 468 | RNA41 |
| 1 | 155615561-155615583 | CCCGCACC-TACCTCAGCAGGGG | 469 | RNA41 |
| 1 | 155751756-155751778 | CCCGCACC-TACCTCAGCAGGGG | 469 | RNA41 |
| 1 | 157194781-157194803 | CCCGCACCCCACCGCAGCGGGGG | 470 | X40 |
| 1 | 163263975-163263997 | TCTTTACCTTGGAGCAGCTGAGG | 471 | X60 |
| 1 | 175575740-175575762 | CCCGCACCACAGTGCACCGGGGG | 472 | X50 |
| 1 | 204314754-204314776 | CCTCCACAATGGCGCAGGGGCGG | 473 | X50 |
| 1 | 206281058-206281080 | CCAGCACC-TAGCGCAGAGCTGG | 468 | RNA41 |
| 1 | 208574946-208574968 | CCAGCACC-TGGCACAGAAGAGG | 474 | RNA41 |
| 1 | 228337504-228337526 | ACCGCACCAAGGTGCATAGGAGG | 475 | X60 |
| 1 | 240808285-240808307 | CCAGCA-CTTGCCCCAGCAGAGG | 476 | RNA41 |
| 2 | 9138986-9139008 | CTCCCACCCTGGCCCAGCGGGGG | 477 | X40 |
| 2 | 11670027-11670049 | ACAGCACCTTGGCCCAGAGGCGA | 478 | X50 |
| 2 | 15561025-15561047 | ACGGCACCTTGGGCTAGCGGGGG | 479 | X50 |
| 2 | 42969964-42969986 | CCCGCACCCAGCTGCAGCCGAGG | 480 | X50 |
| 2 | 69112187-69112209 | CCAGCACC-TGGTGCAGAGTAGG | 481 | RNA41 |
| 2 | 71667395-71667417 | CCCACACCTGGGCCCAGTGGAGG | 482 | X40 |
| 2 | 72985325-72985347 | CCAGCACC-TGGTGCAGCTTAGG | 483 | RNA41 |
| 2 | 85317392-85317414 | TCCACACAATGGCACAGCAGAGG | 484 | X60 |
| 2 | 90356123-90356145 | CCCGCACC-TGGCTCAGAGGGTC | 485 | RNA41 |
| 2 | 91447288-91447310 | CCCGCACC-TGGCTCAGAGGGTC | 485 | RNA41 |
| 2 | 107914896-107914919 | CGGGCACCATGGCAGCAGCGGAGG | 486 | DNA31 |
| 2 | 110633933-110633956 | CGGGCACCATGGCAGCAGCGGAGG | 486 | DNA31 |
| 2 | 120922089-120922111 | CCCACACCATGGCCCAGTGAGAG | 487 | X60 |
| 2 | 127571237-127571259 | CCAGCACC-TGGCACAGTGAAGG | 488 | RNA41 |
| 2 | 132524147-132524169 | CCCACACATGGCCACAGCAGTGG | 489 | X60 |
| 2 | 179801496-179801518 | CTGGCACCTTAGCACAGAGGAGG | 490 | X50 |
| 2 | 182608809-182608831 | CCCGCACCAGAGCGCAGGGGGAG | 491 | X50 |
| 2 | 197360047-197360069 | GCCACACC-TGGCCCAGCAGGGG | 492 | RNA41 |
| 2 | 203642814-203642836 | CCCGCACCAGGGCGCAGATGGAG | 493 | X50 |
| 2 | 203866756-203866778 | TCCACACCTCAGCACAGCAGAGG | 494 | X60 |
| 2 | 219451287-219451309 | ACCGCACCTTGGCCCAGTGCTGG | 495 | X40 |
| 2 | 231686140-231686162 | ACCGCAGC-TGGCGCAGCATGGG | 496 | RNA41 |
| 3 | 3719723-3719745 | CCCGCACC-TGGCTCAGAGGGTC | 485 | RNA41 |
| 3 | 10287991-10288013 | CCCGCA-TTTGCCTCAGCGGTGG | 497 | RNA31 |
| 3 | 13178217-13178239 | CCAGCA-CTTGGCACAGCAGTGG | 498 | RNA31 |
| 3 | 14242673-14242696 | CCCACACCTTGGTGTCAGCGGAGG | 499 | DNA21 |
| 3 | 14819436-14819458 | CCTGCACC-CGGAGCAGCAGGGG | 500 | RNA41 |
| 3 | 38369509-38369531 | CCTCCACCTTGGCCCAGTGGAGG | 501 | X40 |
| 3 | 52005791-52005813 | CTCCCACCCTGGCGCAGAGGAGG | 502 | X40 |
| 3 | 54016522-54016544 | TCAGCACC-TGGTGCAGAGGAGG | 503 | RNA41 |
| 3 | 118171416-118171438 | CGAGCACCATGGCGCAGCCCCGG | 504 | X50 |
| 3 | 118171480-118171502 | CCCGCA-CTTGGAGCAGCCGGCG | 505 | RNA31 |
| 3 | 139288546-139288568 | GGAGCACCTTGACCCAGCAGAGG | 506 | X60 |
| 3 | 139677330-139677352 | CCAGCA-CTTAGCCCAGCAGCGG | 507 | RNA41 |
| 3 | 139731008-139731030 | CCCGCACCTCGGCACAGCTAGGG | 508 | X40 |
| 3 | 150408362-150408384 | GCCCCATCTTGGCCCAGCGGAGG | 509 | X40 |
| 3 | 182806878-182806900 | CTAGAACCATGGTGCAGAGGGGG | 510 | X60 |
| 4 | 1221653-1221675 | ATCCCACCTCGGCACAGCTGGGG | 511 | X60 |
| 4 | 1308120-1308142 | CCCGCACCGTGGTACAGCCTGTG | 512 | X60 |
| 4 | 6008382-6008404 | CCCGCACC-AGGCCCAGCTGGCG | 513 | RNA41 |
| 4 | 6747615-6747637 | CCCACACCTTGGTGCAGCTCTGT | 514 | X50 |
| 4 | 7054192-7054214 | ACCACACC-TGTCCCAGCGGAGG | 515 | RNA41 |
| 4 | 37229056-37229078 | CACACTACTTGGCACAGAGGAGG | 516 | X60 |
| 4 | 84244376-84244398 | ACCGCA-CTCAGAGCAGCGGAGG | 517 | RNA41 |
| 4 | 114598629-114598651 | TCCGCA-CTTGGCTCAGCGGGGC | 518 | RNA31 |
| 4 | 115179695-115179717 | CCCCGCACTCGGAGCAGCGGCGG | 519 | X60 |
| 4 | 139511785-139511808 | TCCGCACCCTGAGAGCAGTGGAGG | 520 | DNA41 |
| 4 | 141615591-141615613 | CCCTGCACTTGGTGCAGCTGGGG | 521 | X60 |
| 4 | 158623208-158623230 | ACCGCACC-TGACCCAGTGGTGG | 522 | RNA41 |
| 4 | 182110224-182110246 | CTCCTACCATGGCACAGCTGAGG | 523 | X60 |
| 5 | 767330-767352 | CCCACACCAGGGCGCAGCTGAAG | 524 | X50 |
| 5 | 1516550-1516572 | CCAGTACCTTGGCCCAGCTTTGG | 525 | X50 |
| 5 | 77203454-77203476 | ACAGCACC-TGGCACAGTGGTGG | 526 | RNA41 |
| 5 | 126364896-126364918 | CCCACACC-TGGAGCACCAGGGG | 527 | RNA41 |
| 5 | 126628420-126628443 | CAAGCACCTTGGCAGCAGCTGAGG | 528 | DNA31 |
| 5 | 173667321-173667343 | CCCATGCCTTAGCACAGCGATGG | 529 | X60 |
| 5 | 178526685-178526707 | CTCTATCCTTGGCCCAGCAGTGG | 530 | X60 |
| 6 | 3751269-3751291 | CCCGCACCTTGCCGCAGCGGCCC | 531 | X30 |
| 6 | 15092621-15092643 | ATGGCACCTTGGCACATCAGAGG | 532 | X60 |
| 6 | 16346963-16346985 | CCCCGCACTCGGAGCAGCGGCGG | 519 | X60 |
| 6 | 29016770-29016792 | TCCCCACACTGTCGCAGAGGAGG | 533 | X60 |
| 6 | 36310604-36310626 | CCAGCACCATGGCACAGAGAGGT | 534 | X60 |
| 6 | 44047493-44047515 | ACAGCACC-TGGCACAGAGGAGG | 535 | RNA41 |
| 6 | 47477658-47477680 | ACCGCACCTGGCAGCAGCCGTGG | 536 | X50 |
| 6 | 73315113-73315135 | CCAGCACC-TGGAGCAGCCGAGG | 537 | RNA31 |
| 6 | 138138382-138138404 | CCAGCACC-TGGCACAAAGGAGG | 538 | RNA41 |
| 6 | 139537177-139537199 | GAGGCACCTTGGACCAGCAGCGG | 539 | X60 |
| 6 | 148698322-148698344 | CCCGCA-CTTGGAGCAGCCGGTG | 540 | RNA31 |
| 6 | 153756217-153756239 | CCAGCA-CTTAGTGCAGCGCAGG | 541 | RNA41 |
| 6 | 165843913-165843935 | CCCACACC-TGGAGCAGCAGGAG | 542 | RNA41 |
| 7 | 93102-93124 | CCCACACC-AGGCACGGCGGGGG | 543 | RNA41 |
| 7 | 5360719-5360741 | CCCTCACC-AGCCGCAGCAGGGG | 544 | RNA41 |
| 7 | 24849083-24849106 | CACCCGACTTGGCGACAGCGGGGG | 545 | DNA41 |
| 7 | 74043103-74043125 | ACCGCACC-TGGCACAGAAGGGG | 546 | RNA41 |
| 7 | 84150566-84150588 | CCCGCACC-TGGCTCAGAGGGTC | 485 | RNA41 |
| 7 | 96041009-96041031 | ACCACACC-TGGCCCAGCAGTGG | 547 | RNA41 |
| 7 | 98765214-98765236 | CCCTCACC-GGGCACAGAGGAGG | 548 | RNA41 |
| 7 | 106882973-106882995 | CCAGTACC-TGGCCCAGAGGAGG | 549 | RNA41 |
| 7 | 123763164-123763186 | CCCGCACC-AGGCGCAGGTGGAG | 550 | RNA41 |
| 7 | 129225099-129225122 | CAGGCACCTTGGCGGCAGCCGCGG | 551 | DNA31 |
| 7 | 139596895-139596917 | TGTGCACCATGGCACAGCGGGGA | 552 | X60 |
| 7 | 147737806-147737828 | CCCGCACC-TGGCTCAGAGGGTC | 485 | RNA41 |
| 7 | 150737589-150737611 | CCCGCACACAGACGCAGAGCAGG | 553 | X60 |
| 7 | 153256176-153256198 | TCCACACC-TGGCCCAGCTGTGG | 554 | RNA41 |
| 7 | 155527865-155527887 | CCTGCAC-TGGCCCAGCAGCGG | 555 | RNA32 |
| 8 | 2485153-2485175 | CCTGCA-CTAGCCGCAACGGGGG | 556 | RNA41 |
| 8 | 26191893-26191915 | TGAGCACCTTGGGGCAGCTGGGG | 557 | X50 |
| 8 | 100957388-100957410 | CCCGCA-CTTGGCGCAGCTGGCC | 558 | RNA31 |
| 8 | 139813559-139813582 | CCAGCACCTTGGCAGCAGCACCGG | 559 | DNA31 |
| 8 | 142499068-142499090 | TCCCCCACTTGGCACAGCTGGGG | 560 | X60 |
| 8 | 143383198-143383220 | CCAGCA-CAGGGCGCAGAGGTGG | 561 | RNA41 |
| 9 | 33873295-33873317 | CCCACCCCTTAGCACAGCAATGG | 562 | X60 |
| 9 | 34958979-34959001 | CCCACACCGTGGCCCAGAGGTGG | 563 | X40 |
| 9 | 109123571-109123593 | CCAGCACC-TGGCACAGCATAGG | 564 | RNA41 |
| 9 | 137012994-137013016 | ACCACTACCTGGCCCAGCGGTGG | 565 | X60 |
| 9 | 137167999-137168021 | TCCGCACCTTGGTCCAGCAGGGG | 566 | X40 |
| 9 | 137477162-137477184 | TACGCACC-TGGCTCAGCAGAGG | 567 | RNA41 |
| 10 | 1572578-1572600 | AGCCCAGCATGGCGCAGAGGTGG | 568 | X60 |
| 10 | 5824416-5824438 | CCAGCACC-TGGCACAGAGGAGA | 569 | RNA41 |
| 10 | 16285410-16285432 | ACCGCACC-TGGCCCAGATGGGG | 570 | RNA41 |
| 10 | 20297215-20297237 | CCCGCACC-TGGCTCAGAGGGGT | 571 | RNA31 |
| 10 | 21126683-21126705 | ACCGCACC-TGGCCCAGTGGAGG | 572 | RNA31 |
| 10 | 28839554-28839576 | CCCACATCCTGGCCCAGCAGGGG | 573 | X50 |
| 10 | 47223533-47223555 | CCTGCACC-AGGCTCAGTGGGGG | 574 | RNA41 |
| 10 | 59089166-59089189 | CGAGCACCTTGGCAGCAGCTGAGG | 575 | DNA31 |
| 10 | 60958888-60958910 | ACCGCACC-TGGCCCAGAGTAGG | 576 | RNA41 |
| 10 | 88036335-88036357 | ACAGCACC-TGGCGCAGAGCGGG | 577 | RNA41 |
| 10 | 97031490-97031512 | ACTCCACCATGGCACAGCGTGGG | 578 | X60 |
| 10 | 111259337-111259359 | ACCACACC-TGGCCCAGAGGAGG | 579 | RNA41 |
| 10 | 122572126-122572148 | GCGGCACCTTGGCCCAGCGTGGG | 580 | X40 |
| 10 | 130560773-130560795 | CCTGCACCTGAGCACAGAGGAGG | 581 | X50 |
| 11 | 2916587-2916609 | CCCGCACCCT-GTGCAGCCGAGG | 582 | RNA31 |
| 11 | 10630862-10630884 | CCCAC-TCTTGGCACAGGGGAGG | 583 | RNA41 |
| 11 | 18729719-18729741 | CCCGCACC-AGGTGCAGGAGTGG | 584 | RNA41 |
| 11 | 47350413-47350435 | ACCGCACC-TGGCCCAGCAAAGG | 585 | RNA41 |
| 11 | 47941203-47941225 | GCTGCACCTTAGCACAGTGAAGG | 586 | X60 |
| 11 | 57761981-57762003 | TCAGCACCTTGGCGAAGCCTTGG | 587 | X50 |
| 11 | 72870610-72870632 | ACCGCACC-TGGCCCAAAGGGGG | 588 | RNA41 |
| 11 | 76659109-76659131 | CCCTCACCCTGGCACAGCCGGGG | 589 | X40 |
| 11 | 117692097-117692119 | TTCACACCTTGGTGCAGAGGTGA | 590 | X60 |
| 11 | 121325368-121325390 | CCAGCACC-TAGCGCAGCGGCTG | 591 | RNA31 |
| 11 | 129981605-129981627 | ACCGCACC-TGGCCCATCAGGGG | 592 | RNA41 |
| 12 | 3851459-3851481 | CCCGCACC-TGGCTCAGCGGGTC | 593 | RNA31 |
| 12 | 32850805-32850827 | TCAGCACC-TGGAGCAGCCGAGG | 594 | RNA41 |
| 12 | 48000120-48000142 | CCCCACCCTTGGTGCAGAGGAGG | 595 | X50 |
| 12 | 53328526-53328548 | CATACACCTTGCCGCAGCCAGGG | 596 | X60 |
| 12 | 54190321-54190343 | CACACACCTTAGCACAGCCAAGG | 597 | X60 |
| 12 | 65971780-65971802 | CTAGCACC-TGGCACAGTGGTGG | 598 | RNA41 |
| 12 | 95590363-95590385 | ACCGTACC-TGGCCCAGAGGAGG | 599 | RNA41 |
| 12 | 106690762-106690784 | GCCCCACCTTAATGCAGCGGGGG | 600 | X50 |
| 12 | 114491014-114491036 | CCAGCTACATGGCCCAGAGGAGG | 601 | X60 |
| 12 | 127431260-127431282 | CCCACACCAT-GCGCAGAGTGGG | 602 | RNA41 |
| 13 | 25788073-25788095 | CCCGCACCCAGGC-CAGCTGTGG | 603 | RNA31 |
| 13 | 69424400-69424422 | CCAGCACC-TGCTGCAGCGATGG | 604 | RNA41 |
| 13 | 85917572-85917594 | CCCGCACC-TGGCTCAGAGGGTC | 485 | RNA41 |
| 13 | 98388403-98388425 | TCCGCACCTTGGCCCAGTTGAAG | 605 | X50 |
| 14 | 20813343-20813366 | ACAGCACCTTGGCAGCAGAGGTGG | 606 | DNA31 |
| 14 | 24408232-24408254 | CCCGCACC-AGGCTCAGCAGCAG | 607 | RNA41 |
| 14 | 38663021-38663043 | CCAGCACC-TGGCACAGCCAGGG | 608 | RNA41 |
| 14 | 65250553-65250575 | GCTGCACCCTGCCACAGAGGAGG | 609 | X60 |
| 14 | 89310097-89310119 | CCAGCACCCTAGTGCAGAGTGGG | 610 | X60 |
| 14 | 90554536-90554558 | CCCGCACC-TGGCACAGCACCAG | 611 | RNA41 |
| 14 | 100213915-100213937 | CCCG-ACCCTGACGCAGCCTGGG | 612 | RNA41 |
| 14 | 101153383-101153405 | CCCGCACCCTATCACAGCAGAGG | 613 | X50 |
| 14 | 102929418-102929440 | CTCGCACC-AGGCGCAGCCGTGG | 614 | RNA31 |
| 15 | 42252041-42252063 | CCCGCACC-TGGCTCAGCGGGTC | 593 | RNA31 |
| 15 | 47827093-47827115 | CATGTACCTTGCCACAGCAGGGG | 615 | X60 |
| 15 | 69452825-69452848 | CGAGCACCTTGGCGGCAGCTGAGG | 616 | DNA31 |
| 15 | 86059010-86059032 | TCCACACCTAGGCACAGCCTAGG | 617 | X60 |
| 15 | 94089230-94089252 | CCAGCACCAAGGCTCAGCTGAGG | 618 | X50 |
| 15 | 99993270-99993292 | ACCGCACC-TGGCACATTGGAGG | 619 | RNA41 |
| 16 | 1003178-1003200 | CCCACACCTTGGCCCAGCCCTGG | 620 | X40 |
| 16 | 2092489-2092511 | GCCGCACC-TGCCGCAGCCGTGG | 621 | RNA31 |
| 16 | 3089598-3089620 | CCCGCA-CTGGGTGCAGTGGTGG | 622 | RNA31 |
| 16 | 14882693-14882715 | CCCACACCCAGGTGCAGCGGCAG | 623 | X50 |
| 16 | 16097875-16097897 | CCAGCACC-TGGCACAGCAGGTG | 624 | RNA41 |
| 16 | 16281338-16281360 | CCCACACCCAGGTGCAGCGGCAG | 623 | X50 |
| 16 | 18430777-18430799 | CCCACACCCAGGTGCAGCGGCAG | 623 | X50 |
| 16 | 18513312-18513334 | CCCACACCCAGGTGCAGCGGCAG | 623 | X50 |
| 16 | 21358246-21358268 | CCCGCATCTTGGTGCAGCTGCTT | 625 | X50 |
| 16 | 28383449-28383471 | ACCGCACCATGGTGCAGCTGGGC | 626 | X50 |
| 16 | 28731839-28731861 | ACCGCACCATGGTGCAGCTGGGC | 626 | X50 |
| 16 | 29792483-29792505 | CCAACACC-TGGCGCAGAGTAGG | 627 | RNA41 |
| 16 | 29863301-29863323 | CTCGTACCAAAGCGCAGAGGAGG | 628 | X60 |
| 16 | 30783356-30783378 | CCCGCA-CTCGGTGCAGCGGTAT | 629 | RNA41 |
| 16 | 31081352-31081374 | CCCGCA-CTGGGTGCAGCGGAAG | 630 | RNA31 |
| 16 | 31436901-31436923 | GCCGCA-CTTGGCGCAGCTGTGG | 631 | RNA21 |
| 16 | 67748649-67748671 | CTAACACCTTGGTGCAGAGGTGG | 632 | X50 |
| 16 | 78768901-78768923 | CCTACACCATGGCGCAGCGTCAG | 633 | X50 |
| 16 | 81278358-81278380 | CCAGCACC-TGGCACATCGGTGG | 634 | RNA31 |
| 16 | 88044071-88044093 | CCCGCATCTTGGTGCAGCTGCTT | 625 | X50 |
| 16 | 88839686-88839708 | CCCGCA-CATGGTGCAGTGGCTG | 635 | RNA41 |
| 17 | 7223899-7223921 | CCCAC-CCCTGGCCCAGCCGAGG | 636 | RNA41 |
| 17 | 7462659-7462681 | TGCACACCTTGGCGCAGTGGGGG | 637 | X40 |
| 17 | 7511796-7511818 | CCAGCACC-TGGCACAGGGGAGG | 638 | RNA31 |
| 17 | 19391599-19391621 | CCCACACC-AGGCACAGAGGAGG | 639 | RNA41 |
| 17 | 26736056-26736078 | CCCGCACC-TGGCTCAGAGGGTC | 485 | RNA41 |
| 17 | 28662198-28662220 | GTAGCACGTTGACGCAGCAGCGG | 640 | X60 |
| 17 | 38870195-38870217 | GCCGCACC-GGGCGCAGTTGGGG | 641 | RNA41 |
| 17 | 45753295-45753317 | CCCACACC-TGCCCCAGAGGTGG | 642 | RNA41 |
| 17 | 45993823-45993845 | CCCACAGC-TGGCCCAGCAGGGG | 643 | RNA41 |
| 17 | 63929863-63929885 | TCAGCACCTTGGCACAGCTGAAG | 644 | X50 |
| 17 | 79154410-79154432 | ACAGCACCTCGGTGCAGCAGAGA | 645 | X60 |
| 17 | 81131740-81131762 | CCCTC-CCATGGCGCAGCTTCGG | 646 | RNA41 |
| 18 | 3448410-3448432 | CCCGCACC-GGGCGCAGCAGCTG | 647 | RNA31 |
| 18 | 39380982-39381004 | CATGCTACATGGCGCAGCGGTAG | 648 | X60 |
| 18 | 58247634-58247656 | CTCGCACCCGAACGCAGCAGAGG | 649 | X60 |
| 18 | 59917417-59917439 | TCCCCACCCCAGCGCAGCAGAGG | 650 | X60 |
| 18 | 78993257-78993279 | CGAAGACCTTGGCGCAGAAGCGG | 651 | X60 |
| 19 | 1104611-1104633 | CCCGCACCTTGGCCTAGCGCGGT | 652 | X40 |
| 19 | 1274125-1274147 | TCTGCACCTTGGCGCAGCTGGAG | 653 | X40 |
| 19 | 2209581-2209603 | CTCCCACCTTAAAGCAGCGGTGG | 654 | X50 |
| 19 | 5543277-5543299 | ACCGCACC-TGGCCCAGAGTGGG | 655 | RNA41 |
| 19 | 6431799-6431821 | CCCCCACCTTGGCCCAGCGTTGG | 656 | X30 |
| 19 | 10872441-10872463 | GCCACACC-TCGCACAGCGGTGG | 657 | RNA41 |
| 19 | 11391283-11391305 | ACCACACCTTGCTGCAGAGGAGG | 658 | X50 |
| 19 | 11406443-11406465 | CCCGCA-GAGGGCGCAGCGGCTG | 659 | RNA41 |
| 19 | 12747607-12747629 | CCAGCAC-TGGCTCAGCAGAGG | 660 | RNA32 |
| 19 | 36110180-36110202 | ACCGCACC-TGGCCCAAAGGGGG | 588 | RNA41 |
| 19 | 46709648-46709670 | ACCGCACC-CGGCCCAGTGGAGG | 661 | RNA41 |
| 19 | 49720095-49720117 | CCTGCACTCAGGCGCAGACGGGG | 662 | X60 |
| 19 | 50490618-50490640 | GCTGCACCTTGGCACAGTGGAGG | 663 | X40 |
| 19 | 51068476-51068498 | CCCACACCCAGGCCCAGAGGAGG | 664 | X50 |
| 19 | 51606728-51606750 | CCTGCACCT-GCACAGCAGGGG | 665 | RNA32 |
| 19 | 53775475-53775498 | CGAGCACCTTGGCAGCAGCTGAGG | 575 | DNA31 |
| 19 | 56088833-56088855 | CTCGCACC-TGGTGCAGCACCGG | 666 | RNA41 |
| 20 | 13900645-13900667 | GCCGCAC-AGGCACAGCGGCGG | 667 | RNA32 |
| 20 | 23109029-23109051 | TCAGCACCTTGGCACATCCAGGG | 668 | X60 |
| 20 | 31859435-31859457 | CCTGCACCTTTGCACAGCACTGG | 669 | X50 |
| 20 | 45967752-45967774 | CCCGCA-TGTGGCGCAGCAGTGT | 670 | RNA41 |
| 20 | 49558961-49558983 | CCCAGCACTTGGTGAAGCGGAGG | 671 | X60 |
| 21 | 37176555-37176577 | CCCACAC-TGGTGCAGAGGTGG | 672 | RNA32 |
| 22 | 22912001-22912023 | CCTGCACCATGGTGCACCGGCAG | 673 | X50 |
| 22 | 25849024-25849046 | CCCGCAC-AGCCGCAGAGGAGG | 674 | RNA32 |
| 22 | 27735501-27735523 | ACCGCACC-TGGCACAGCTTGGG | 675 | RNA41 |
| 22 | 49971621-49971643 | CCCACACCCTGGCCCAGCCTCGG | 676 | X50 |
| X | 1842130-1842152 | CCAGCACTTTGGTACAGCATAGG | 677 | X60 |
| X | 23566446-23566468 | CCCGCACC-TGGCTCAGAGGGGT | 571 | RNA31 |
| X | 50814798-50814820 | CCCGCACCCTGGCTCAGTGTTGG | 678 | X40 |
| X | 76172984-76173006 | CCCGCAC-AGGCGCAGAGGTGG | 679 | RNA22 |
| X | 83385071-83385093 | CCAGCACC-TGGTCCAGTGGAGG | 680 | RNA41 |
| X | 107536875-107536897 | CCAGCACC-TGGCACAGAGTAGG | 681 | RNA41 |

TABLE 11
PCSK9 gRNA GA346 off-target site validation in human primary hepatocytes

| | | Lot #: | | | | | | | | |
|---|---|---|---|---|---|---|---|---|---|---|
| Chromo- | | STL | HLY | JLP | STL | HLY | JLP | Average | Average | Net |
| some | Location | Treated | Treated | Treated | Control | Control | Control | treated | untreated | Editing |
| 1 | 55040029- | 42.18 | 49.76 | 78.54 | 0.13 | 0.19 | 0.03 | 56.83 | 0.12 | 56.71 |
| | 55040051 | | | | | | | | | |
| 1 | 54256943- | 0 | 0.07 | 0.04 | 0.1 | 0 | 0.03 | 0.04 | 0.04 | −0.01 |
| | 54256966 | | | | | | | | | |
| 1 | 22256342- | 0 | 0 | 0.02 | 0 | 0.07 | 0.02 | 0.01 | 0.03 | −0.02 |
| | 22256365 | | | | | | | | | |
| 1 | 10640222- | 0 | 0 | 0 | 0 | 0.04 | 0 | 0.00 | 0.01 | −0.01 |
| | 10640244 | | | | | | | | | |
| 1 | 6888039- | 0 | 0 | 0.03 | 0.03 | 0.05 | 0.03 | 0.01 | 0.04 | −0.03 |
| | 6888061 | | | | | | | | | |
| 1 | 60335313- | 0 | 0.02 | 0.01 | 0.03 | 0 | 0.02 | 0.01 | 0.02 | −0.01 |
| | 60335335 | | | | | | | | | |
| 1 | 64198527- | 0 | 0.07 | 0 | 0.02 | 0.06 | 0 | 0.02 | 0.03 | 0.00 |
| | 64198549 | | | | | | | | | |
| 1 | 64266524- | 0 | 0.04 | 0.05 | 0.02 | 0 | 0.05 | 0.03 | 0.02 | 0.01 |
| | 64266546 | | | | | | | | | |
| 1 | 121262583- | 0.02 | 0.04 | 0.05 | 0.02 | 0 | 0.04 | 0.04 | 0.02 | 0.02 |
| | 121262605 | | | | | | | | | |
| 1 | 20712184- | 0.05 | 0.05 | 0.03 | 0.03 | 0.06 | 0.06 | 0.04 | 0.05 | −0.01 |
| | 20712206 | | | | | | | | | |
| 1 | 240808285- | 0.06 | 0.03 | 0.01 | 0 | 0.06 | 0.02 | 0.03 | 0.03 | 0.01 |
| | 240808307 | | | | | | | | | |
| 1 | 145017699- | 0.05 | 0.05 | 0.08 | 0.07 | 0.14 | 0.05 | 0.06 | 0.09 | −0.03 |
| | 145017721 | | | | | | | | | |
| 1 | 155615561- | 0 | 0.04 | 0.01 | 0 | 0.05 | 0.03 | 0.02 | 0.03 | −0.01 |
| | 155615583 | | | | | | | | | |
| 1 | 155751756- | 0.02 | 0 | 0.06 | 0.01 | 0.09 | 0.07 | 0.03 | 0.06 | −0.03 |
| | 155751778 | | | | | | | | | |
| 1 | 206281058- | 0 | 0.08 | 0.08 | 0.02 | 0.07 | 0 | 0.05 | 0.03 | 0.02 |
| | 206281080 | | | | | | | | | |
| 1 | 208574946- | 0 | 0 | 0 | 0 | 0 | 0.05 | 0.00 | 0.02 | −0.02 |
| | 208574968 | | | | | | | | | |
| 1 | 15101074- | 0 | 0 | 0.05 | 0.02 | 0.06 | 0 | 0.02 | 0.03 | −0.01 |
| | 15101096 | | | | | | | | | |
| 1 | 25103342- | 0.06 | 0 | 0.03 | 0.03 | 0.03 | 0 | 0.03 | 0.02 | 0.01 |
| | 25103364 | | | | | | | | | |
| 1 | 29882027- | 0.03 | 0 | 0.04 | 0.05 | 0 | 0 | 0.02 | 0.02 | 0.01 |
| | 29882049 | | | | | | | | | |
| 1 | 40866872- | 0 | 0 | 0.05 | 0.02 | 0 | 0 | 0.02 | 0.01 | 0.01 |
| | 40866894 | | | | | | | | | |
| 1 | 43692630- | 0 | 0 | 0 | 0.02 | 0.04 | 0.01 | 0.00 | 0.02 | −0.02 |
| | 43692652 | | | | | | | | | |
| 1 | 44163492- | 0 | 0 | 0 | 0 | 0 | 0.03 | 0.00 | 0.01 | −0.01 |
| | 44163514 | | | | | | | | | |
| 1 | 110096163- | 0 | 0 | 0.02 | 0.03 | 0 | 0.03 | 0.01 | 0.02 | −0.01 |
| | 110096185 | | | | | | | | | |
| 1 | 157194781- | 0 | 0 | 0.03 | 0 | 0 | 0 | 0.01 | 0.00 | 0.01 |
| | 157194803 | | | | | | | | | |
| 1 | 163263975- | 0 | 0 | 0 | 0 | 0 | 0 | 0.00 | 0.00 | 0.00 |
| | 163263997 | | | | | | | | | |
| 1 | 175575740- | 0 | 0.05 | 0.06 | 0.07 | 0 | 0 | 0.04 | 0.02 | 0.01 |
| | 175575762 | | | | | | | | | |
| 1 | 204314754- | 0 | 0.08 | 0.04 | 0.04 | 0.02 | 0.06 | 0.04 | 0.04 | 0.00 |
| | 204314776 | | | | | | | | | |
| 1 | 228337504- | 0.02 | 0 | 0.01 | 0.05 | 0.05 | 0.01 | 0.01 | 0.04 | −0.03 |
| | 228337526 | | | | | | | | | |
| 2 | 107914896- | 0.04 | 0 | 0 | 0.11 | 0 | 0 | 0.01 | 0.04 | −0.02 |
| | 107914919 | | | | | | | | | |
| 2 | 110633933- | 0 | 0 | 0.02 | 0.03 | 0 | 0.06 | 0.01 | 0.03 | −0.02 |
| | 110633956 | | | | | | | | | |
| 2 | 69112187- | 0 | 0 | 0 | 0 | 0.07 | 0 | 0.00 | 0.02 | −0.02 |
| | 69112209 | | | | | | | | | |
| 2 | 72985325- | 0.03 | 0 | 0 | 0.01 | 0 | 0.05 | 0.01 | 0.02 | −0.01 |
| | 72985347 | | | | | | | | | |
| 2 | 90356123- | 0.05 | 0 | 0 | 0.01 | 0 | 0 | 0.02 | 0.00 | 0.01 |
| | 90356145 | | | | | | | | | |
| 2 | 127571237- | 0.03 | 0.04 | 0.01 | 0 | 0.04 | 0.02 | 0.03 | 0.02 | 0.01 |
| | 127571259 | | | | | | | | | |
| 2 | 197360047- | 0 | 0.04 | 0 | 0 | 0 | 0.05 | 0.01 | 0.02 | 0.00 |
| | 197360069 | | | | | | | | | |
| 2 | 231686140- | 0.05 | 0.12 | 0 | 0.02 | 0 | 0 | 0.06 | 0.01 | 0.05 |
| | 231686162 | | | | | | | | | |
| 2 | 9138986- | 96.7 | 99.46 | 96.44 | 97.34 | 99.52 | 96.8 | 97.53 | 97.89 | −0.35 |
| | 9139008 | | | | | | | | | |
| 2 | 11670027- | 0.03 | 0 | 0.02 | 0 | 0 | 0.11 | 0.02 | 0.04 | −0.02 |
| | 11670049 | | | | | | | | | |
| 2 | 15561025- | 0 | 0 | 0 | 0.06 | 0.06 | 0.06 | 0.00 | 0.06 | −0.06 |
| | 15561047 | | | | | | | | | |
| 2 | 42969964- | 0.03 | 0 | 0.04 | 0.05 | 0.08 | 0.03 | 0.02 | 0.05 | −0.03 |
| | 42969986 | | | | | | | | | |
| 2 | 71667395- | 0 | 0.04 | 0.02 | 0.05 | 0.08 | 0 | 0.02 | 0.04 | −0.02 |
| | 71667417 | | | | | | | | | |
| 2 | 85317392- | 0.02 | 0.06 | 0 | 0.01 | 0 | 0.03 | 0.03 | 0.01 | 0.01 |
| | 85317414 | | | | | | | | | |
| 2 | 120922089- | 0.03 | 0.03 | 0.03 | 0.01 | 0 | 0.05 | 0.03 | 0.02 | 0.01 |
| | 120922111 | | | | | | | | | |
| 2 | 132524147- | 0 | 0.05 | 0 | 0.06 | 0.08 | 0.08 | 0.02 | 0.07 | −0.06 |
| | 132524169 | | | | | | | | | |
| 2 | 179801496- | 0.03 | 0.04 | 0 | 0.01 | 0 | 0.01 | 0.02 | 0.01 | 0.02 |
| | 179801518 | | | | | | | | | |
| 2 | 182608809- | 0 | 0 | 0.09 | 0.14 | 0 | 0 | 0.03 | 0.05 | −0.02 |
| | 182608831 | | | | | | | | | |
| 2 | 203866756- | 0.02 | 0.11 | 0.04 | 0 | 0.04 | 0.01 | 0.06 | 0.02 | 0.04 |
| | 203866778 | | | | | | | | | |
| 2 | 219451287- | 0 | 0 | 0.02 | 0 | 0.08 | 0.02 | 0.01 | 0.03 | −0.03 |
| | 219451309 | | | | | | | | | |
| 3 | 14242673- | 0.03 | 0 | 0 | 0.04 | 0 | 0.01 | 0.01 | 0.02 | −0.01 |
| | 14242696 | | | | | | | | | |
| 3 | 10287991- | 0 | 0 | 0 | 0 | 0 | 0.06 | 0.00 | 0.02 | −0.02 |
| | 10288013 | | | | | | | | | |
| 3 | 13178217- | 0.03 | 0 | 0.02 | 0.03 | 0.03 | 0.01 | 0.02 | 0.02 | −0.01 |
| | 13178239 | | | | | | | | | |
| 3 | 118171480- | 0 | 0 | 0 | 0.05 | 0 | 0 | 0.00 | 0.02 | −0.02 |
| | 118171502 | | | | | | | | | |
| 3 | 14819436- | 0.02 | 0 | 0 | 0.01 | 0 | 0.03 | 0.01 | 0.01 | −0.01 |
| | 14819458 | | | | | | | | | |
| 3 | 54016522- | 0.06 | 0 | 0 | 0.01 | 0.05 | 0 | 0.02 | 0.02 | 0.00 |
| | 54016544 | | | | | | | | | |
| 3 | 139677330- | 0 | 0 | 0 | 0.06 | 0 | 0.03 | 0.00 | 0.03 | −0.03 |
| | 139677352 | | | | | | | | | |
| 3 | 38369509- | 0.03 | 0 | 0 | 0 | 0 | 0 | 0.01 | 0.00 | 0.01 |
| | 38369531 | | | | | | | | | |
| 3 | 52005791- | 0.03 | 0 | 0.04 | 0 | 0 | 0.02 | 0.02 | 0.01 | 0.02 |
| | 52005813 | | | | | | | | | |
| 3 | 118171416- | 0.15 | 0.06 | 0 | 0 | 0 | 0.03 | 0.07 | 0.01 | 0.06 |
| | 118171438 | | | | | | | | | |
| 3 | 139288546- | 0 | 0.02 | 0.04 | 0.03 | 0 | 0 | 0.02 | 0.01 | 0.01 |
| | 139288568 | | | | | | | | | |
| 3 | 139731008- | 0 | 0.02 | 0.07 | 0.03 | 0 | 0 | 0.03 | 0.01 | 0.02 |
| | 139731030 | | | | | | | | | |
| 3 | 150408362- | 0 | 0 | 0.04 | 0 | 0 | 0.04 | 0.01 | 0.01 | 0.00 |
| | 150408384 | | | | | | | | | |
| 3 | 182806878- | 0.09 | 0 | 0.04 | 0 | 0 | 0.05 | 0.04 | 0.02 | 0.03 |
| | 182806900 | | | | | | | | | |
| 4 | 139511785- | 0 | 0 | 0 | 0.03 | 0 | 0.03 | 0.00 | 0.02 | −0.02 |
| | 139511808 | | | | | | | | | |
| 4 | 84244376- | 0.03 | 0 | 0.05 | 0.06 | 0 | 0.01 | 0.03 | 0.02 | 0.00 |
| | 84244398 | | | | | | | | | |
| 4 | 114598629- | 0 | 0 | 0.02 | 0 | 0 | 0 | 0.01 | 0.00 | 0.01 |
| | 114598651 | | | | | | | | | |
| 4 | 6008382- | 0 | 0 | 0.04 | 0 | 0 | 0.12 | 0.01 | 0.04 | −0.03 |
| | 6008404 | | | | | | | | | |
| 4 | 7054192- | 0.14 | 0.02 | 0 | 0.02 | 0.07 | 0.01 | 0.05 | 0.03 | 0.02 |
| | 7054214 | | | | | | | | | |
| 4 | 158623208- | 0 | 0 | 0.12 | 0 | 0 | 0 | 0.04 | 0.00 | 0.04 |
| | 158623230 | | | | | | | | | |
| 4 | 1221653- | 0.05 | 0 | 0.01 | 0.03 | 0 | 0.05 | 0.02 | 0.03 | −0.01 |
| | 1221675 | | | | | | | | | |
| 4 | 1308120- | 0.03 | 0 | 0.02 | 0 | 0 | 0 | 0.02 | 0.00 | 0.02 |
| | 1308142 | | | | | | | | | |
| 4 | 6747615- | 0.03 | 0 | 0.05 | 0.02 | 0 | 0.04 | 0.03 | 0.02 | 0.01 |
| | 6747637 | | | | | | | | | |
| 4 | 37229056- | 0.03 | 0.02 | 0 | 0.05 | 0 | 0.05 | 0.02 | 0.03 | −0.02 |
| | 37229078 | | | | | | | | | |
| 4 | 115179695- | 0 | 0 | 0 | 0 | 0 | 0 | 0.00 | 0.00 | 0.00 |
| | 115179717 | | | | | | | | | |
| 4 | 141615591- | 0 | 0 | 0.05 | 0 | 0 | 0 | 0.02 | 0.00 | 0.02 |
| | 141615613 | | | | | | | | | |
| 4 | 182110224- | 0.04 | 0 | 0.05 | 0.05 | 0.06 | 0.02 | 0.03 | 0.04 | −0.01 |
| | 182110246 | | | | | | | | | |
| 5 | 126628420- | 0.03 | 0.07 | 0 | 0.05 | 0 | 0 | 0.03 | 0.02 | 0.02 |
| | 126628443 | | | | | | | | | |
| 5 | 77203454- | 0.06 | 0 | 0.07 | 0.1 | 0 | 0.05 | 0.04 | 0.05 | −0.01 |
| | 77203476 | | | | | | | | | |
| 5 | 126364896- | 0.03 | 0 | 0 | 0 | 0 | 0 | 0.01 | 0.00 | 0.01 |
| | 126364918 | | | | | | | | | |
| 5 | 767330- | 0.09 | 0.04 | 0.05 | 0.03 | 0.06 | 0.04 | 0.06 | 0.04 | 0.02 |
| | 767352 | | | | | | | | | |
| 5 | 1516550- | 0 | 0.06 | 0 | 0 | 0 | 0.03 | 0.02 | 0.01 | 0.01 |
| | 1516572 | | | | | | | | | |
| 5 | 173667321- | 0.02 | 0 | 0.01 | 0.03 | 0.04 | 0.02 | 0.01 | 0.03 | −0.02 |
| | 173667343 | | | | | | | | | |
| 5 | 178526685- | 0 | 0 | 0 | 0 | 0.03 | 0.03 | 0.00 | 0.02 | −0.02 |
| | 178526707 | | | | | | | | | |
| 6 | 44047493- | 0.06 | 0.02 | 0.04 | 0.09 | 0 | 0.05 | 0.04 | 0.05 | −0.01 |
| | 44047515 | | | | | | | | | |
| 6 | 73315113- | 0 | 0 | 0 | 0.07 | 0.04 | 0 | 0.00 | 0.04 | −0.04 |
| | 73315135 | | | | | | | | | |
| 6 | 148698322- | 0 | 0 | 0.13 | 0.07 | 0 | 0.11 | 0.04 | 0.06 | −0.02 |
| | 148698344 | | | | | | | | | |
| 6 | 153756217- | 0 | 0 | 0.01 | 0.07 | 0.11 | 0 | 0.00 | 0.06 | −0.06 |
| | 153756239 | | | | | | | | | |
| 6 | 138138382- | 0.06 | 0 | 0 | 0.04 | 0 | 0.03 | 0.02 | 0.02 | 0.00 |
| | 138138404 | | | | | | | | | |
| 6 | 165843913- | 0.03 | 0.07 | 0 | 0.05 | 0 | 0.03 | 0.03 | 0.03 | 0.01 |
| | 165843935 | | | | | | | | | |
| 6 | 3751269- | 0 | 0 | 0 | 0 | 0 | 0 | 0.00 | 0.00 | 0.00 |
| | 3751291 | | | | | | | | | |
| 6 | 15092621- | 0 | 0.03 | 0.02 | 0.01 | 0 | 0 | 0.02 | 0.00 | 0.01 |
| | 15092643 | | | | | | | | | |
| 6 | 16346963- | 0.07 | 0 | 0 | 0 | 0 | 0 | 0.02 | 0.00 | 0.02 |
| | 16346985 | | | | | | | | | |
| 6 | 29016770- | 0 | 0 | 0 | 0.02 | 0.08 | 0.02 | 0.00 | 0.04 | −0.04 |
| | 29016792 | | | | | | | | | |
| 6 | 36310604- | 0.06 | 0 | 0.06 | 0.01 | 0.1 | 0.09 | 0.04 | 0.07 | −0.03 |
| | 36310626 | | | | | | | | | |
| 6 | 47477658- | 0.2 | 0 | 0 | 0.07 | 0 | 0.03 | 0.07 | 0.03 | 0.03 |
| | 47477680 | | | | | | | | | |
| 6 | 139537177- | 0 | 0 | 0 | 0.03 | 0 | 0 | 0.00 | 0.01 | −0.01 |
| | 139537199 | | | | | | | | | |
| 7 | 24849083- | 0 | 0.05 | 0.06 | 0.03 | 0 | 0 | 0.04 | 0.01 | 0.03 |
| | 24849106 | | | | | | | | | |
| 7 | 129225099- | 0 | 0 | 0 | 0 | 0 | 0 | 0.00 | 0.00 | 0.00 |
| | 129225122 | | | | | | | | | |
| 7 | 93102- | 0.37 | 0 | 0.28 | 0.04 | 0 | 0.05 | 0.22 | 0.03 | 0.19 |
| | 93124 | | | | | | | | | |
| 7 | 5360719- | 0 | 0.03 | 0.07 | 0.02 | 0 | 0.1 | 0.03 | 0.04 | −0.01 |
| | 5360741 | | | | | | | | | |
| 7 | 74043103- | 0.1 | 0 | 0.07 | 0.04 | 0 | 0.04 | 0.06 | 0.03 | 0.03 |
| | 74043125 | | | | | | | | | |
| 7 | 96041009- | 0.17 | 0.09 | 0.03 | 0.03 | 0.11 | 0.11 | 0.10 | 0.08 | 0.01 |
| | 96041031 | | | | | | | | | |
| 7 | 98765214- | 0 | 0 | 0 | 0 | 0.05 | 0.03 | 0.00 | 0.03 | −0.03 |
| | 98765236 | | | | | | | | | |
| 7 | 106882973- | 0 | 0.12 | 0.02 | 0.09 | 0.05 | 0.02 | 0.05 | 0.05 | −0.01 |
| | 106882995 | | | | | | | | | |
| 7 | 123763164- | 0.08 | 0.29 | 0 | 0 | 0 | 0.13 | 0.12 | 0.04 | 0.08 |
| | 123763186 | | | | | | | | | |
| 7 | 147737806- | 0 | 44.29 | 0.19 | 0.11 | 43.85 | 0 | 14.83 | 14.65 | 0.17 |
| | 147737828 | | | | | | | | | |
| 7 | 153256176- | 0 | 0.05 | 0.04 | 0 | 0 | 0.03 | 0.03 | 0.01 | 0.02 |
| | 153256198 | | | | | | | | | |
| 7 | 155527865- | 0 | 0 | 0 | 0 | 0 | 0 | 0.00 | 0.00 | 0.00 |
| | 155527887 | | | | | | | | | |
| 7 | 139596895- | 0 | 0.03 | 0.03 | 0.03 | 0.03 | 0 | 0.02 | 0.02 | 0.00 |
| | 139596917 | | | | | | | | | |
| 7 | 150737589- | 0.05 | 0.13 | 0.05 | 0.01 | 0.05 | 0.18 | 0.08 | 0.08 | 0.00 |
| | 150737611 | | | | | | | | | |
| 8 | 139813559- | 0 | 0.06 | 0 | 0 | 0.06 | 0 | 0.02 | 0.02 | 0.00 |
| | 139813582 | | | | | | | | | |
| 8 | 2485153- | 0.05 | 0 | 0.03 | 0.03 | 0 | 0.06 | 0.03 | 0.03 | 0.00 |
| | 2485175 | | | | | | | | | |
| 8 | 100957388- | 0 | 0 | 0 | 0.03 | 0 | 0 | 0.00 | 0.01 | −0.01 |
| | 100957410 | | | | | | | | | |
| 8 | 143383198- | 0.02 | 0.11 | 0.04 | 0.11 | 0.09 | 0 | 0.06 | 0.07 | −0.01 |
| | 143383220 | | | | | | | | | |
| 8 | 26191893- | 0 | 0.06 | 0 | 0.02 | 0.13 | 0.02 | 0.02 | 0.06 | −0.04 |
| | 26191915 | | | | | | | | | |
| 8 | 142499068- | 0.03 | 0 | 0 | 0 | 0.08 | 0 | 0.01 | 0.03 | −0.02 |
| | 142499090 | | | | | | | | | |
| 9 | 137012994- | 0.05 | 0 | 0.07 | 0.02 | 0 | 0.03 | 0.04 | 0.02 | 0.02 |
| | 137013016 | | | | | | | | | |
| 9 | 137167999- | 0.03 | 0 | 0 | 0 | 0 | 0.03 | 0.01 | 0.01 | 0.00 |
| | 137168021 | | | | | | | | | |
| 9 | 109123571- | 0.03 | 0 | 0 | 0.02 | 0 | 0 | 0.01 | 0.01 | 0.00 |
| | 109123593 | | | | | | | | | |
| 9 | 137477162- | 0.05 | 0.06 | 0.02 | 0.02 | 0.03 | 0.05 | 0.04 | 0.03 | 0.01 |
| | 137477184 | | | | | | | | | |
| 9 | 33873295- | 0.05 | 0 | 0 | 0 | 0 | 0 | 0.02 | 0.00 | 0.02 |
| | 33873317 | | | | | | | | | |
| 9 | 34958979- | 0.1 | 0.03 | 0 | 0.01 | 0 | 0.01 | 0.04 | 0.01 | 0.04 |
| | 34959001 | | | | | | | | | |
| 10 | 28839554- | 0 | 0.18 | 0.08 | 0.11 | 0 | 0 | 0.09 | 0.04 | 0.05 |
| | 28839576 | | | | | | | | | |
| 10 | 59089166- | 0 | 0 | 0 | 0 | 0.06 | 0 | 0.00 | 0.02 | −0.02 |
| | 59089189 | | | | | | | | | |
| 10 | 97031490- | 0.1 | 0.12 | 0 | 0.01 | 0.03 | 0.09 | 0.07 | 0.04 | 0.03 |
| | 97031512 | | | | | | | | | |
| 10 | 122572126- | 0 | 0.05 | 0.03 | 0 | 0 | 0 | 0.03 | 0.00 | 0.03 |
| | 122572148 | | | | | | | | | |
| 10 | 130560773- | 0.03 | 0.02 | 0.03 | 0.02 | 0 | 0 | 0.03 | 0.01 | 0.02 |
| | 130560795 | | | | | | | | | |
| 10 | 5824416- | 0 | 0.09 | 0.01 | 0 | 0 | 0 | 0.03 | 0.00 | 0.03 |
| | 5824438 | | | | | | | | | |
| 10 | 16285410- | 0.08 | 0.09 | 0 | 0.05 | 0 | 0.03 | 0.06 | 0.03 | 0.03 |
| | 16285432 | | | | | | | | | |
| 10 | 20297215- | 0 | 0 | 0 | 0 | 0 | 0 | 0.00 | 0.00 | 0.00 |
| | 20297237 | | | | | | | | | |
| 10 | 21126683- | 0.08 | 0.09 | 0 | 0.05 | 0 | 0 | 0.06 | 0.02 | 0.04 |
| | 21126705 | | | | | | | | | |
| 10 | 47223533- | 0 | 0 | 0.02 | 0.03 | 0 | 0.03 | 0.01 | 0.02 | −0.01 |
| | 47223555 | | | | | | | | | |
| 10 | 60958888- | 0.1 | 0 | 0.12 | 0 | 0.14 | 0.03 | 0.07 | 0.06 | 0.02 |
| | 60958910 | | | | | | | | | |
| 10 | 88036335- | 0.03 | 0 | 0.02 | 0.02 | 0 | 0.02 | 0.02 | 0.01 | 0.00 |
| | 88036357 | | | | | | | | | |
| 10 | 111259337- | 0.08 | 0 | 0 | 0.09 | 0 | 0 | 0.03 | 0.03 | 0.00 |
| | 111259359 | | | | | | | | | |
| 10 | 1572578- | 0.03 | 0 | 0.03 | 0 | 0.05 | 0.05 | 0.02 | 0.03 | −0.01 |
| | 1572600 | | | | | | | | | |
| 11 | 47941203- | 0 | 0.05 | 0.02 | 0 | 0 | 0.03 | 0.02 | 0.01 | 0.01 |
| | 47941225 | | | | | | | | | |
| 11 | 57761981- | 0 | 0 | 0.02 | 0.01 | 0 | 0.08 | 0.01 | 0.03 | −0.02 |
| | 57762003 | | | | | | | | | |
| 11 | 76659109- | 0 | 0 | 0 | 0 | 0 | 0.01 | 0.00 | 0.00 | 0.00 |
| | 76659131 | | | | | | | | | |
| 11 | 117692097- | 0 | 0.04 | 0 | 0.01 | 0 | 0.02 | 0.01 | 0.01 | 0.00 |
| | 117692119 | | | | | | | | | |
| 11 | 10630862- | 0.03 | 0 | 0 | 0.02 | 0 | 0.06 | 0.01 | 0.03 | −0.02 |
| | 10630884 | | | | | | | | | |
| 11 | 18729719- | 0 | 0 | 0.06 | 0.06 | 0.1 | 0.08 | 0.02 | 0.08 | −0.06 |
| | 18729741 | | | | | | | | | |
| 11 | 47350413- | 0.05 | 0 | 0 | 0.06 | 0.07 | 0 | 0.02 | 0.04 | −0.03 |
| | 47350435 | | | | | | | | | |
| 11 | 72870610- | 0 | 0 | 0 | 0 | 0 | 0.24 | 0.00 | 0.08 | −0.08 |
| | 72870632 | | | | | | | | | |
| 11 | 2916587- | 0 | 0 | 0.01 | 0 | 0 | 0 | 0.00 | 0.00 | 0.00 |
| | 2916609 | | | | | | | | | |
| 11 | 121325368- | 0 | 0.04 | 0.09 | 0.07 | 0.06 | 0.05 | 0.04 | 0.06 | −0.02 |
| | 121325390 | | | | | | | | | |
| 11 | 129981605- | 0 | 0 | 0.04 | 0.06 | 0.13 | 0.04 | 0.01 | 0.08 | −0.06 |
| | 129981627 | | | | | | | | | |
| 12 | 3851459- | 0 | 0 | 0 | 0 | 0 | 0 | 0.00 | 0.00 | 0.00 |
| | 3851481 | | | | | | | | | |
| 12 | 32850805- | 0.06 | 0 | 0.07 | 0.05 | 0.07 | 0 | 0.04 | 0.04 | 0.00 |
| | 32850827 | | | | | | | | | |
| 12 | 65971780- | 0.06 | 0.04 | 0.03 | 0 | 0 | 0 | 0.04 | 0.00 | 0.04 |
| | 65971802 | | | | | | | | | |
| 12 | 95590363- | 0 | 0.18 | 0 | 0.08 | 0 | 0.08 | 0.06 | 0.05 | 0.01 |
| | 95590385 | | | | | | | | | |
| 12 | 127431260- | 0.05 | 0.04 | 0.11 | 0.06 | 0.12 | 0.04 | 0.07 | 0.07 | −0.01 |
| | 127431282 | | | | | | | | | |
| 12 | 48000120- | 0 | 0 | 0.02 | 0 | 0.06 | 0.02 | 0.01 | 0.03 | −0.02 |
| | 48000142 | | | | | | | | | |
| 12 | 53328526- | 0 | 0 | 0 | 0.06 | 0.09 | 0.02 | 0.00 | 0.06 | −0.06 |
| | 53328548 | | | | | | | | | |
| 12 | 54190321- | 0.06 | 0.02 | 0.03 | 0.01 | 0 | 0.05 | 0.04 | 0.02 | 0.02 |
| | 54190343 | | | | | | | | | |
| 12 | 106690762- | 0 | 0 | 0 | 0.01 | 0 | 0.01 | 0.00 | 0.01 | −0.01 |
| | 106690784 | | | | | | | | | |
| 12 | 114491014- | 0.11 | 0 | 0 | 0.05 | 0.1 | 0.05 | 0.04 | 0.07 | −0.03 |
| | 114491036 | | | | | | | | | |
| 13 | 69424400- | 0 | 0.04 | 0.03 | 0.01 | 0.13 | 0 | 0.02 | 0.05 | −0.02 |
| | 69424422 | | | | | | | | | |
| 13 | 25788073- | 0.05 | 0.04 | 0.04 | 0.03 | 0.05 | 0 | 0.04 | 0.03 | 0.02 |
| | 25788095 | | | | | | | | | |
| 13 | 98388403- | 0 | 0.06 | 0.02 | 0 | 0 | 0 | 0.03 | 0.00 | 0.03 |
| | 98388425 | | | | | | | | | |
| 14 | 20813343- | 0.05 | 0.02 | 0.01 | 0.02 | 0 | 0.05 | 0.03 | 0.02 | 0.00 |
| | 20813366 | | | | | | | | | |
| 14 | 24408232- | 0 | 0.03 | 0.07 | 0.06 | 0 | 0.07 | 0.03 | 0.04 | −0.01 |
| | 24408254 | | | | | | | | | |
| 14 | 38663021- | 0.08 | 0 | 0.01 | 0.06 | 0 | 0 | 0.03 | 0.02 | 0.01 |
| | 38663043 | | | | | | | | | |
| 14 | 100213915- | 0 | 0 | 0 | 0.03 | 0 | 0 | 0.00 | 0.01 | −0.01 |
| | 100213937 | | | | | | | | | |
| 14 | 90554536- | 0 | 0 | 0.01 | 0.06 | 0 | 0.03 | 0.00 | 0.03 | −0.03 |
| | 90554558 | | | | | | | | | |
| 14 | 102929418- | 0 | 0 | 0.03 | 0.03 | 0 | 0 | 0.01 | 0.01 | 0.00 |
| | 102929440 | | | | | | | | | |
| 14 | 65250553- | 0.04 | 0 | 0 | 0.04 | 0 | 0 | 0.01 | 0.01 | 0.00 |
| | 65250575 | | | | | | | | | |
| 14 | 89310097- | 0.06 | 0 | 0.06 | 0.03 | 0.06 | 0.04 | 0.04 | 0.04 | 0.00 |
| | 89310119 | | | | | | | | | |
| 14 | 101153383- | 0 | 0.04 | 0 | 0 | 0 | 0 | 0.01 | 0.00 | 0.01 |
| | 101153405 | | | | | | | | | |
| 15 | 69452825- | 0 | 0 | 0.03 | 0.04 | 0 | 0.03 | 0.01 | 0.02 | −0.01 |
| | 69452848 | | | | | | | | | |
| 15 | 42252041- | 0 | 0 | 0 | 0 | 0 | 0 | 0.00 | 0.00 | 0.00 |
| | 42252063 | | | | | | | | | |
| 15 | 99993270- | 0.03 | 0 | 0.02 | 0 | 0 | 0 | 0.02 | 0.00 | 0.02 |
| | 99993292 | | | | | | | | | |
| 15 | 47827093- | 0.08 | 0.04 | 0.02 | 0.04 | 0 | 0 | 0.05 | 0.01 | 0.03 |
| | 47827115 | | | | | | | | | |
| 15 | 86059010- | 0.05 | 0.02 | 0.07 | 0.05 | 0.05 | 0.01 | 0.05 | 0.04 | 0.01 |
| | 86059032 | | | | | | | | | |
| 15 | 94089230- | 0.11 | 0.04 | 0.04 | 0.07 | 0.02 | 0.02 | 0.06 | 0.04 | 0.03 |
| | 94089252 | | | | | | | | | |
| 16 | 3089598- | 0 | 0.03 | 0.01 | 0 | 0.07 | 0 | 0.01 | 0.02 | −0.01 |
| | 3089620 | | | | | | | | | |
| 16 | 30783356- | 0 | 0 | 0 | 0.04 | 0 | 0.02 | 0.00 | 0.02 | −0.02 |
| | 30783378 | | | | | | | | | |
| 16 | 31081352- | 0.03 | 0 | 0.04 | 0 | 0 | 0 | 0.02 | 0.00 | 0.02 |
| | 31081374 | | | | | | | | | |
| 16 | 31436901- | 0.02 | 0.02 | 0.01 | 0.01 | 0.05 | 0.03 | 0.02 | 0.03 | −0.01 |
| | 31436923 | | | | | | | | | |
| 16 | 2092489- | 0.05 | 0 | 0 | 0 | 0.03 | 0 | 0.02 | 0.01 | 0.01 |
| | 2092511 | | | | | | | | | |
| 16 | 16097875- | 0.03 | 0.04 | 0.02 | 0.04 | 0.04 | 0.14 | 0.03 | 0.07 | −0.04 |
| | 16097897 | | | | | | | | | |
| 16 | 29792483- | 0.06 | 0.03 | 0.11 | 0.11 | 0 | 0.03 | 0.07 | 0.05 | 0.02 |
| | 29792505 | | | | | | | | | |
| 16 | 88839686- | 0.03 | 0 | 0 | 0 | 0 | 0.04 | 0.01 | 0.01 | 0.00 |
| | 88839708 | | | | | | | | | |
| 16 | 81278358- | 0 | 0 | 0 | 0 | 0 | 0.04 | 0.00 | 0.01 | −0.01 |
| | 81278380 | | | | | | | | | |
| 16 | 1003178- | 0.09 | 0 | 0.04 | 0.02 | 0 | 0 | 0.04 | 0.01 | 0.04 |
| | 1003200 | | | | | | | | | |
| 16 | 14882693- | 0.06 | 0.03 | 0.07 | 0.09 | 0 | 0.01 | 0.05 | 0.03 | 0.02 |
| | 14882715 | | | | | | | | | |
| 16 | 16281338- | 0.02 | 0.04 | 0.06 | 0.06 | 0 | 0.06 | 0.04 | 0.04 | 0.00 |
| | 16281360 | | | | | | | | | |
| 16 | 18430777- | 0.08 | 0 | 0.09 | 0.07 | 0.05 | 0.02 | 0.06 | 0.05 | 0.01 |
| | 18430799 | | | | | | | | | |
| 16 | 18513312- | 0.04 | 0 | 0 | 0.02 | 0 | 0.07 | 0.01 | 0.03 | −0.02 |
| | 18513334 | | | | | | | | | |
| 16 | 21358246- | 0 | 0 | 0 | 0.02 | 0 | 0.02 | 0.00 | 0.01 | −0.01 |
| | 21358268 | | | | | | | | | |
| 16 | 28383449- | 0.02 | 0.1 | 0.03 | 0.03 | 0.04 | 0.01 | 0.05 | 0.03 | 0.02 |
| | 28383471 | | | | | | | | | |
| 16 | 28731839- | 0.05 | 0.02 | 0.05 | 0.02 | 0 | 0.04 | 0.04 | 0.02 | 0.02 |
| | 28731861 | | | | | | | | | |
| 16 | 29863301- | 0 | 0 | 0 | 0.03 | 0 | 0 | 0.00 | 0.01 | −0.01 |
| | 29863323 | | | | | | | | | |
| 16 | 67748649- | 0 | 0 | 0.03 | 0 | 0 | 0 | 0.01 | 0.00 | 0.01 |
| | 67748671 | | | | | | | | | |
| 16 | 78768901- | 0.04 | 0 | 0.01 | 0 | 0.02 | 0.03 | 0.02 | 0.02 | 0.00 |
| | 78768923 | | | | | | | | | |
| 16 | 88044071- | 0 | 0 | 0 | 0 | 0 | 0 | 0.00 | 0.00 | 0.00 |
| | 88044093 | | | | | | | | | |
| 17 | 7223899- | 0 | 0 | 0 | 0.02 | 0 | 0.06 | 0.00 | 0.03 | −0.03 |
| | 7223921 | | | | | | | | | |
| 17 | 7511796- | 0 | 0.02 | 0.05 | 0.04 | 0.09 | 0 | 0.02 | 0.04 | −0.02 |
| | 7511818 | | | | | | | | | |
| 17 | 19391599- | 0.03 | 0.03 | 0.1 | 0.05 | 0.06 | 0.06 | 0.05 | 0.06 | 0.00 |
| | 19391621 | | | | | | | | | |
| 17 | 26736056- | 0.03 | 0.08 | 0 | 0.04 | 0 | 0 | 0.04 | 0.01 | 0.02 |
| | 26736078 | | | | | | | | | |
| 17 | 38870195- | 0 | 0.03 | 0.05 | 0.03 | 0.07 | 0 | 0.03 | 0.03 | −0.01 |
| | 38870217 | | | | | | | | | |
| 17 | 45753295- | 0.03 | 0 | 0.02 | 0.04 | 0 | 0.04 | 0.02 | 0.03 | −0.01 |
| | 45753317 | | | | | | | | | |
| 17 | 45993823- | 0 | 0.06 | 0.02 | 0.05 | 0.07 | 0 | 0.03 | 0.04 | −0.01 |
| | 45993845 | | | | | | | | | |
| 17 | 81131740- | 0 | 0 | 0 | 0.01 | 0 | 0.03 | 0.00 | 0.01 | −0.01 |
| | 81131762 | | | | | | | | | |
| 17 | 7462659- | 0.05 | 0 | 0.04 | 0.01 | 0.06 | 0 | 0.03 | 0.02 | 0.01 |
| | 7462681 | | | | | | | | | |
| 17 | 28662198- | 0 | 0 | 0 | 0.07 | 0 | 0.03 | 0.00 | 0.03 | −0.03 |
| | 28662220 | | | | | | | | | |
| 17 | 63929863- | 0.07 | 0.02 | 0.03 | 0.01 | 0.02 | 0.03 | 0.04 | 0.02 | 0.02 |
| | 63929885 | | | | | | | | | |
| 17 | 79154410- | 0 | 0 | 0.03 | 0.02 | 0 | 0 | 0.01 | 0.01 | 0.00 |
| | 79154432 | | | | | | | | | |
| 18 | 3448410- | 0.03 | 0 | 0 | 0 | 0 | 0 | 0.01 | 0.00 | 0.01 |
| | 3448432 | | | | | | | | | |
| 18 | 39380982- | 0 | 0.04 | 0.03 | 0.01 | 0 | 0.05 | 0.02 | 0.02 | 0.00 |
| | 39381004 | | | | | | | | | |
| 18 | 58247634- | 0.08 | 0.02 | 0 | 0 | 0.05 | 0.03 | 0.03 | 0.03 | 0.01 |
| | 58247656 | | | | | | | | | |
| 18 | 59917417- | 0.06 | 0 | 0 | 0.02 | 0 | 0 | 0.02 | 0.01 | 0.01 |
| | 59917439 | | | | | | | | | |
| 18 | 78993257- | 0 | 0 | 0.04 | 0 | 0.11 | 0.02 | 0.01 | 0.04 | −0.03 |
| | 78993279 | | | | | | | | | |
| 19 | 53775475- | 0.03 | 0 | 0.02 | 0.02 | 0 | 0 | 0.02 | 0.01 | 0.01 |
| | 53775498 | | | | | | | | | |
| 19 | 11406443- | 0.02 | 0 | 0.08 | 0.02 | 0 | 0.1 | 0.03 | 0.04 | −0.01 |
| | 11406465 | | | | | | | | | |
| 19 | 10872441- | 0.06 | 0 | 0 | 0.03 | 0 | 0.03 | 0.02 | 0.02 | 0.00 |
| | 10872463 | | | | | | | | | |
| 19 | 36110180- | 0 | 0 | 0 | 0.13 | 0 | 0 | 0.00 | 0.04 | −0.04 |
| | 36110202 | | | | | | | | | |
| 19 | 46709648- | 0 | 0 | 0.09 | 0.03 | 0 | 0.12 | 0.03 | 0.05 | −0.02 |
| | 46709670 | | | | | | | | | |
| 19 | 12747607- | 0.03 | 0 | 0.06 | 0.04 | 0.05 | 0.02 | 0.03 | 0.04 | −0.01 |
| | 12747629 | | | | | | | | | |
| 19 | 56088833- | 0 | 0.07 | 0 | 0.05 | 0.14 | 0 | 0.02 | 0.06 | −0.04 |
| | 56088855 | | | | | | | | | |
| 19 | 51606728- | 0.02 | 0 | 0.01 | 0.01 | 0 | 0.06 | 0.01 | 0.02 | −0.01 |
| | 51606750 | | | | | | | | | |
| 19 | 1104611- | 0 | 0 | 0 | 0 | 0 | 0 | 0.00 | 0.00 | 0.00 |
| | 1104633 | | | | | | | | | |
| 19 | 1274125- | 0 | 0.05 | 0.02 | 0.05 | 0 | 0 | 0.02 | 0.02 | 0.01 |
| | 1274147 | | | | | | | | | |
| 19 | 2209581- | 0 | 0 | 0 | 0.02 | 0.07 | 0 | 0.00 | 0.03 | −0.03 |
| | 2209603 | | | | | | | | | |
| 19 | 6431799- | 0 | 0 | 0 | 0 | 0 | 0.03 | 0.00 | 0.01 | −0.01 |
| | 6431821 | | | | | | | | | |
| 19 | 11391283- | 0.03 | 0.04 | 0.03 | 0.07 | 0.1 | 0.03 | 0.03 | 0.07 | −0.03 |
| | 11391305 | | | | | | | | | |
| 19 | 49720095- | 0.04 | 0 | 0 | 0 | 0 | 0.1 | 0.01 | 0.03 | −0.02 |
| | 49720117 | | | | | | | | | |
| 19 | 50490618- | 0 | 0.05 | 0.02 | 0 | 0.03 | 0 | 0.02 | 0.01 | 0.01 |
| | 50490640 | | | | | | | | | |
| 19 | 51068476- | 0.07 | 0.06 | 0.1 | 0.08 | 0 | 0.02 | 0.08 | 0.03 | 0.04 |
| | 51068498 | | | | | | | | | |
| 20 | 45967752- | 0 | 0 | 0 | 0 | 0 | 0.03 | 0.00 | 0.01 | −0.01 |
| | 45967774 | | | | | | | | | |
| 20 | 13900645- | 0.03 | 0 | 0.03 | 0.04 | 0.05 | 0.06 | 0.02 | 0.05 | −0.03 |
| | 13900667 | | | | | | | | | |
| 20 | 23109029- | 0 | 0 | 0.01 | 0 | 0 | 0.01 | 0.00 | 0.00 | 0.00 |
| | 23109051 | | | | | | | | | |
| 20 | 31859435- | 0 | 0.02 | 0 | 0 | 0 | 0.03 | 0.01 | 0.01 | 0.00 |
| | 31859457 | | | | | | | | | |
| 20 | 49558961- | 0.04 | 0.09 | 0 | 0 | 0.07 | 0 | 0.04 | 0.02 | 0.02 |
| | 49558983 | | | | | | | | | |
| 21 | 37176555- | 0 | 0 | 0.03 | 0.07 | 0.05 | 0 | 0.01 | 0.04 | −0.03 |
| | 37176577 | | | | | | | | | |
| 22 | 27735501- | 0 | 0.08 | 0 | 0 | 0.04 | 0.05 | 0.03 | 0.03 | 0.00 |
| | 27735523 | | | | | | | | | |
| 22 | 25849024- | 0.03 | 0.04 | 0.01 | 0 | 0 | 0.02 | 0.03 | 0.01 | 0.02 |
| | 25849046 | | | | | | | | | |
| 22 | 22912001- | 0 | 0 | 0.01 | 0 | 0.05 | 0 | 0.00 | 0.02 | −0.01 |
| | 22912023 | | | | | | | | | |
| 22 | 49971621- | 0 | 0.15 | 0.06 | 0 | 0.11 | 0.03 | 0.07 | 0.05 | 0.02 |
| | 49971643 | | | | | | | | | |
| X | 1842130- | 0 | 0 | 0 | 0 | 0 | 0 | 0.00 | 0.00 | 0.00 |
| | 1842152 | | | | | | | | | |
| X | 50814798- | 0 | 0 | 0 | 0.06 | 0 | 0 | 0.00 | 0.02 | −0.02 |
| | 50814820 | | | | | | | | | |
| X | 23566446- | 0 | 0 | 0 | 0 | 0 | 0 | 0.00 | 0.00 | 0.00 |
| | 23566468 | | | | | | | | | |
| X | 83385071- | 0 | 0.08 | 0 | 0 | 0 | 0 | 0.03 | 0.00 | 0.03 |
| | 83385093 | | | | | | | | | |
| X | 76172984- | 0 | 0 | 0.03 | 0 | 0 | 0.05 | 0.01 | 0.02 | −0.01 |
| | 76173006 | | | | | | | | | |
| X | 107536875- | 0 | 0 | 0 | 0.03 | 0 | 0 | 0.00 | 0.01 | −0.01 |
| | 107536897 | | | | | | | | | |

[0703] Adenine base editors have been reported to induce gRNA-independent RNA editing via the deoxyadenosine deaminase domain. To assess for gRNA-independent RNA editing, primary human hepatocytes were treated with mRNA and PCSK9 gRNA (n=4 biological replicates), SpCas9 mRNA and gRNA (n=4), or were untreated (n=4). RNA was extracted after 2 days, and processed as described in the additional detailed methods section. Comparing the RNA profiles of the ABE8.8- and SpCas9-treated hepatocytes with untreated hepatocytes, no substantial RNA edits in the ABE8.8-treated hepatocytes was observed (FIG. 14). Each replicate was compared against each of four untreated hepatocyte samples to eliminate any positions with editing that were common to both conditions. The jitter plots portray transcriptomic loci with editing in the treated sample (number indicates total edited loci identified in the treated sample, boxplot indicates median±interquartile range of proportion of edited reads across all edited loci in the sample).

[0704] Modifications and/or truncations to either the spacer or tracr portion of the gRNA was assessed by alteration of the GA066 spacer (5′-CCCGCACCTTGGCGCAGCGG-3′(SEQ ID NO: 13)) (Table 12). The modifications to the guide can serve to improve on-target editing efficiency and/or improve off-target editing efficiency. Each of the gRNAs with an equivalent amount of in vitro transcribed ABE8.8 mRNA (1:1 ratio by weight) were co-transfected into primary human hepatocytes and primary cynomolgus hepatocytes and processed as described in detailed methods.

TABLE 12
Modifications and/or truncations of the PCSK9 guide GA346
results in high-level editing in human primary hepatocytes

| | Human Primary Hepatocytes-Editing % at Position 6 (Dose, Replicate #) | | | | | | | |
|---|---|---|---|---|---|---|---|---|
| | 2500 | 2500 | 1250 | 1250 | 62511 | 625 | 312.5 | 312.5 |
| | ng/mL | ng/mL | ng/mL | ng/mL | ng/mL | ng/mL | ng/mL | ng/mL |
| gRNA | rep1 | rep2 | rep1 | rep2 | rep1 | rep2 | rep1 | rep2 |
| GA346 | 30.69 | 35.58 | 19.99 | 34.67 | 27.13 | 16.93 | 12.56 | 9.92 |
| GA376 | 38.15 | 33.98 | 31.43 | 25.28 | 24.02 | 22.03 | 14.81 | 12.02 |
| GA377 | 35.11 | 37.31 | 26.39 | 31.48 | 21.39 | 23.19 | 15.34 | 14.9 |
| GA380 | 38.5 | 35.38 | 32.41 | 32.43 | 25.28 | 20.36 | 12.85 | ND |
| GA381 | 29.7 | 31.2 | 24.12 | 29.23 | 17.32 | 18.43 | 11.44 | 11 |
| GA382 | 34.56 | 30.02 | 22.5 | 24.45 | 18.48 | 15.64 | 8.45 | 8.86 |
| GA383 | 42.2 | 34.95 | 32.76 | 31.79 | 22.24 | 24.17 | 13.27 | 13.26 |
| GA384 | 8.49 | 8.5 | 7.07 | 6.51 | 5.03 | 4.25 | 2.61 | 2.7 |
| GA385 | 40.2 | 29.05 | 26.39 | 21.43 | 18.88 | 16.66 | 11.76 | 7.63 |
| GA386 | 43.73 | 30.67 | 31.57 | 26.5 | 27.51 | 19.19 | 16.94 | 13.41 |
| GA387 | 22.61 | 16.64 | 17.25 | 12.78 | 11.55 | 8.26 | 5.28 | 4.24 |
| GA388 | 28.77 | 23.84 | 20.46 | 20.33 | 13.73 | ND | 7.26 | ND |
| GA389 | 28.45 | 23.46 | 21.98 | 17.88 | 12.62 | 12.78 | 8.06 | 8.54 |
| GA391 | 25.58 | 30.06 | 25.43 | 27.3 | 27.12 | 18.67 | 16.86 | 15.78 |
| | Cyno Primary Hepatocytes-Editing % at Position 6 (Dose, Replicate #) | | | | | | | |
| | 2500 | 2500 | 1250 | 1250 | 625 | 625 | 312.5 | 312.5 |
| | ng/mL | ng/mL | ng/mL | ng/mL | ng/mL | ng/mL | ng/mL | ng/mL |
| gRNA | rep1 | rep2 | rep1 | rep2 | rep1 | rep2 | rep1 | rep2 |
| GA346 | 40.1 | 37.48 | 36.97 | 34.08 | 25.91 | 25.59 | 14.83 | 15.25 |
| GA376 | 29.57 | 29.57 | 27.62 | 31.98 | 23.08 | 22.29 | 15.12 | 15.75 |
| GA377 | 35.36 | 42.67 | 35.66 | 43.35 | 30.68 | 34.73 | 21.24 | 21.79 |
| GA380 | 43.27 | 44.85 | 39.03 | 38.76 | 33.31 | 34.1 | 21.83 | 21.51 |
| GA381 | 39.45 | 47.85 | 35.82 | 41.03 | 28.42 | 31.87 | 15.51 | 18.36 |
| GA382 | 36.34 | 39.97 | 32.74 | 37.41 | 26.15 | 25.68 | 14.08 | 12.74 |
| GA383 | 39.02 | 53.37 | 35.44 | 44.23 | 28 | 33.42 | 16 | 20.03 |
| GA384 | 26.71 | 22.52 | 20.97 | 21.53 | 14.38 | 16.21 | 8.31 | 8.03 |
| GA385 | 38.44 | 37.36 | 38.31 | 31.84 | 31.97 | 28.48 | 18.23 | 17.68 |
| GA386 | 48.11 | 43.61 | 40.09 | 40.44 | 37.59 | 37.42 | 23.07 | 25.27 |
| GA387 | 27.3 | 21.08 | 23.71 | 21.53 | 16.82 | 13.62 | 7.34 | 6.03 |
| GA388 | 41.95 | 36.03 | 32.87 | 29.9 | 23.65 | 25.43 | 12.13 | 13.19 |
| GA389 | 34.62 | 33.47 | 32.15 | 29.86 | 25.87 | 23.29 | 11.17 | 12.33 |

[0705] With a view towards establishing the safety of a base-editing therapy knocking down ANGPTL3 in the human liver in vivo, a list of candidate sites in the human genome for off-target mutagenesis was assembled using two different methods. The first method used bioinformatic analysis of the human genome, identifying all sites with a PAM sequence compatible with Streptococcus pyogenes Cas9 (and therefore ABE 8.8) and a protospacer sequence with up to 4 single-nucleotide mismatches with the GA100 spacer sequence 5′-AAGATACCTGAATAACTCTC-3′ (SEQ ID NO: 14).

[0706] The second method to generate candidate sites used an in vitro biochemical assay, ONE-seq, that determined the propensity of a ribonucleoprotein comprising the ABE8.8 base editor protein and gRNA GA441 to cleave oligonucleotides in a library. The reference human genome (GRCh38) was searched for sites with up to 6 mismatches to the protospacer sequence specified by the ANGPTL3 gRNA (5′-AAGATACCTGAATAACTCTC-3′ (SEQ ID NO: 14)), and sites with up to 4 mismatches plus up to 2 DNA or RNA bulges using Cas-Designer were identified. More specifics on ONE-seq library preparation, experimental protocol, and bioinformatic analysis are described in the additional detailed methods section.

[0707] Oligonucleotides with higher sequence counts reflect a higher propensity for Cas9/gRNA cleavage in vitro and represent the sites most likely to suffer off-target mutagenesis in cells. The top candidate sites are identified in Table 13. Validation of candidate sites was performed using ANGPTL3 edited, and untreated human primary hepatocytes. Upon next-generation sequencing (Table 14), when the observed base editing rates in control cells were subtracted from the observed base editing rates in LNP-treated cells across the on-target site and candidate off-target sites (to account for background sequencing errors inherent in next-generation sequencing), appreciable base editing were observed at the on-target ANGPTL3 target site.

TABLE 13
ANGPTL3 gRNA (Protospacer 5′-AAGATACCTGAATAACCCTC-3′ (SEQ ID NO: 15))
candidate off-target sites identified by ONE-seq

| | | Potential Off-target | | |
|---|---|---|---|---|
| chromosome | location | Sequence (5′-3′) | SEQ ID NO: | alignment |
| 1 | 4546642 | CAGATACCATAAAAATCATCTGG | 682 | X60 |
| 1 | 6955991 | AAGATACTGAAAAACCCTGCAA | 683 | RNA41 |
| 1 | 16544549 | CAGAGAGCAGAGTAAACCTCTGG | 684 | X60 |
| 1 | 23996891 | CAGAAAACTATAACCCTCAGG | 685 | RNA32 |
| 1 | 26088616 | AGAATGGCTGCATAACCCTTGGG | 686 | X60 |
| 1 | 27386898 | AAGGTTACTTAATAAACATCTGG | 687 | X60 |
| 1 | 28115884 | AAGATACCTGAATTAAATCTCAAA | 688 | DNA41 |
| 1 | 30795252 | AAGTATCTTGAATAACCCTCCTG | 689 | X50 |
| 1 | 31542787 | CAAATAACTAAATGACCCTCTTG | 690 | X60 |
| 1 | 32826604 | AAGATACTGAAAAACTCTCTTC | 691 | RNA41 |
| 1 | 33418548 | TAGATAACCTGAATAGCCCTATAG | 692 | DNA41 |
| 1 | 45361452 | TAGATACTTCAATACCTCTCAGT | 693 | X60 |
| 1 | 57486127 | AGCAATCCTGAAAAATCCTCTGG | 694 | X60 |
| 1 | 59422147 | ACGATACTTGGATAACCCTCTGG | 695 | X30 |
| 1 | 59572755 | GAGATACCTAATAAGCCTCTAT | 696 | RNA41 |
| 1 | 62604219 | AAGATACCTGAATAACCCTCTGG | 697 | X00 |
| 1 | 66687653 | AAGTTACTGAATATCTCTCAGC | 698 | RNA41 |
| 1 | 76436411 | AGTATACCTCAATAACCACCTGG | 699 | X50 |
| 1 | 77254313 | AAGATCCAGAAGAATCCCCTGG | 700 | RNA41 |
| 1 | 78181978 | AGGATACCTGGAAACCCTACTGG | 701 | X60 |
| 1 | 83689742 | AAGATAACTAGCTAGCTCTCTGG | 702 | X60 |
| 1 | 89670639 | GAGATACTTGAATAAACTTCTAT | 703 | X60 |
| 1 | 93001069 | AAGATACCTGACTAACCTGTTTT | 704 | X60 |
| 1 | 97782174 | TAGATACATGATTAAACCACTGC | 705 | X60 |
| 1 | 110981606 | TATATACATGAATAACTCCGG | 706 | RNA32 |
| 1 | 114341782 | ATTATTCTTGAATAACCCCAGGG | 707 | X60 |
| 1 | 114403243 | AAGATACCTGAGAAACTCTGCAA | 708 | X60 |
| 1 | 114800896 | ATGACTGCTGAGAAACCCTCTGG | 709 | X60 |
| 1 | 114851709 | AAGAATCCTAGATATCCCTCAGT | 710 | X60 |
| 1 | 116440140 | AAAATACCAAAAAAACCCTATAG | 711 | X60 |
| 1 | 118751265 | AAGAATTTGAATAACCCTCAAT | 712 | RNA41 |
| 1 | 119001156 | AGGCTAACAGAATCACCCTCGGG | 713 | X50 |
| 1 | 150002706 | GTGATCCTGAGTAAACCTCAGG | 714 | RNA41 |
| 1 | 156332931 | TAGATACCTATAAGCCTCTGG | 715 | RNA22 |
| 1 | 162745410 | AAGATACATGAAAAAAACATTGG | 716 | X60 |
| 1 | 164962899 | AAGATACCTTAAAACCCTTCAGC | 717 | X50 |
| 1 | 165289582 | AATTTACCTGAATAGTCATTAGG | 718 | X60 |
| 1 | 167577809 | AAGATACACAAATAGCCATCAAG | 719 | X60 |
| 1 | 170883188 | AACAAACCTGAATAGTCCTACTG | 720 | X60 |
| 1 | 175232700 | CAGATATCTGAATCACTCTTCTG | 721 | X60 |
| 1 | 176788495 | AAAATATGAATAACCCTTTGG | 722 | RNA22 |
| 1 | 177848832 | CAGATACTGAGTCACCCTCAGC | 723 | RNA41 |
| 1 | 178104014 | AAGTACCTAAATACCCTTGGGG | 724 | RNA41 |
| 1 | 179507899 | AAGATACCATTCTAACCCTCTGA | 725 | X50 |
| 1 | 180840385 | AAGGTAACTAAGAAACCCTCAGA | 726 | X60 |
| 1 | 183484429 | CTCATACCACAATAACCCTCATG | 727 | X60 |
| 1 | 183743474 | AAGATAATGAATATCACCCAGG | 728 | RNA41 |
| 1 | 185824500 | AAGATACTAATAAACACTCAGG | 729 | RNA41 |
| 1 | 188687384 | CAGATACCTGAATAAGCAGAAGC | 730 | X60 |
| 1 | 194817380 | ATAATACCTGAATACTCTCAGA | 731 | RNA41 |
| 1 | 199542263 | TCTATACCTGCATAACCCTAAGG | 732 | X50 |
| 1 | 201739039 | AAGTTACCAGGAGGACCCTCAGG | 733 | X50 |
| 1 | 203127991 | AAGAGACCGGAATGCCCCCTTGG | 734 | X60 |
| 1 | 209196372 | AACAGGCCATAAGAACCCTCTGG | 735 | X60 |
| 1 | 209428278 | TAAATGCCAGGATAAGCCTCTGG | 736 | X60 |
| 1 | 217518556 | TACATAACTGAATAACTCTCCAA | 737 | X60 |
| 1 | 222014072 | AAGAAAGCTGAGTAAGCCCGGG | 738 | RNA41 |
| 1 | 228023082 | GGGATACCCGAATAACCCCACAG | 739 | X60 |
| 1 | 228546593 | GAGACACCTGGGTAACCCCAGG | 740 | RNA41 |
| 1 | 228724320 | GTTATACCTGAATAAATCTGGGG | 741 | X60 |
| 1 | 230479071 | AAAATACCTGCATAACCCTGAGA | 742 | X40 |
| 1 | 230750818 | CAGTTCCCTGAGTCACCCTCAGT | 743 | X60 |
| 1 | 231757688 | AAGATACATGAACTTCCCACAGG | 744 | X50 |
| 1 | 232190288 | AAAATAAGTGAATAACCCACTAA | 745 | X60 |
| 1 | 233265568 | TAGGTACCTGAGTAACTCTGCGG | 746 | X50 |
| 1 | 235139684 | AAGAAACCAGATAACCCACAGC | 747 | RNA41 |
| 1 | 238895801 | AAGATACCTGCATAATCTAGGA | 748 | RNA41 |
| 1 | 244048003 | AGGATACCTGCGTAACTCGCAGC | 749 | X60 |
| 1 | 245228289 | AAGATACCTGGAGATGCCCCTTG | 750 | X60 |
| 2 | 2541015 | AAGATATCAGAATAACTCTGGCT | 751 | X60 |
| 2 | 5866267 | CCTGTACCTGCATAACCTTCTGG | 752 | X60 |
| 2 | 11192249 | AAGATACCTAAAAAGCCCCCAGC | 753 | X50 |
| 2 | 14318310 | TAGATACCCAAATAGCCCCTCAGG | 754 | DNA41 |
| 2 | 17555591 | TCTATACCTAAATAGTCCTCAGG | 755 | X60 |
| 2 | 18083124 | AAAATACCAGAATAACCCATTTA | 756 | X60 |
| 2 | 18570047 | AAGATATCTGAATAAACTCCAAA | 757 | X60 |
| 2 | 23315873 | ATGATTATTAAATAACCCTCAAG | 758 | X60 |
| 2 | 24850333 | AAGATCCCTGATTACCATTCCAG | 759 | X60 |
| 2 | 28691746 | AAGATACCTGGCTCAACCTCATC | 760 | X60 |
| 2 | 29326137 | AATGTGGCTGAAAAAGCCTCTGG | 761 | X60 |
| 2 | 30453369 | AAGATACCTAAACATTCCAGTGG | 762 | X60 |
| 2 | 31504056 | AAGAGAGCTGGACAACTCTAAGG | 763 | X60 |
| 2 | 33271364 | AAGATAGGTCAATAACCACCCGG | 764 | X50 |
| 2 | 33829479 | TAGATAACTGAATAAACTCTATGG | 765 | DNA41 |
| 2 | 35540632 | AAGATGTATTATTGACCCTCTGG | 766 | X60 |
| 2 | 38119450 | TAGAAAACAGAATGACTCTCAGG | 767 | X60 |
| 2 | 42166900 | AATAACCAAAATAACCCTCCAG | 768 | RNA41 |
| 2 | 46398173 | TATGTACCTAATAAGCCTCAGG | 769 | RNA41 |
| 2 | 49841412 | CATATATCTGAATAGCCTTCTGG | 770 | X50 |
| 2 | 56159084 | AAGATACAGAATTCCCCTCTGA | 771 | RNA41 |
| 2 | 56257553 | AAGTTACATGAAAAACATCTGG | 772 | RNA41 |
| 2 | 57130463 | AAAATACCTGAATAATCCTCGAA | 773 | X40 |
| 2 | 59482506 | AAGATACCAGAGAAAGTCTCAGA | 774 | X60 |
| 2 | 60290320 | CAAATACCAGAATACCCTACAGG | 775 | X60 |
| 2 | 64169496 | ATGATCCTAAATAACCTTCCAG | 776 | RNA41 |
| 2 | 68986545 | AACAACATGAATGACTCTCTGG | 777 | RNA41 |
| 2 | 71741885 | AAGATAAAGGTATCTCCCTCTGG | 778 | X60 |
| 2 | 72415642 | AAGCCAACTGAATAACACTGTTG | 779 | X60 |
| 2 | 72619690 | ATGATACCTGAATACCTCTAATG | 780 | X50 |
| 2 | 75266724 | AAGCCAACTGAAGAGCCCTTGGG | 781 | X60 |
| 2 | 80321182 | AAGAACTTGATAAACCCTCAAG | 782 | RNA41 |
| 2 | 87443936 | TTGACACCTAAATAACCCTTTGG | 783 | X50 |
| 2 | 98349660 | AAGAGACCAGAAGCAACCTCTGT | 784 | X60 |
| 2 | 100696913 | AAGAAACATGAACAGAGCCTCAGG | 785 | DNA41 |
| 2 | 104408132 | GAGATACCTGTATAAGTCACTAG | 786 | X60 |
| 2 | 108664444 | AAAATGCCTTAAGAACCCTGGGG | 787 | X50 |
| 2 | 111506561 | TTGACACCTAAATAACCCTTTGG | 783 | X50 |
| 2 | 112735695 | TAGATACTCAGTAACCCTCTTG | 788 | RNA41 |
| 2 | 115162717 | AAGAGACAGGAATAACCCTCAGC | 789 | X40 |
| 2 | 121516112 | AAAATACCATGTAAAACACTCTGG | 790 | DNA41 |
| 2 | 122492850 | GAGATACAGAATAGCCCTGGGG | 791 | RNA41 |
| 2 | 124401576 | AAGAACCTAAATCACCATTGGG | 792 | RNA41 |
| 2 | 128856709 | AAGATATCTGGATAATCCACCAA | 793 | X60 |
| 2 | 141714040 | AAGATACTGGAATAAACATAAAG | 794 | X60 |
| 2 | 143719680 | AAAATGCCTCAATATCTCTGTGG | 795 | X60 |
| 2 | 144191771 | AAAATACCAAAATAACCCTAAAG | 796 | X50 |
| 2 | 149423627 | TAGATACCTGAAATACTCTATGC | 797 | X60 |
| 2 | 153591411 | AAAATACCATAATTTCCCTCAGA | 798 | X60 |
| 2 | 154142624 | AAGATACCAAATAAACCTCTGA | 799 | RNA31 |
| 2 | 155791011 | AAGATACCTAAAATACCTATTGG | 800 | X60 |
| 2 | 155965426 | CAGATACCTGAAAAACTCTCTCT | 801 | X50 |
| 2 | 157734996 | AATAAACACTGAATAACCCTTTGT | 802 | DNA41 |
| 2 | 163699397 | CAGCTACCTAATTACCCTCTGG | 803 | RNA31 |
| 2 | 163782922 | TAGGTACCTGATTTACCCTGATG | 804 | X60 |
| 2 | 166944919 | AAGATACCTCAGGAACCAGCAGC | 805 | X60 |
| 2 | 168821195 | AAAAGACCTAAAAAGCCCTCTGG | 806 | X50 |
| 2 | 169944031 | TCAATTACTGAATAACCCTCTTG | 807 | X60 |
| 2 | 170941666 | AATATACATGAATAAATCTCACA | 808 | X60 |
| 2 | 173215359 | AAAAAACGTGAAAAACCTTAGGG | 809 | X60 |
| 2 | 174371138 | AAGATACCTGTTAGCCCTCACC | 810 | RNA41 |
| 2 | 176698280 | AAGTTTCATGCATAAAACTCTGG | 811 | X60 |
| 2 | 180424100 | AAGGTACCTGAAGAACTCAACTG | 812 | X60 |
| 2 | 181934742 | AAGATGTATGAATAACTCTCGGG | 813 | X40 |
| 2 | 183685747 | AAGCAACCTAAATGTCCATCAGG | 814 | X60 |
| 2 | 183737398 | GAGATACCTGGATAACCACTTGG | 815 | X50 |
| 2 | 184251994 | AAGACACCTGGAGAACTCTCGGG | 816 | X40 |
| 2 | 188364288 | AAGTAACCCAATAACCCTGAGG | 817 | RNA41 |
| 2 | 188883471 | ACAATACGTGAATGAATCCTCTGG | 818 | DNA41 |
| 2 | 191075654 | AAGATTCCAGACATACACTCTGG | 819 | X60 |
| 2 | 191371557 | TAAGTAGCTGTATAACCCTGGGG | 820 | X60 |
| 2 | 195665474 | TAAATACTTGAAAAACCCACAGA | 821 | X60 |
| 2 | 196276026 | AAGTTATCTGACTAACAATCTGT | 822 | X60 |
| 2 | 196963744 | AATATACATGAATTTCTCTTAGG | 823 | X60 |
| 2 | 197268832 | AAGATGCCTCCCTAACACTGGGG | 824 | X60 |
| 2 | 197475333 | TACATACCAACAACCCTCTGG | 825 | RNA32 |
| 2 | 198342120 | AATAGAGCTGAAAAACCCTCACT | 826 | X60 |
| 2 | 198435701 | AAATTAGATGAATAACCCTTAGT | 827 | X60 |
| 2 | 202129138 | AAAATACCTGATACCCCCTGG | 828 | RNA32 |
| 2 | 202797188 | AGAGTACCTGAATACCTCTGG | 829 | RNA32 |
| 2 | 203165696 | AGAATATCTGAATTACCCTCAAG | 830 | X50 |
| 2 | 204928058 | AAGATACATGAGTAAACCCAGC | 831 | RNA41 |
| 2 | 206764957 | AGGAGACCTGCACAGGCCTCTGG | 832 | X60 |
| 2 | 216172775 | AATTTATATGAAAAACCCACTGG | 833 | X60 |
| 2 | 217541307 | AAGATACCTGATCAATCCTCTTC | 834 | X50 |
| 2 | 217737466 | AAGATACCAGACCAAAGCTCAGG | 835 | X50 |
| 2 | 220751309 | TAGAGACATGAAAAACCCTCCAA | 836 | X60 |
| 2 | 221762944 | AATATTCCTGAATCCCTCGGG | 837 | RNA22 |
| 2 | 226128392 | CTCATACCTGAATAACCTTCTCA | 838 | X60 |
| 2 | 226932531 | CAGATACCGAGAAAAACCCTCTGG | 839 | DNA31 |
| 2 | 227560446 | AAGATATATGAAAAAGCCTATGC | 840 | X60 |
| 2 | 228586979 | CAGATACCTCACCAACACTCCAG | 841 | X60 |
| 2 | 232730167 | CAGAGACCTGAAAAGCCCTGCCG | 842 | X60 |
| 2 | 240208622 | AAAAGGCCTGCAGAAACCTCTGG | 843 | X60 |
| 2 | 241728292 | CAAATCCTTGAATCACCCCCAGG | 844 | X60 |
| 2 | 241778506 | AAGATACCTGGCCACACCCCAGG | 845 | X60 |
| 3 | 539550 | GAGATAATGAATAGCCCTCCGG | 846 | RNA31 |
| 3 | 7611430 | AAGATACCTGTCATCCCTCCGT | 847 | RNA41 |
| 3 | 8738135 | GGGATACCTGCATAACTCTCAGG | 848 | X40 |
| 3 | 11156153 | GAAATGCCTGAATCACACTCGAG | 849 | X60 |
| 3 | 11683514 | AAGATACTGAATCAACTTCAGT | 850 | RNA41 |
| 3 | 16474484 | AAGATACCAGTACACCCCCAGG | 851 | RNA41 |
| 3 | 19871463 | ATGATACCTCAATAACCCTATTT | 852 | X50 |
| 3 | 25070750 | AAAATACCTGAACATACCTTGAG | 853 | X60 |
| 3 | 35461847 | TACATACCTAACAACCCCTCAGG | 854 | X60 |
| 3 | 35699317 | AAGAAACAAGGGAAACCCTCAGG | 855 | X60 |
| 3 | 36482333 | AAGATACCAGGATGGCTCTCTGC | 856 | X60 |
| 3 | 37570248 | CAACAACCAGAATAACCCACAGG | 857 | X60 |
| 3 | 37680767 | AAGATTAAAAGAATAAACCTCAGG | 858 | DNA41 |
| 3 | 38875399 | AACTTACCTGCAAAACCATCTGG | 859 | X50 |
| 3 | 56933123 | AAGATCTGAATTACCATCAGT | 860 | RNA32 |
| 3 | 61401423 | GAGATCCTTAACAACCCTCAAG | 861 | RNA41 |
| 3 | 64532843 | AAGATATCTGAGCCACACTCTCG | 862 | X60 |
| 3 | 68532737 | AAGCTACCTGAAAACCTTCAGG | 863 | RNA21 |
| 3 | 70442317 | AAGATGACTGAAGAAACCTTGGG | 864 | X50 |
| 3 | 70620477 | AAGATCCCTGCAAACCCTTTTGG | 865 | X60 |
| 3 | 71429771 | AAGACAGCTAAATCACCCCACGG | 866 | X60 |
| 3 | 71714408 | AAGATCACAGAATCACCCTCCTC | 867 | X60 |
| 3 | 74054464 | AATAGACATGAATAACCCTAAGA | 868 | X50 |
| 3 | 76238395 | CAGACACCTTACTAACTCTCCTG | 869 | X60 |
| 3 | 82942470 | AAGATACACAAATAAACTTCTAG | 870 | X60 |
| 3 | 83311768 | AAGATATCTGAAAAACTCTCAAA | 871 | X50 |
| 3 | 84371314 | AAGACACTGAATAACCCACAGA | 872 | RNA31 |
| 3 | 86668690 | TAGATAGCAAATAACCCTAGGG | 873 | RNA41 |
| 3 | 98032158 | AATAGACCTAAATAACCTCAAG | 874 | RNA41 |
| 3 | 99319950 | AAGTTACCTGACTAACCCTGAGG | 875 | X30 |
| 3 | 100809940 | AAGATATCTGAATAACTACAAGG | 876 | X50 |
| 3 | 107069791 | AAGATACTTGGATAACTCTGCTA | 877 | X60 |
| 3 | 107509328 | AAGAGGCTGGAATAAGCCACGGG | 878 | X60 |
| 3 | 111016912 | AAGATACATAAATATCACTGCAG | 879 | X60 |
| 3 | 118950239 | CACTAACCTGAATAGCCCTAAGG | 880 | X60 |
| 3 | 120988045 | AATATACCTGAAAAACCATCAGG | 881 | X30 |
| 3 | 121667776 | AAAATACCTAAAGAAATTTCAGG | 882 | X60 |
| 3 | 122037269 | CGTGTACCTGAAAAAGCCTCAGG | 883 | X60 |
| 3 | 126759212 | GTGAGGCCTGAAGAACACTCTGG | 884 | X60 |
| 3 | 133985020 | AAGTTACTGAATATCCCTCCAG | 885 | RNA31 |
| 3 | 140863741 | AAGAAACCGGAATGAGCCCCCAG | 886 | X60 |
| 3 | 141050688 | CAGATACCAGAAGCACCCTCGAG | 887 | X50 |
| 3 | 142685343 | TAGATAACTGAAATATCCCTCTGG | 888 | DNA31 |
| 3 | 143875802 | GAGATACCCAAATAAACCTCAAA | 889 | X60 |
| 3 | 151175376 | AAGATACTGAATAAAGCTCTTA | 890 | RNA41 |
| 3 | 151226712 | AAGATAACTGAAGAAACTGAAGG | 891 | X60 |
| 3 | 151395707 | AAGATACCAGGGTAACTCTATGA | 892 | X60 |
| 3 | 155083487 | AAGATACCTGAATATCCAACCTA | 893 | X50 |
| 3 | 161319971 | AAGCTGACTGAAGAGCCCTTGGG | 894 | X60 |
| 3 | 168443226 | AGTATTTCTGACAAACCCTCAGG | 895 | X60 |
| 3 | 169534358 | GAGATAGCTAATAACCCCCTGG | 896 | RNA31 |
| 3 | 171933625 | AAGACAACTGAAAAACGCTGTGG | 897 | X50 |
| 3 | 173995167 | AAGACACCTGAATAATCTCTGGA | 898 | X60 |
| 3 | 176890998 | ATGATAAGTGAATAAGTCTCATG | 899 | X60 |
| 3 | 177768689 | AGGATATATGAAAAAGCCTGCGG | 900 | X60 |
| 3 | 187379619 | AAGATACCCTAAAAGCCTTTGG | 901 | RNA41 |
| 3 | 188484179 | AAGATGCATGAATAACCTCTGGA | 902 | X60 |
| 3 | 190699564 | ATGACACCAGAAAGACCCTAAGG | 903 | X60 |
| 3 | 192710228 | AAAATACTAAATAACCCCATGG | 904 | RNA41 |
| 4 | 723653 | CAGATTCCTGGAAGACCCTCAAG | 905 | X60 |
| 4 | 11334933 | AAGAGACCTCAAGGTCTCTCTGG | 906 | X60 |
| 4 | 12971711 | AAGACTAAAGAATAACCCTCTGG | 907 | X50 |
| 4 | 15327544 | AATATGCCTACATTACACTCAGG | 908 | X60 |
| 4 | 16411507 | AAGACACTGAATAACCCTTGGC | 909 | RNA31 |
| 4 | 20157051 | AAGATAGTGAGTAAGTCTCAGG | 910 | RNA41 |
| 4 | 23244775 | TAGATAAGAATAGCCCTCAGG | 911 | RNA32 |
| 4 | 26200297 | TCTATACCTCAATAACCTCCTGG | 912 | X60 |
| 4 | 28742386 | AAGATACCTAAGTGCTCCACAGG | 913 | X60 |
| 4 | 29008961 | AAGAAACCTACAATAACCTTCATG | 914 | DNA41 |
| 4 | 33579022 | CCGATATCAGAATATCCCTTAGG | 915 | X60 |
| 4 | 44748785 | AAGATGCATGAAAAAGCTTCAGT | 916 | X60 |
| 4 | 44812393 | TAGATATCTGCAGAACTCTCCGC | 917 | X60 |
| 4 | 45258647 | AACATACATCAATAACTTTCTTG | 918 | X60 |
| 4 | 46495164 | AAGATACTTGAATACCAATCAAG | 919 | X50 |
| 4 | 47192935 | TAAAGACCTGAATAACCTCAAG | 920 | RNA41 |
| 4 | 47840228 | AAGATATTGAATATACCTCAGG | 921 | RNA31 |
| 4 | 51965380 | TAGTTACCTGAATACACCTCTGG | 922 | X40 |
| 4 | 66291743 | TATATACCTGGAAAACCCTAAAG | 923 | X60 |
| 4 | 74170265 | TAGATACATAATAACCAACTGG | 924 | RNA41 |
| 4 | 84374124 | GAGATACTTGAATCCCTCAGG | 925 | RNA22 |
| 4 | 87976264 | AAGATACCTGTATGACACTGTGT | 926 | X50 |
| 4 | 88117912 | AAGATACCTAAATAACAAGCTGG | 927 | X40 |
| 4 | 90779595 | AGGATACATGCATAACCCATGAG | 928 | X60 |
| 4 | 91244542 | AAGATCCAGAATAATTCTCTGG | 929 | RNA31 |
| 4 | 91936467 | AAGATACATGAAAAATTCTCTCA | 930 | X60 |
| 4 | 93373949 | AATATACCCTAATAAGCCTTCTG | 931 | X60 |
| 4 | 93711948 | AAGATGGCTGAATAGAACCTTCCAG | 932 | DNA42 |
| 4 | 96659665 | AATATACCTTATTATCCTTCAGA | 933 | X60 |
| 4 | 100450684 | CAGATACAAGAGTACTCCTCAGG | 934 | X60 |
| 4 | 101268626 | TCTATACCTAAATAAACCTAAGG | 935 | X60 |
| 4 | 104738004 | TAGATACCTCAATAATTCTCTCT | 936 | X60 |
| 4 | 115433239 | AAATAACATAAATAACCCTCAGA | 937 | X60 |
| 4 | 115953135 | CAGAAGCTGGATAGCCCTCGGG | 938 | RNA41 |
| 4 | 136101368 | AAGAACATGAGTAACCCTAAGG | 939 | RNA31 |
| 4 | 136644335 | AAGATACTTGAAAAACACCAGGT | 940 | X60 |
| 4 | 136853658 | AAGAGAACTGAAAAGCCTCAAG | 941 | RNA41 |
| 4 | 144234750 | AAGATACCAAATAACTCTCTGG | 942 | RNA21 |
| 4 | 146835606 | AATATGCCTGTAACCCTCAAG | 943 | RNA32 |
| 4 | 149064984 | AAGCTGACTGAAGAGCCCTTAGG | 944 | X60 |
| 4 | 155932126 | AAAATTCATGAAGAACCCTGGGT | 945 | X60 |
| 4 | 157312624 | AAGATACGTGAATAACTCAGGAT | 946 | X60 |
| 4 | 159332385 | AAGATATCTGAACAATTCTAAGG | 947 | X50 |
| 4 | 160192361 | AAGATACTTGAATCACTGTCAGT | 948 | X50 |
| 4 | 168412887 | AAGATCCTGAATAATTCTCTGG | 949 | RNA21 |
| 4 | 170886954 | AAGAAGCCTGGATAGAACTCTGG | 950 | X60 |
| 4 | 172543878 | TTGATACCTGAATAACACTCCAG | 951 | X40 |
| 4 | 172763007 | AAAAAAAATGAATTACCCTCATG | 952 | X60 |
| 4 | 174561024 | GAGATCCAGAATTACCCTTGGG | 953 | RNA41 |
| 4 | 181671436 | AACATACCTAAATAACTCCTGGC | 954 | X60 |
| 4 | 184625030 | AATCTACCTGATGACCCTCGGC | 955 | RNA41 |
| 4 | 186075007 | AAGTTAACTGTAAAACAGCCTCAGG | 956 | DNA42 |
| 5 | 6252615 | AAGAAATCTGAAAGCCCTGGGG | 957 | RNA41 |
| 5 | 7102627 | GAGATACCTGCATAACACTTAAT | 958 | X60 |
| 5 | 7274614 | CAGATAACTGAACAACCAGATGG | 959 | X60 |
| 5 | 7657678 | AACTTAGGTGATTAACCCTCACG | 960 | X60 |
| 5 | 8704833 | ATGATACTGAATAAGTCTCAGG | 961 | RNA31 |
| 5 | 9774717 | AAGATCCAGAATAATTCTCTGG | 929 | RNA31 |
| 5 | 13575913 | AGAATACCTAGTGACCCTCAGG | 962 | RNA41 |
| 5 | 16123391 | AACAGACCTTCATAGCCCTCAGA | 963 | X60 |
| 5 | 16404802 | TATATACCTAAATAACCTAGGG | 964 | RNA41 |
| 5 | 20733472 | AAGATCTCTGAAATGCCCTGAGG | 965 | X60 |
| 5 | 23248793 | AACTTAACATAATAACCTTCAGG | 966 | X60 |
| 5 | 34351741 | ATGATAGTGAATAATCCTCATG | 967 | RNA41 |
| 5 | 35773444 | AAGATACGAGAATAACCTCAAGA | 968 | X60 |
| 5 | 35946321 | AAACTACCTGGATGACCCTCTGA | 969 | X50 |
| 5 | 36662538 | AAGAAGATGAATTACTCTCTGG | 970 | RNA41 |
| 5 | 42904833 | AAGATACAGAGTAACTCTTGGG | 971 | RNA41 |
| 5 | 43693099 | GAGATAGCTGAATAATCCCTCAG | 972 | X60 |
| 5 | 45541710 | AAGATACATCAGTAAGCCACAGT | 973 | X60 |
| 5 | 55453226 | AAAATACATTAATAAAACTAAGG | 974 | X60 |
| 5 | 58609559 | AGTAGAGGTGAATAACCCTCAGC | 975 | X60 |
| 5 | 60295257 | CAGATACTTAAATAACCATAAGG | 976 | X50 |
| 5 | 61555769 | AAGAACCTGACAAGCCCTCAGA | 977 | RNA41 |
| 5 | 66999062 | AAGATCCATCAATAAACCACGTG | 978 | X60 |
| 5 | 69412657 | AAGATACTTTTAAAACCCAGTGG | 979 | X60 |
| 5 | 73013090 | AAGATCCTGAATTACTCTCAAG | 980 | RNA31 |
| 5 | 73504738 | AAGATACCTGAACAACTCCACAC | 981 | X60 |
| 5 | 75225969 | AAGCTGACTGAAGAGCCCTAGGG | 982 | X60 |
| 5 | 78444765 | TTGATACCTGTATTACACTCATG | 983 | X60 |
| 5 | 82799696 | AAGATACAGAGAATAACCCTCACA | 984 | DNA41 |
| 5 | 83300276 | AAAATACCTCACTAGCTCTCCAG | 985 | X60 |
| 5 | 85150663 | AAAATAATTGAAAAACTCTCTGT | 986 | X60 |
| 5 | 87098398 | ATAAGAACAGAATAACCTTCTGG | 987 | X60 |
| 5 | 91842929 | AAGAGTCATGCATAGCCCTCCAG | 988 | X60 |
| 5 | 105774459 | AAGATACTGAATAAACTCCTGC | 989 | RNA41 |
| 5 | 106733933 | AAGAAACACAAATAACCATCAGA | 990 | X60 |
| 5 | 108874504 | GAGATGCTGAATAACTCTCTGG | 991 | RNA31 |
| 5 | 112311434 | AAGATACTGAGTATCTCACAGG | 992 | RNA41 |
| 5 | 112422645 | AAGACACCAAGATAGCACCCTCGGG | 993 | DNA42 |
| 5 | 113833519 | AGTATACCTTAATACCCCCTGG | 994 | RNA41 |
| 5 | 114129926 | ATTATACCTAATAACCCTATGG | 995 | RNA31 |
| 5 | 117372593 | AATATAGCCCAATATCCCTCATG | 996 | X60 |
| 5 | 118452920 | CAGATACCTGAATGATCCTTTTC | 997 | X60 |
| 5 | 119760952 | AAGAAAGCTGAGTAGTCCTCAGA | 998 | X60 |
| 5 | 132792147 | AAGGGACAGGAAGAACCCTGAGG | 999 | X60 |
| 5 | 132904762 | AAGATAGCTGTATAACCTTTATC | 1000 | X60 |
| 5 | 137163670 | AAGTTAGCGGAACTCACCCTCAGG | 1001 | DNA41 |
| 5 | 137764269 | AAGAGAGCTAGCTAGCCCTCTGG | 1002 | X60 |
| 5 | 142640990 | AGGATTTCTGGATAACACTTTGG | 1003 | X60 |
| 5 | 143734240 | GAAGTACCTGAAAAACCCTCTGC | 1004 | X50 |
| 5 | 148112086 | GAGGTACTTGAATCACCATCAAG | 1005 | X60 |
| 5 | 151722432 | TAGCTTACTGAATAACCCTAAGG | 1006 | X50 |
| 5 | 152708508 | AAGAGGCATGAATAACCCTGTTC | 1007 | X60 |
| 5 | 153529703 | CAGTTACGAATAACCCTCAGA | 1008 | RNA32 |
| 5 | 156251323 | AAGATACTGAAAAACCCTCTGA | 1009 | RNA21 |
| 5 | 160330029 | AACAGACATGAAGAAGGCTCAGG | 1010 | X60 |
| 5 | 163829739 | ACCATACCTGAAGGACCATCTTG | 1011 | X60 |
| 5 | 164401431 | AAGAGACCTTAAAACTCTCTGT | 1012 | RNA41 |
| 5 | 165782539 | ACAAGACCAAAATAACCCACAGG | 1013 | X60 |
| 5 | 172047699 | ACGATGGCAGAACAAACCTCAGG | 1014 | X60 |
| 5 | 173042104 | AAGATACCTCAAACACCAGCCGT | 1015 | X60 |
| 5 | 175751428 | AAGACACCTAAATATCCCTGGGA | 1016 | X50 |
| 5 | 177550455 | AAGATACTGACTAATCATCTGC | 1017 | RNA41 |
| 6 | 2810238 | TAGACACCTGAGTCACCCTCTTA | 1018 | X60 |
| 6 | 3633347 | GTGATACCAGATTAACCTCTGG | 1019 | RNA41 |
| 6 | 3993855 | AGAGTAACTGAATAACCCTACAG | 1020 | X60 |
| 6 | 6543792 | TTTGTACCAGAATAACCCTCCTG | 1021 | X60 |
| 6 | 8845584 | AAATTAACTGCATAACCCTGGGT | 1022 | X60 |
| 6 | 12146644 | AAAAAACTTGAATTACCTTCTAG | 1023 | X60 |
| 6 | 13274573 | CTGAAACCTAAATAATCCCCCGG | 1024 | X60 |
| 6 | 15494007 | AAGACCCAGGAATCACACTCTGG | 1025 | X60 |
| 6 | 16159742 | AGAAGACCTGAATACCCCCAGG | 1026 | RNA41 |
| 6 | 17837365 | CAAATACCTAAAGAACTCTCCTG | 1027 | X60 |
| 6 | 18241159 | CCTATACCTAATAACCTTCAGG | 1028 | RNA41 |
| 6 | 20501819 | AAGATACCTGGAAAACTCCCAAA | 1029 | X60 |
| 6 | 22811364 | TAGACACCTAATAATCCCCAGG | 1030 | RNA41 |
| 6 | 24130572 | GTGATACCTGTCAGACCCTCGGG | 1031 | X60 |
| 6 | 25968782 | AAGATACCAGAATTCCCCTCTTC | 1032 | X50 |
| 6 | 26726581 | AAGATGGCTGAGAAAAACTCAGG | 1033 | X60 |
| 6 | 26775081 | AAGATGGCTGAGAAAAACTCAGG | 1033 | X60 |
| 6 | 28642665 | CGTGTACCAGAATCACCCTCAGG | 1034 | X60 |
| 6 | 28976992 | AAGAACTTGTAGAACCATCAGG | 1035 | RNA41 |
| 6 | 31728324 | AAGATACCCCATCACCCCTCCCG | 1036 | X60 |
| 6 | 31925117 | AAGATCAGCAGAAGAACCTTCTGG | 1037 | DNA41 |
| 6 | 32569518 | AGTATACCTAAACAAACCTCAGA | 1038 | X60 |
| 6 | 35414348 | AAGATCCTGCATACCCTTCTGT | 1039 | RNA41 |
| 6 | 39979448 | AAGATCCAGATTAACCCTCTAG | 1040 | RNA31 |
| 6 | 40805097 | AACATCCCTGAAGACCCTTGAGG | 1041 | X60 |
| 6 | 41733389 | AAGATACCTGGGTCCCCATTTGG | 1042 | X60 |
| 6 | 42264231 | AAGATCCTTAAATACCCTCTGG | 1043 | RNA31 |
| 6 | 42676866 | AAGATAACTAACTCACCTTCCCG | 1044 | X60 |
| 6 | 45506487 | ATGATATATGAACAACCCTCTGG | 1045 | X40 |
| 6 | 45565147 | AACATACTCGAATACCCCTCAAA | 1046 | X60 |
| 6 | 45812353 | AGCTTACCTGCTTAACCCTCAGG | 1047 | X50 |
| 6 | 45989719 | AAGATACCAAAATTCCCCAATGG | 1048 | X60 |
| 6 | 46206185 | ACGATACTGGAATAAGCCTTTGA | 1049 | X60 |
| 6 | 51499203 | CAGTACCTCAACAACCCCCTGG | 1050 | RNA41 |
| 6 | 51857715 | AATATCCTGAATAAACCTCTAG | 1051 | RNA31 |
| 6 | 57915493 | AAGACACCTGATAAAAACTCTGT | 1052 | X60 |
| 6 | 62452292 | AAGATACAGAATAAACCTAAGG | 1053 | RNA31 |
| 6 | 66308858 | GAGATACTTGAACAACTCACTGG | 1054 | X50 |
| 6 | 66899926 | AAGAAACCAGAGAAACCTTCGAG | 1055 | X60 |
| 6 | 71004311 | AAAGTACCTAAATAACCAACCAG | 1056 | X60 |
| 6 | 76467643 | AAGAAGGTGAATAACACTTAGG | 1057 | RNA41 |
| 6 | 78402401 | AAGATACCTGGCTAGCCATATGC | 1058 | X60 |
| 6 | 79368236 | AAGCTACCAGAGGAACAATCAGG | 1059 | X60 |
| 6 | 84651006 | CATTTACTGAATAACCCTTTGG | 1060 | RNA41 |
| 6 | 84877021 | GATAAACATGAAGGACCCTCAGG | 1061 | X60 |
| 6 | 89636030 | AACGTACCTGAACAACCCTCAGG | 1062 | X30 |
| 6 | 90026983 | ACACTACCTGAATGACCCTCAAG | 1063 | X50 |
| 6 | 91316610 | AATATACATGAAACACACTTAGG | 1064 | X60 |
| 6 | 100261928 | AAGATACCTAAATGTCCATCAAC | 1065 | X60 |
| 6 | 101477606 | CAGATATGAATAAACCTCTAG | 1066 | RNA32 |
| 6 | 104427293 | AATAGTACTCAATAAACCTCTGG | 1067 | X60 |
| 6 | 105452361 | AGTATACATGAATAGCCCTCAGG | 1068 | X40 |
| 6 | 113288211 | TTGCTACCTGAATAACCCTCTTG | 1069 | X40 |
| 6 | 125169983 | AAGATATCTGAGGAAGCGTCTTG | 1070 | X60 |
| 6 | 125494646 | AAGATACCTGAAACCCTCTGG | 1071 | RNA02 |
| 6 | 126401280 | CAGATATTGAAAAACCCTCTGG | 1072 | RNA31 |
| 6 | 127951944 | AAGGTATCCAAATAACCCTTTGG | 1073 | X50 |
| 6 | 133766716 | TAAATACCTGAACAACTCTAGGG | 1074 | X50 |
| 6 | 134020048 | AAGATTACATGAGTACCCCTCCTG | 1075 | DNA41 |
| 6 | 141080346 | ATGATAGTGAATAACTCTCTTG | 1076 | RNA41 |
| 6 | 141657228 | AAGATATCTGAAAAATCCACAAA | 1077 | X60 |
| 6 | 142866995 | AAGATTTCTTATAACCCTCTGG | 1078 | RNA31 |
| 6 | 146355335 | AAGATACTCTGAATAACTTTCTGG | 1079 | DNA21 |
| 6 | 147553748 | AAGTCATCTGAATAACCCTCAAG | 1080 | X40 |
| 6 | 152311384 | AAGATACGTGCAATAACTATCAAG | 1081 | DNA41 |
| 6 | 158194025 | AAGATACATTAGTAACATTTTGG | 1082 | X60 |
| 6 | 159249441 | AAGAAACACTTAAAAACCATCTGG | 1083 | DNA41 |
| 6 | 159877092 | TAGATACCTGTATAACCACCACC | 1084 | X60 |
| 6 | 163714704 | AACTTACCTGAACATGCCCCTGG | 1085 | X60 |
| 6 | 166082374 | TAGATACATGGATTAACTTCTGG | 1086 | X60 |
| 6 | 168015970 | AAGACAGCAGTAAAACACTCTGG | 1087 | X60 |
| 6 | 168145686 | AAGATCTGGAAGAACTCTCTGG | 1088 | RNA41 |
| 7 | 5143278 | AAGAAAGGTGAGCAACACTCGGG | 1089 | X60 |
| 7 | 5180429 | AAGATACTTTAAAAAACCCCTGC | 1090 | X60 |
| 7 | 12098480 | AATATACCTAGCTAAGCCTCAGA | 1091 | X60 |
| 7 | 16189181 | AAGATAGCCTGAGTCACACTCTTG | 1092 | DNA41 |
| 7 | 17175165 | AAGAAAACAGCGTAAGCCTCAGG | 1093 | X60 |
| 7 | 18301478 | ATGAAACCTAAATAAGTCTCTGG | 1094 | X50 |
| 7 | 18326887 | TGTTTACCTGAATAACCTTCAGG | 1095 | X50 |
| 7 | 20063992 | AAGATATCTGAAAAGCCCACTTT | 1096 | X60 |
| 7 | 21393775 | TGTAAACCTGGATAACCCTCTAG | 1097 | X60 |
| 7 | 22673635 | AAGTATCATGAATACCCTCAGG | 1098 | RNA41 |
| 7 | 25237966 | AAGATCCTATATAACCCTCTGA | 1099 | RNA31 |
| 7 | 28451369 | AAAATACCTGAATAACCTGGGCC | 1100 | X60 |
| 7 | 36309411 | AAGTTACCAGAACAACCCTTAGG | 1101 | X40 |
| 7 | 43099959 | AAGAATTTGAATAACTCTCTAG | 1102 | RNA41 |
| 7 | 45063943 | AGGATACCTGAATCCCTCCAG | 1103 | RNA22 |
| 7 | 46108303 | GAGACACCTGAATAAGTGTCTGG | 1104 | X50 |
| 7 | 46457470 | AAGCTAGTGAAAAACCATCAGG | 1105 | RNA41 |
| 7 | 47819173 | AGGATACTTGAATATCCCTGCCT | 1106 | X60 |
| 7 | 49066063 | CAGATACTGAAAAACACTCTGG | 1107 | RNA31 |
| 7 | 49306954 | AAGAAATCTGGATAACCCCCAAT | 1108 | X60 |
| 7 | 60892285 | AACATACCCAAAAAAACCTCTGA | 1109 | X60 |
| 7 | 61597579 | AACATACCCAAAAAAACCTCTGA | 1109 | X60 |
| 7 | 62026418 | AACATACCCAAAAAAACCTCTGA | 1109 | X60 |
| 7 | 78658625 | AAAATATCCAAATAACCCCCTGG | 1110 | X50 |
| 7 | 81886792 | AAGATATCTGAATAATCATCAGG | 1111 | X30 |
| 7 | 88664778 | AAGATACTGAGTAACACTGAAG | 1112 | RNA41 |
| 7 | 89093321 | AAGTTACCTAAATAACTTTGG | 1113 | RNA32 |
| 7 | 89117479 | ACCATAATTGATTAACTCTCTGG | 1114 | X60 |
| 7 | 94742185 | AAGAAACCTAAGTAAACCTCTAA | 1115 | X60 |
| 7 | 96159184 | AAGATACATCATCACCCTCCTG | 1116 | RNA41 |
| 7 | 96499495 | AAGACACATAAGGAACCCTCATG | 1117 | X60 |
| 7 | 101395824 | GAGATACCTGAGCTGCCCTCAGC | 1118 | X60 |
| 7 | 104765414 | GAGATACCTAAATAACCTTCCAG | 1119 | X40 |
| 7 | 107527319 | AAGATACGAATAATCCTCCGA | 1120 | RNA22 |
| 7 | 114126788 | ATTAAACCAAAATAACCCTCGGG | 1121 | X50 |
| 7 | 117090821 | CACAAACCTTAATAACCCTCAAG | 1122 | X50 |
| 7 | 117393513 | AAGATAAAAAAATACCCCTAGGG | 1123 | X60 |
| 7 | 123985680 | AAGATATCTGAAAAAGTCTTGAG | 1124 | X60 |
| 7 | 124105262 | GAGATAACTGAATAACCATTTGG | 1125 | X40 |
| 7 | 125205185 | AAGATATCTGTAAAACCCTTCAG | 1126 | X50 |
| 7 | 125899502 | AACATACATGAAAAATCCTCAAC | 1127 | X60 |
| 7 | 127268120 | AAGGTAACTGGATAGCCATCTGC | 1128 | X60 |
| 7 | 132695120 | AAGAGACCTGAGTCACCCTGTCT | 1129 | X60 |
| 7 | 134060777 | AAGATAAATGAATTTCCTTCTGT | 1130 | X60 |
| 7 | 140628498 | AAGATACGGGAAATCCCCTTTGG | 1131 | X60 |
| 7 | 146763269 | CAGATATCAGATAACCCTATGG | 1132 | RNA41 |
| 7 | 153436410 | CAGATGCTTGTAAAACCATCAGG | 1133 | X60 |
| 7 | 153479243 | ACAGTAGTTGCATAACCCTCTGG | 1134 | X60 |
| 7 | 155749430 | AAGATTCAGCACTAACCCACAGG | 1135 | X60 |
| 7 | 157980250 | GAGATACTGAATTACCCTCTGG | 1136 | RNA21 |
| 8 | 4038549 | AAGAGACATGCATAATCTTCAGG | 1137 | X50 |
| 8 | 5643554 | AAGTAAACTGAATACCTTCTGG | 1138 | RNA41 |
| 8 | 7420667 | AAGAAACCACTATAACCATCAGT | 1139 | X60 |
| 8 | 7890852 | AAGAAACCACTATAACCATCAGT | 1139 | X60 |
| 8 | 19687879 | CAGATACTGTATAACCCTCAGA | 1140 | RNA31 |
| 8 | 21016005 | AATGTAAATGTATAACCCTCTGT | 1141 | X60 |
| 8 | 29936242 | AAGTTAACTGTAAAACAGCCTCAGG | 956 | DNA42 |
| 8 | 36495615 | AGGATACCATAATAACCAGCATG | 1142 | X60 |
| 8 | 43072291 | GCAATACCTGAATAACCCATTGT | 1143 | X60 |
| 8 | 47579895 | AAGATACCAGACCATCTCCCAGG | 1144 | X60 |
| 8 | 49597827 | AAGATCTGAATAGCACCCTGG | 1145 | RNA32 |
| 8 | 55071567 | AAGATCACAGGACAACCCTCCGC | 1146 | X60 |
| 8 | 55401326 | AAGATTCATGATAACCATCATG | 1147 | RNA41 |
| 8 | 60813307 | CAGGTACCTGGAGAACCCTAGAG | 1148 | X60 |
| 8 | 61779630 | AAGATACCTGAACACCCTACTGG | 1149 | X40 |
| 8 | 64267393 | TAGCTAGCTGATAACACTCTGG | 1150 | RNA41 |
| 8 | 65828227 | ATTATACTGAATAACCTTCCAG | 1151 | RNA41 |
| 8 | 66202960 | AAGTTACCTGCATCAAACTCATG | 1152 | X60 |
| 8 | 66947451 | AAGATACAGAATAACCCTCTAG | 1153 | RNA21 |
| 8 | 67331610 | GATATACTCTAATAACCCTCAAG | 1154 | X60 |
| 8 | 67691390 | AAGATACATAAATCACTTTCCAG | 1155 | X60 |
| 8 | 67694023 | AAAATGCCTAATAGACCTCTGG | 1156 | RNA41 |
| 8 | 68072298 | AAAACACCTGAAAAATCCTCCAC | 1157 | X60 |
| 8 | 73416526 | AAGAAACACTGAATGTCCCTCTTG | 1158 | DNA41 |
| 8 | 74109927 | GTGAAACCTAAATAACCCTCAGA | 1159 | X50 |
| 8 | 75900398 | AATATACCAGAATAGTTCTCAGT | 1160 | X60 |
| 8 | 76479079 | AAGATACTGAATATTCCTCAGG | 1161 | RNA21 |
| 8 | 78222169 | GAGATACTTGAATAACCATCTCA | 1162 | X50 |
| 8 | 80098340 | AAAGTACATTAAAAACCTTCTGG | 1163 | X60 |
| 8 | 80176030 | AAGATAATTGAATAGCCATCTTA | 1164 | X60 |
| 8 | 80682169 | AACAAACCCGTAAAACCCTCACG | 1165 | X60 |
| 8 | 83187784 | AAGATAGTTAAATATCCCCCTGT | 1166 | X60 |
| 8 | 88225407 | AAGATAATAAATAACCCTCAAG | 1167 | RNA31 |
| 8 | 91354172 | AAGCTACTTGATAACCCTATGG | 1168 | RNA31 |
| 8 | 102629148 | ATTATACCTGAATCCCTCAGG | 1169 | RNA22 |
| 8 | 106844104 | AAGTTATCCTAATAACCCTATGG | 1170 | X50 |
| 8 | 106983770 | ATGTTTACTGAATACCCCTCTGG | 1171 | X50 |
| 8 | 108954887 | AAGGGACCTGAAATTCCCTGAGG | 1172 | X60 |
| 8 | 115458181 | TAGATAACAGAATGACTCACAGG | 1173 | X60 |
| 8 | 119894846 | AAGATTCTGAATAGACCCCAGG | 1174 | RNA41 |
| 8 | 120688940 | AACATACCCAAATACTCTCAGG | 1175 | RNA41 |
| 8 | 121544316 | AAGATACCTCAATAAGACTCGGG | 1176 | X30 |
| 8 | 124209633 | TAGATACTGAAAATCTCTCAGG | 1177 | RNA41 |
| 8 | 124951793 | AGAATACAAGAATAACCCTGGGG | 1178 | X50 |
| 8 | 125028680 | AAGATACCTGAAATTCCTGCAGA | 1179 | X60 |
| 8 | 125768967 | CTGGTACTTAATAACCCTCAGG | 1180 | RNA41 |
| 8 | 130261595 | GAGATACCTAACACACACTCTGG | 1181 | X60 |
| 8 | 139484036 | ACAATACCTGAAAAACTCCCTTG | 1182 | X60 |
| 8 | 140142948 | CAGATACATTAAAACCCTCTGG | 1183 | RNA31 |
| 8 | 141381027 | CAGAACCCACAATAAGCCTCTGG | 1184 | X60 |
| 9 | 1548217 | AATAACATGAATAACACTCAAG | 1185 | RNA41 |
| 9 | 2362898 | AAGTAACCCAAATAACCCCAGG | 1186 | RNA41 |
| 9 | 3085581 | AAGATACAGAATTTCCCTTTGG | 1187 | RNA41 |
| 9 | 7499375 | AAGGTCCCTGAGCCACCCTCCAG | 1188 | X60 |
| 9 | 7701793 | AAGATCTGGAACAACTCTCTGG | 1189 | RNA41 |
| 9 | 9668247 | AACACTATTGAATAACCATCTGG | 1190 | X60 |
| 9 | 13025629 | GGGATACCTGAATATTCTCTGG | 1191 | RNA41 |
| 9 | 13825298 | AAGATGCCTGCACATCCCTCCTT | 1192 | X60 |
| 9 | 15566128 | AAGATACATGAATTACCAAAAAG | 1193 | X60 |
| 9 | 18157881 | AAGATGCTTGAAGTAGCTTCAGG | 1194 | X60 |
| 9 | 21582692 | TAGATACCTCTTATAACCCTCCAG | 1195 | DNA41 |
| 9 | 22799849 | AAGATACATCAATAAACCTGATT | 1196 | X60 |
| 9 | 22914887 | AAGATAGTCCTATAACTCTCTGG | 1197 | X60 |
| 9 | 27875283 | AAAATTAGTGGATAAACCTCTGG | 1198 | X60 |
| 9 | 28235239 | AAGATCCTGAAGAATTCTCTGA | 1199 | RNA41 |
| 9 | 29142022 | AGAATACCTGAACAACACTCTAG | 1200 | X50 |
| 9 | 33293321 | ATTAAACCTGAAACCCTCAGG | 1201 | RNA32 |
| 9 | 33907178 | AAGATAGCTAAATAACCTCTGA | 1202 | RNA31 |
| 9 | 36483605 | GAGACAACTGATTATCCCTCAAG | 1203 | X60 |
| 9 | 39480043 | AATTTACCAGAATAGCCCTCTGA | 1204 | X50 |
| 9 | 66885197 | AATTTACCAGAATAGCCCTCTGA | 1204 | X50 |
| 9 | 74963383 | AAGATACTGAAATACCCCTATGG | 1205 | X50 |
| 9 | 81338482 | AAGGTAAATGAGTAATCCTTTGG | 1206 | X60 |
| 9 | 82995745 | AAGATTACTTGAAGAAGCCTCTGA | 1207 | DNA41 |
| 9 | 85121255 | AAAGTAGCTGAATAAACCTCAAG | 1208 | X50 |
| 9 | 88846233 | AAGATAACTGAAATGCCTTCGAG | 1209 | X60 |
| 9 | 89929285 | ACTATTCCTGAATAACCCTTTGG | 1210 | X40 |
| 9 | 94468528 | AACATCCTGAATCAACCTCTGC | 1211 | RNA41 |
| 9 | 96771534 | GAAATACTGAGTACCCCTCAGG | 1212 | RNA41 |
| 9 | 97299066 | TAGATCTAGAATAAGCCTCTGG | 1213 | RNA41 |
| 9 | 100767516 | AAGATACCCAAATAACCATCAGA | 1214 | X40 |
| 9 | 107058386 | AAGACAGCTAACTAACTCTCGGG | 1215 | X50 |
| 9 | 107981569 | AAAGTAGCTGAACAGCCCTCAGG | 1216 | X50 |
| 9 | 109732394 | AAGATACCTCATTAATCATCACA | 1217 | X60 |
| 9 | 110545175 | AAGATATGGAATCAACCTCAGG | 1218 | RNA41 |
| 9 | 112078020 | AAGATACCTAATAACCACAGGG | 1219 | RNA31 |
| 9 | 114633862 | ACAGCACCTGAATCACACTCTGG | 1220 | X60 |
| 9 | 114864429 | AAGATACAAAAACAACCGACTGG | 1221 | X60 |
| 9 | 114970717 | AAGATACTCAATAAACCTCAAG | 1222 | RNA31 |
| 9 | 116496855 | ATGATAGTGAATAATTCTCAGG | 1223 | RNA41 |
| 9 | 123598985 | AAGACACATAAACCACTCTCAGG | 1224 | X60 |
| 9 | 125297490 | AAGATACTGGATAACCTTCCAG | 1225 | RNA31 |
| 9 | 125378327 | ATGATAATGAATAACCCTTGGG | 1226 | RNA31 |
| 9 | 125911093 | AAGACACTGAAAAACCCTCAAG | 1227 | RNA31 |
| 9 | 127691320 | AAGATAGCAGATTAGTCCTCAGT | 1228 | X60 |
| 9 | 127974450 | AAGAGATCGGGATAAGCCTTTGG | 1229 | X60 |
| 10 | 7147046 | TAAGTACCCAAATAAGCCTCTGG | 1230 | X60 |
| 10 | 7993040 | AAGATATCTGAATATGGACCAGG | 1231 | X60 |
| 10 | 11705444 | AAGATAGCTAAGAATCCCTCCAG | 1232 | X60 |
| 10 | 13360457 | TAGTTACAAGAATAACCCCAGG | 1233 | RNA41 |
| 10 | 14735911 | TAGATACATAATAGCCCTTTGG | 1234 | RNA41 |
| 10 | 15941531 | AAGAGCCCTGAATAAGCTTTAGG | 1235 | X50 |
| 10 | 16541599 | AAGATACTGAATAAACCCGAAG | 1236 | RNA41 |
| 10 | 21114219 | AAGATATCTGGATAATCCCCAAA | 1237 | X60 |
| 10 | 27972145 | AATATACCTTGAATACCCCTCCCT | 1238 | DNA41 |
| 10 | 32570562 | GGGATACCTTAACAACCCTGTGG | 1239 | X50 |
| 10 | 35982871 | AAAATACCTGACAGAACCACTGG | 1240 | X60 |
| 10 | 38157649 | AAAATACCTGAGTGACCCTAGAA | 1241 | X60 |
| 10 | 47125548 | AAGATTTGTGAATGACCCTAATG | 1242 | X60 |
| 10 | 50305665 | AAGATACCAGTATACTCTCTGG | 1243 | RNA31 |
| 10 | 51383143 | AAGATCCCTGAACAACACCAAAG | 1244 | X60 |
| 10 | 54571271 | AAGATACCAGTCCCACCCTCTTG | 1245 | X60 |
| 10 | 55277105 | TAGATACTCTCAATGACCCTCTGA | 1246 | DNA41 |
| 10 | 59699528 | AAGTTACTTAAATAGCTCTCTGC | 1247 | X60 |
| 10 | 62667353 | AAGATGCTTGAATTTCCCTAATG | 1248 | X60 |
| 10 | 82421522 | AAGAGATCTGGATCACCCCCAGC | 1249 | X60 |
| 10 | 83225274 | AAGATATTTGAATATTCCCTAGG | 1250 | X60 |
| 10 | 84218985 | TAATTACCAGAATAACCCTATGA | 1251 | X60 |
| 10 | 90306612 | AAGATACCTGAAATACCTGGGT | 1252 | RNA41 |
| 10 | 94280573 | AAGGTACCTGAGTAAACATTCTG | 1253 | X60 |
| 10 | 102517636 | AAGATACATGAATGAATTCAGG | 1254 | RNA41 |
| 10 | 102734271 | CAGATACCTAAGAACCCTGACG | 1255 | RNA41 |
| 10 | 106248382 | AGTATAACAGAATAACCCTATGT | 1256 | X60 |
| 10 | 118171466 | AACATATCTGAATATCTCTCTAA | 1257 | X60 |
| 10 | 119789592 | AAGATCCTGCCTCAACCTCTGG | 1258 | RNA41 |
| 10 | 120632845 | AAGATACCAAGCTAATCCTCTGC | 1259 | X60 |
| 10 | 121862898 | GAGATTTCTGAATAACCCACCCT | 1260 | X60 |
| 10 | 121868681 | GAGAGGCCTGAGTAGCCCACGGG | 1261 | X60 |
| 10 | 122274421 | AAGGAAACTGGAGAACTCTCCGG | 1262 | X60 |
| 10 | 130321175 | AAGATACTTGAATAACCATTTCA | 1263 | X50 |
| 10 | 131549720 | TGCTTACATGAATAACCCTCCAG | 1264 | X60 |
| 11 | 2376222 | TCTGTACCTGGATAACCCCCTGG | 1265 | X60 |
| 11 | 3277015 | AAGGTAACTGACAAACCATCTGA | 1266 | X60 |
| 11 | 3322831 | AAGGTAACTGACAAACCATCTGA | 1266 | X60 |
| 11 | 3502236 | AAAATAAATGAATAAAACTGTGG | 1267 | X60 |
| 11 | 4864723 | AAGTCACCAGTTTAACACTCAGG | 1268 | X60 |
| 11 | 7440757 | AAGATACCAGAATAAATCATTCTAG | 1269 | DNA42 |
| 11 | 12052022 | TAAATACATGAATAACCATTAGG | 1270 | X50 |
| 11 | 12138824 | AAAAGCCCTGATCAAACCTCAGG | 1271 | X60 |
| 11 | 12410906 | CACTTACCTGTATAACCTCAGG | 1272 | RNA41 |
| 11 | 14162519 | AAGATACTTGCAGAACCATCTGA | 1273 | X50 |
| 11 | 15458757 | AAGATCTGAATTTCCATCAGG | 1274 | RNA32 |
| 11 | 22689538 | AAGATATACATACTAACCCTCTGG | 1275 | DNA41 |
| 11 | 22781693 | GAGTACCATAATAAACCTCAGG | 1276 | RNA41 |
| 11 | 22831675 | AAAGAACCTAAATAAGCCTCTTG | 1277 | X60 |
| 11 | 25615424 | AAGACATTAAAATAACCCACAGG | 1278 | X60 |
| 11 | 25752459 | AATATACCTGGAAAACCCACACC | 1279 | X60 |
| 11 | 26574272 | AAGACACATGAATATCACTAATG | 1280 | X60 |
| 11 | 26949218 | AAGATATTGAATAACCCACATT | 1281 | RNA41 |
| 11 | 26997914 | AACATCCCAGAATGACCCACAGC | 1282 | X60 |
| 11 | 28826023 | AAGAAAGCTGGCTAGCTCTCTGG | 1283 | X60 |
| 11 | 32956605 | AAGATAACTGACTTGACCCTGTGG | 1284 | DNA41 |
| 11 | 36609914 | AAGATATGAATAAAACTCTGG | 1285 | RNA22 |
| 11 | 50574461 | AAGCTATCTGAGAAACCCTTTTG | 1286 | X60 |
| 11 | 58705310 | CAGATACCTAATAACCACACGG | 1287 | RNA41 |
| 11 | 63223967 | AAGATACCTGAAATTATTTCAGG | 1288 | X60 |
| 11 | 79064018 | TTGATACCTAAATACCCTGTGG | 1289 | RNA41 |
| 11 | 80186841 | TAAATACATGAATAATCCTCGGG | 1290 | X40 |
| 11 | 81449300 | AATTAACCTACATAACCCTCAGT | 1291 | X60 |
| 11 | 83977145 | AAGATTCTTAAATAACCCACTTT | 1292 | X60 |
| 11 | 87592156 | TAGAGACATGAAAAACCCTCCAA | 836 | X60 |
| 11 | 88339518 | AAGATTTAAGAATGAACCTCAGG | 1293 | X60 |
| 11 | 88892935 | AAGATACAGAATTTCCCTTTGG | 1187 | RNA41 |
| 11 | 92568878 | TGGATACCTGTCAACCCTCTGG | 1294 | RNA41 |
| 11 | 101689415 | AAGATCCGTGAATAAACCACAGC | 1295 | X50 |
| 11 | 104364397 | AACATACACGAATACCTCACAGG | 1296 | X60 |
| 11 | 106039497 | AAGATGATAAACAACCCTCTGG | 1297 | RNA41 |
| 11 | 109887670 | TAGATCCTAATTAACCCTCAGA | 1298 | RNA41 |
| 11 | 114155888 | AAGATACAGGTGTAGCCCTCCTG | 1299 | X60 |
| 11 | 117119305 | CTGATATGTGAAAAACCCTAAGG | 1300 | X60 |
| 12 | 3649402 | AACATACTGAACCAGCCTCTGG | 1301 | RNA41 |
| 12 | 3696467 | AAGACACGAGAAGAACCTTCTGA | 1302 | X60 |
| 12 | 3830100 | AAGACACTTGAATACCACTCTTT | 1303 | X60 |
| 12 | 4704350 | TACATACCTTGATAACCTTCAGG | 1304 | X50 |
| 12 | 8120901 | AAGTTACCTGAACAAACCTGCAA | 1305 | X60 |
| 12 | 9334202 | AAAAAACTAGAAGAACCCTTTGG | 1306 | X60 |
| 12 | 10687002 | AAGATCCCTGAATTTCCATCAGA | 1307 | X50 |
| 12 | 14689862 | AAAATACCTGCATACCCTCAGG | 1308 | RNA21 |
| 12 | 20320965 | AACTTACATGAATTACTCTTAGG | 1309 | X60 |
| 12 | 22372837 | AACATTTCTCAATATCCCTTTGG | 1310 | X60 |
| 12 | 26607410 | CAGATAACTGAATAACCCTCTGT | 1311 | X30 |
| 12 | 28330833 | TAAATACCTATAACCCACTGG | 1312 | RNA32 |
| 12 | 28550781 | GAGATACCTGAATATTCTTCCAA | 1313 | X60 |
| 12 | 32209572 | ATTATATCTGAATATCCTCTGG | 1314 | RNA41 |
| 12 | 45545836 | ATGATACCCAATACCCCTCCAG | 1315 | RNA41 |
| 12 | 47016633 | CAGATACCTGAATCTCCTTCTTT | 1316 | X60 |
| 12 | 49068780 | CAGTTACCTGGATAACTCCCTGG | 1317 | X50 |
| 12 | 54882194 | AAAATACTAGAATAACCAGCTTG | 1318 | X60 |
| 12 | 61361291 | AAGACTCAGGAATATCACTCAGG | 1319 | X60 |
| 12 | 66409389 | AAGATCCAGAAGAATCATCTGG | 1320 | RNA41 |
| 12 | 72361250 | AAAACACCTGAATAAATCCCATG | 1321 | X60 |
| 12 | 73122159 | AACATCACTGAAGAACCCTGAAG | 1322 | X60 |
| 12 | 74390201 | AAAATACCTCATAGCCCTCTGC | 1323 | RNA41 |
| 12 | 77975069 | AAAATAGCTTAATAATGCTCAGT | 1324 | X60 |
| 12 | 78463857 | AAGTTCCCTGAACACACCTCTGG | 1325 | X50 |
| 12 | 79756510 | ACTATACTGACTAACCCTCTAG | 1326 | RNA41 |
| 12 | 79913270 | AGAATATCTTCATAACCTTCGGG | 1327 | X60 |
| 12 | 81976639 | AGAAAACCTGAATAACCTATGG | 1328 | RNA41 |
| 12 | 87296671 | AAGATATTCAAATAACCCTGCTG | 1329 | X60 |
| 12 | 98856708 | GAGATACTGAATAACCTCTGGG | 1330 | RNA41 |
| 12 | 105221258 | AAGATAGCTGCTAACCCTGAGT | 1331 | RNA41 |
| 12 | 106415644 | AAAATAAATGAATAACCATCAGA | 1332 | X50 |
| 12 | 109568847 | AAGGTACTAGAAAACCCTGTGG | 1333 | RNA41 |
| 12 | 124304548 | AAGACACTGCCAAACCCTCCGG | 1334 | RNA41 |
| 12 | 128916634 | AAGATACATGAATGGCCAACGCG | 1335 | X60 |
| 12 | 131173514 | CAGAGACCTGCATAGCACTGAGG | 1336 | X60 |
| 12 | 131502294 | AAGATATCTGAAAATCCCTGCGC | 1337 | X50 |
| 13 | 20297900 | AAGAACACTGAGAAAACCCTCTGG | 1338 | DNA41 |
| 13 | 22964102 | AAGAAACCTCCATATCCATCGTG | 1339 | X60 |
| 13 | 24389118 | AAGAAACCTCCATATCCATCGTG | 1339 | X60 |
| 13 | 25266108 | AAGGTACCTTAACAACATTTTGG | 1340 | X60 |
| 13 | 26448879 | AAGGTGACTGAAGGACCCTTGGG | 1341 | X60 |
| 13 | 26553083 | ACGATAACTGAACAGCTCTCAAG | 1342 | X60 |
| 13 | 34458374 | AAGAGGGCTTAATAACCTTCAAG | 1343 | X60 |
| 13 | 39980150 | AAGATAACTGGATAGCTCTATGA | 1344 | X60 |
| 13 | 43747762 | AAGATTCAGCAATACCCTCTGG | 1345 | RNA41 |
| 13 | 50325631 | CAAAAACCAGAAAACCCTCAGG | 1346 | RNA41 |
| 13 | 60126783 | CATATACCAAAATAACCCATGGG | 1347 | X60 |
| 13 | 61481200 | AAAATACAAATAACCCTCAGA | 1348 | RNA32 |
| 13 | 66207288 | AAAATACCTGAATAAACCTGAAG | 1349 | X40 |
| 13 | 68049114 | AAGATAACTTAATAGGCCTCCAC | 1350 | X60 |
| 13 | 68754577 | AAGATGGCTGAAAAAGCCTTTCG | 1351 | X60 |
| 13 | 74802880 | AAGCTGACTGAAGAGCCCTTGGG | 894 | X60 |
| 13 | 77274559 | AAGTTACCAGATAACCCACAGG | 1352 | RNA31 |
| 13 | 84432474 | CAGATACCTGGTTAAACATCACG | 1353 | X60 |
| 13 | 86737129 | AAGATACATGAATGGCCAACAGG | 1354 | X50 |
| 13 | 92119936 | AAGCTACCAGCATAGCCCACTAG | 1355 | X60 |
| 13 | 109759900 | AAGAAAGCTGGAAAACACTCCAG | 1356 | X60 |
| 13 | 111418659 | AAGATGCCTGAGTCTCCCCCGTG | 1357 | X60 |
| 13 | 112083112 | AAGGAAACTGAATAACCCTCAGA | 1358 | X40 |
| 13 | 113351476 | CTGAGAACTGAATAAACCTCGAG | 1359 | X60 |
| 14 | 18485266 | AAGGTTACAGAATAAAACTCTGG | 1360 | X60 |
| 14 | 20357994 | CAGGATACTGAATAACCCTCAGA | 1361 | X60 |
| 14 | 21233079 | CCATTACATGAATAACCTTCAGG | 1362 | X60 |
| 14 | 22348176 | AAGACACCTGGATAACCATCAGG | 1363 | X30 |
| 14 | 26263145 | AAATTATGAAAAACCCTCAGG | 1364 | RNA32 |
| 14 | 30878091 | AAGATACTTGACAACTCTCTGA | 1365 | RNA41 |
| 14 | 31153973 | AAGATAGATGAATGACCCACTAC | 1366 | X60 |
| 14 | 35231283 | AAGATACTTAAATGATCCTTGGC | 1367 | X60 |
| 14 | 37392538 | AATATACCTAAATAACTTACAGC | 1368 | X60 |
| 14 | 40710593 | AAGATAACTGGATAGCCATATGC | 1369 | X60 |
| 14 | 40860782 | AACAAACATGAAAAACACTCAGC | 1370 | X60 |
| 14 | 41931495 | AAGATACCTAAATATATATCTGA | 1371 | X60 |
| 14 | 42141012 | AGGATGACTGAAAAATCCCCAGG | 1372 | X60 |
| 14 | 49513652 | AAGATGACTGCTTAACCCCCAGT | 1373 | X60 |
| 14 | 51112581 | AAGATACCAAAATGTAACTCAGG | 1374 | X60 |
| 14 | 52885591 | AAGATAACTTAAAAACTCTAAGG | 1375 | X50 |
| 14 | 52900831 | ACAGAACCTGAATAGCCCTAGGG | 1376 | X60 |
| 14 | 53020328 | AAGATGCCTGAACTAGTCCTTGGG | 1377 | DNA41 |
| 14 | 56099999 | AAAATAACTGAAAACCCTCAAC | 1378 | RNA41 |
| 14 | 59879739 | AACATACATCCACAACCATCAGG | 1379 | X60 |
| 14 | 64921531 | AAGATACATGAATAAGCACCATG | 1380 | X50 |
| 14 | 66348379 | CATATACTTGAATAACCAACTGG | 1381 | X50 |
| 14 | 68160233 | AAGATCTTAATAATCATCTGG | 1382 | RNA32 |
| 14 | 72604917 | AAGAAACCCGAGTCCCTCTGG | 1383 | RNA32 |
| 14 | 74660460 | AAGATATCTCATATCACTCAGG | 1384 | RNA41 |
| 14 | 74867740 | ACAATACCTTGAATAACCCACAAG | 1385 | DNA41 |
| 14 | 77627074 | AAGATACATAAATAACCTCACAG | 1386 | X60 |
| 14 | 80214772 | AAGTAACAGAATAATCCTAAGG | 1387 | RNA41 |
| 14 | 81206628 | GAATAACCTGAATAACCCCCAGA | 1388 | X60 |
| 14 | 82199597 | AAATTACCTAAATAACCCAAGGC | 1389 | X60 |
| 14 | 82935226 | AAGGTACCTGAATATTGTTCTGT | 1390 | X60 |
| 14 | 84727246 | AAGACAGCTGGGTATCTCTCTGG | 1391 | X60 |
| 14 | 87353900 | CTGATAGTGAATAAGCCTCAGG | 1392 | RNA41 |
| 14 | 87564479 | ATGATAGTGAATAAGTCTCAGG | 1393 | RNA41 |
| 14 | 90316482 | TAGATATTTGAATAACCATTTAG | 1394 | X60 |
| 14 | 94330884 | AAGATGCCCTGAGCAACCCTCCTG | 1395 | DNA41 |
| 14 | 100626641 | ATGATCTCTGAATGGCCTTCAGG | 1396 | X60 |
| 14 | 104781000 | CGTGTACCTGAATGACCCACGGG | 1397 | X60 |
| 14 | 106194663 | TAGATACTGAGAAAGCCTCTGG | 1398 | RNA41 |
| 15 | 26338242 | AAGTTATCTAAAAACCCTCTAG | 1399 | RNA41 |
| 15 | 26400480 | AAGATATCTGAAAAATTCTCAAA | 1400 | X60 |
| 15 | 36010542 | AAGTAAACTGAAAACCTTCTGG | 1401 | RNA41 |
| 15 | 37986317 | AATATAACTGAATAAAACTCTTT | 1402 | X60 |
| 15 | 38076935 | TAGCTACATGAAAACCCTGGGG | 1403 | RNA41 |
| 15 | 40609022 | ATAATACTGAATAACCCTTTGA | 1404 | RNA41 |
| 15 | 43079813 | CTTTTACCTGAATACCCTCAGG | 1405 | RNA41 |
| 15 | 44348352 | AAGATGACTGAAGAGCCCTTGGG | 1406 | X50 |
| 15 | 49430075 | ATGAGCCCAGAAGAACCCTCTTG | 1407 | X60 |
| 15 | 57756788 | GAGATACCTGAAAAATCCTGGCT | 1408 | X60 |
| 15 | 58607272 | TGTATACCAGAATCACCCTAGGG | 1409 | X60 |
| 15 | 60876750 | CAGATACCTGGTAACTCTCAGG | 1410 | RNA31 |
| 15 | 61064287 | AAATTACCTGGACAACCTTCGCG | 1411 | X60 |
| 15 | 63004747 | AAGATACATGAATAACCTTGTCA | 1412 | X50 |
| 15 | 63156318 | AAGATACATTAGAACCCTCTGT | 1413 | RNA41 |
| 15 | 69510497 | AAGATATATGAATGGCCCTGAAG | 1414 | X60 |
| 15 | 71127689 | AAGATACACAAACAGCCCACAGG | 1415 | X60 |
| 15 | 73446678 | AACATACCTGAAAAAACCTCAGC | 1416 | X40 |
| 15 | 74253079 | AGGATTCCAGAAGAAGCCTGTGG | 1417 | X60 |
| 15 | 75470662 | AAGAAACCTGGATTTACCTCTGT | 1418 | X60 |
| 15 | 77101670 | AGAATAGCTGAAGGACCCTGGGG | 1419 | X60 |
| 15 | 84875080 | AGGATGCCAGGGTAACCCACTGG | 1420 | X60 |
| 15 | 85440610 | TAGGTACCTGAATGACCTCAGG | 1421 | RNA31 |
| 15 | 85452623 | AAGATACCTGACATACCCTCCCC | 1422 | X50 |
| 15 | 90002805 | GAGATACATGAATGACCCTTTCA | 1423 | X60 |
| 15 | 94867496 | GTGATAGTGAATAACTCTCAGG | 1424 | RNA41 |
| 15 | 96462615 | AGGAAAGCTGAATAACTCTCTTA | 1425 | X60 |
| 15 | 96700894 | AAGAAACGCTAATAAACCTCAGG | 1426 | X50 |
| 15 | 99174006 | AACATTCCACACTAACCATCAGG | 1427 | X60 |
| 16 | 2950487 | AAGATACGAGAGAAACGCCCGGG | 1428 | X60 |
| 16 | 7926633 | CAATTACCAGAATAACCCACAGA | 1429 | X60 |
| 16 | 11910562 | AAGAGATTTGATAACCTTCTGG | 1430 | RNA41 |
| 16 | 14200710 | AAGATTCCTGATTCAGCCTCTGA | 1431 | X50 |
| 16 | 15502916 | AAGAAGCCAGACTAACACTGGGG | 1432 | X60 |
| 16 | 15969961 | CAAATAAATGAATAATCATCAGG | 1433 | X60 |
| 16 | 16048075 | AAGAGGCCTGACTCTCCCTCCAG | 1434 | X60 |
| 16 | 17024068 | AAGATACTTGTATAACCTCAAGA | 1435 | X60 |
| 16 | 17094952 | AACATACCTGAACAACCCTCAGG | 1436 | X20 |
| 16 | 22614186 | AAGATATTTATATACCCCTCCAG | 1437 | X60 |
| 16 | 24555817 | TAGTTACATGAAGAAACCTCTAG | 1438 | X60 |
| 16 | 25905845 | AAGATACATGCGTGAAGCCTCTGG | 1439 | DNA41 |
| 16 | 26382131 | ATGGTACCTGTACAAACTTCAGG | 1440 | X60 |
| 16 | 27966927 | AAGGCACCTGAAAGCTCTCTGG | 1441 | RNA41 |
| 16 | 35693983 | GAGATACCTGGAAAACCCCAGGC | 1442 | X60 |
| 16 | 46657396 | ATGTTAACAGAAGACCCCTCTGG | 1443 | X60 |
| 16 | 47691992 | TAGATAACTGGATACCCCACTGC | 1444 | X60 |
| 16 | 49245974 | AAAATTCCTGTCCAGCCCTCTGG | 1445 | X60 |
| 16 | 49984669 | AGGATGCCTGAAAAAACCTCAAA | 1446 | X60 |
| 16 | 51935176 | AAGATACATGAGAACCCTTTGC | 1447 | RNA41 |
| 16 | 52525199 | AAGATACATGAATAGCCCTCCAC | 1448 | X40 |
| 17 | 5340518 | TAAATACCTGAATAACCCATAGT | 1449 | X50 |
| 17 | 5857462 | TATATACATGTATAACCCACAGG | 1450 | X50 |
| 17 | 6194882 | AAGATACATTCTTAGCCCTCAAG | 1451 | X60 |
| 17 | 7932420 | AAGAAACCTTGTGAACCCTCAGT | 1452 | X60 |
| 17 | 14407307 | AAGAAATGGATAGCCCTCTGG | 1453 | RNA32 |
| 17 | 21332996 | AAAATAGCTTAAAAAGCCTGTGG | 1454 | X60 |
| 17 | 27457685 | AGGGTGCCCCAACAACCCTCGGG | 1455 | X60 |
| 17 | 28706042 | AAGAAATGTGGGTAAGCCTCAGG | 1456 | X60 |
| 17 | 29645114 | ATCATATCTGAATAACTCTCAAC | 1457 | X60 |
| 17 | 32458400 | AACAAGCCTGTATAACCCTCATG | 1458 | X50 |
| 17 | 34969762 | GTGATACTGAATAAGTCTCAGG | 1459 | RNA41 |
| 17 | 37872545 | AACATACATGAATAATCTTCAAA | 1460 | X60 |
| 17 | 39300993 | ATTATACCTCAATATCCCTCTGG | 1461 | X40 |
| 17 | 44931191 | AAGATACATGAAAAACACTGGCT | 1462 | X60 |
| 17 | 47455028 | AACATACATGAATAATCTTCAAA | 1460 | X60 |
| 17 | 47541148 | AAGATACCTGTACAACACTATAC | 1463 | X60 |
| 17 | 54308512 | CAGATACCTCATTTACCCTGATG | 1464 | X60 |
| 17 | 65806019 | CAGATACTTATAACCCTCTGG | 1465 | RNA22 |
| 17 | 67990176 | AAAATACTTGAAAAATCCCTCAGT | 1466 | DNA41 |
| 17 | 70972434 | AAGATCAAGAATAACTGTCAGG | 1467 | RNA41 |
| 17 | 81310828 | AAGACACTTGTCTAGTCCTCTGG | 1468 | X60 |
| 18 | 8119646 | AAGAATCCGGAAAAACCCTATGC | 1469 | X60 |
| 18 | 10478571 | AAGACAGCTGGAGAACTCTCAGG | 1470 | X50 |
| 18 | 11443150 | AAGAAAAATGAACAAACCTCAGA | 1471 | X60 |
| 18 | 11651294 | AAGTTACGTGAATAGGACTCAGT | 1472 | X60 |
| 18 | 13336259 | AAGATAAAGAACAACTCTCTGG | 1473 | RNA41 |
| 18 | 21942917 | CAGATACACAGATAACCCCCAGG | 1474 | X60 |
| 18 | 24883127 | AAGAAACTTGAAAAATCCCAGG | 1475 | RNA41 |
| 18 | 35027674 | CAGATAACAGAAAAACCCTGTTG | 1476 | X60 |
| 18 | 36792668 | AAGATACCCAGATCCCCCTCCAG | 1477 | X60 |
| 18 | 36915438 | TAGATATTCTGAATATACCTCTGG | 1478 | DNA41 |
| 18 | 39891882 | CAGATACATGAAATAATCCTCCAG | 1479 | DNA41 |
| 18 | 40348238 | AGTCATCCTGAATAACCCTCATG | 1480 | X60 |
| 18 | 47612935 | GCCATACCAAATAACCCTCTGG | 1481 | RNA41 |
| 18 | 49237013 | AAGATACCTGGATAAGCAACTGC | 1482 | X50 |
| 18 | 49759577 | AAGAAACCTATAGAACCCTGAGT | 1483 | X60 |
| 18 | 52354807 | AAGAAAACAGAATAAACCTCTAA | 1484 | X60 |
| 18 | 53136651 | AAGATACCTTATCAACCCTAAAG | 1485 | X50 |
| 18 | 54113085 | CAGAAATATAAAAAACCCTCAGG | 1486 | X60 |
| 18 | 55667190 | AAGATTCAAGAAAGACCCTCTGC | 1487 | X60 |
| 18 | 56622476 | TAAATACTGAATAACCCTGTGA | 1488 | RNA41 |
| 18 | 58463120 | GAGATCTCAGCATAACTCTCTGG | 1489 | X60 |
| 18 | 66313025 | AAGATACCTTATTTACCTATGG | 1490 | RNA41 |
| 18 | 68281088 | TTCATACCTAAATAACCCTTAGA | 1491 | X60 |
| 18 | 69322487 | AAGATACCTGAATAACCTAAGAC | 1492 | X50 |
| 18 | 74469327 | AAGATACATAATAATCATCTGT | 1493 | RNA41 |
| 18 | 77464690 | AAGAGCCCTTGCTAACCATCTGG | 1494 | X60 |
| 19 | 11998269 | AAAGTATCTGAATAACACTTCTG | 1495 | X60 |
| 19 | 12455264 | AGCCTACCTAAATAGCCCTAGGG | 1496 | X60 |
| 19 | 27693648 | CAGACACCTGAATGACCCCAGGC | 1497 | X60 |
| 19 | 28546228 | CACTGACCTGAATCACCCCCAGG | 1498 | X60 |
| 19 | 37641018 | GAAATACTGAATAATCCTCAGG | 1499 | RNA31 |
| 19 | 38143521 | AAGACACAGAAAGATCCCTCTGG | 1500 | X60 |
| 19 | 42798163 | AAGGTACCAGATGAGCCCTTGGG | 1501 | X60 |
| 19 | 45644796 | AGGATACCTCCCAAATCCTCTGG | 1502 | X60 |
| 19 | 46147476 | CAAATACTTGAAAAGCCCTCGAG | 1503 | X60 |
| 19 | 52963761 | TAAATATGAATGACCCTCAGG | 1504 | RNA32 |
| 19 | 53485175 | CAGATATCTGAAGATCCCTCCAG | 1505 | X50 |
| 20 | 1471262 | ACAGAACCTGTATAACCCTCCAG | 1506 | X60 |
| 20 | 2545286 | AAGAAATCTAGAATACCCCTAGGG | 1507 | DNA41 |
| 20 | 6093655 | AAGTTAAATGAATGACCCTGACCGG | 1508 | DNA42 |
| 20 | 7232430 | AAGATATTTGATCAACCCTTGGA | 1509 | X60 |
| 20 | 10350390 | AGGTAACATCAATATCCCTCCGG | 1510 | X60 |
| 20 | 12411793 | AACGTACCTGAATAACTCATAAG | 1511 | X60 |
| 20 | 13449167 | AAGATACCAGCATAGTCCTCCTG | 1512 | X50 |
| 20 | 13559179 | AAGATATCTGAAGAGCCTTCCCA | 1513 | X60 |
| 20 | 18449496 | AAGATACCTGAATTTACCATGAG | 1514 | X60 |
| 20 | 19443923 | AAGATACTTTATTAACTCTCAAG | 1515 | X50 |
| 20 | 22704701 | TAGATATGTGAATTAACTTCTGG | 1516 | X60 |
| 20 | 23658111 | AAGATACCTGATCACACATCAGA | 1517 | X60 |
| 20 | 37569891 | CAGATACCTCAATAACCCTGATG | 1518 | X40 |
| 20 | 44858917 | AAGATACTTGGATAATGCTTGGT | 1519 | X60 |
| 20 | 45794486 | AAGGTATCTGAATTACCCTCAAG | 1520 | X40 |
| 20 | 52287275 | CTGAGACCTGAGTAACTCTCATG | 1521 | X60 |
| 20 | 56292197 | AAGAAAATGAATAACCCTACAG | 1522 | RNA41 |
| 20 | 60198378 | TAGATACATGAAAAACCCTTCAG | 1523 | X50 |
| 20 | 60509505 | TAGATGCTTAAATGACCCTCTGC | 1524 | X60 |
| 21 | 17021098 | TAGGATCCTGGATAACCCTCCAG | 1525 | X60 |
| 21 | 17566032 | TTGATACTTGAATAACCATCTGA | 1526 | X50 |
| 21 | 17907925 | AAGAAACCAATAACCCTCAGG | 1527 | RNA12 |
| 21 | 19274949 | AAGGAACCAGAATTACTCTCAGT | 1528 | X60 |
| 21 | 24464330 | CAGAAACCAGAATAACCTTCAGG | 1529 | X40 |
| 21 | 24537041 | AAAATTCCTGAATAGCTCTCTGG | 1530 | X40 |
| 21 | 26666529 | TAGAGACATGAAAAACCCTCCAA | 836 | X60 |
| 21 | 30710727 | ATGATAGTGAATAACACTCATG | 1531 | RNA41 |
| 21 | 30757521 | AGGATACAGAATATCCATCTGG | 1532 | RNA41 |
| 21 | 31767749 | AATCTACCTGAAAAGCCCTCTGG | 1533 | X40 |
| 21 | 33249604 | CTGATACCAGATAACCCTGAGG | 1534 | RNA41 |
| 21 | 45566319 | CAGATATCTGAATAACCCACCAG | 1535 | X40 |
| 21 | 46274280 | AAGATACATGGATAATGTTCAGG | 1536 | X50 |
| 21 | 46379614 | AAGAAACATGAAGAAAACTCAGC | 1537 | X60 |
| 22 | 15415612 | AAGGTTACAGAATAAAACTCTGG | 1360 | X60 |
| 22 | 16210764 | AAAATACATGGAAAATCCTCATG | 1538 | X60 |
| 22 | 18016369 | ATTATACCTGAATAAACCTGACT | 1539 | X60 |
| 22 | 22356999 | GATTTACCAGAAAAACCCTCTGG | 1540 | X50 |
| 22 | 22409053 | GATTGACCAGAATAACCCTCTGG | 1541 | X50 |
| 22 | 26261319 | AAGATACATCGAATAACCCTTCTA | 1542 | DNA41 |
| 22 | 31956781 | AAGGCAACTGAAGATCCTTCAGG | 1543 | X60 |
| 22 | 48095647 | AAGATATCTGAATTCAGCTCTTG | 1544 | X60 |
| X | 3121703 | AAGAAAACAGAATAAACCTCTCA | 1545 | X60 |
| X | 3288787 | AAGATAGCTGATGAAATATCAGG | 1546 | X60 |
| X | 6286346 | ATGATAGTGAATAAGCCTCAGG | 1547 | RNA31 |
| X | 15276107 | AAGATTCATGTACAAACCTCATG | 1548 | X60 |
| X | 18754961 | AAGACACATGAAGAAAACTGAGG | 1549 | X60 |
| X | 19389428 | AAGTTGACTGAAACCCTCTGG | 1550 | RNA32 |
| X | 25123524 | GAGATACCCTAGATAACCCTCAGA | 1551 | DNA41 |
| X | 33500389 | GTGATAACTGAATAACCCTGCTC | 1552 | X60 |
| X | 57574816 | GAGATAACTGCATAGCCCTAGGT | 1553 | X60 |
| X | 58085053 | GAGACACCTGAACGACCTCAGG | 1554 | RNA41 |
| X | 58098997 | AAGACACCTGACTAACCCCAGGC | 1555 | X50 |
| X | 58100889 | AAGACACCTGACTAACCCCAGGC | 1555 | X50 |
| X | 58123415 | TAGACACCTGAACAACCCCAGGC | 1556 | X60 |
| X | 58198267 | AAGACACCTGGCTGACCCCAGG | 1557 | RNA41 |
| X | 58199277 | AAGACACCTGAGCAACCTCAGG | 1558 | RNA31 |
| X | 58401983 | AAGATATCTGAGCAACACTCTGT | 1559 | X50 |
| X | 63325513 | GAGATATGTGAATAAAACTCTGA | 1560 | X60 |
| X | 63786600 | CAGAAGCTGAATGACCCTTTGG | 1561 | RNA41 |
| X | 63945361 | AAAATAACTGATAAATCCTCTGA | 1562 | X60 |
| X | 65679966 | AAGCTCCTGCATAGCCCACAGG | 1563 | RNA41 |
| X | 70140322 | AACATACCTAAATATACCCTGG | 1564 | RNA41 |
| X | 70754250 | AAGCTGACTGAAGAGCCCTTGGG | 894 | X60 |
| X | 72198434 | TAGATACCTGACTTTCCCACTTG | 1565 | X60 |
| X | 73418101 | AAGATTCCTGAAGCCTCCTCAGA | 1566 | X60 |
| X | 73819519 | CATATACTGAATAACCATCTGG | 1567 | RNA31 |
| X | 84823869 | AAGATATCTGAAATGCCCTAGAG | 1568 | X60 |
| X | 89194879 | AAATAGCCTGAATAACCCTAGTG | 1569 | X60 |
| X | 89316606 | AACAAACATGAATAACACTAAGC | 1570 | X60 |
| X | 91030898 | AAGAAATCTGACAAACCTTTAGG | 1571 | X60 |
| X | 91177495 | GTGATACTGAATAAGTCTCAGG | 1459 | RNA41 |
| X | 99969578 | AAGATCCAGAAGAACTCTCTGA | 1572 | RNA41 |
| X | 107292941 | TAGATACCTAAATAGCCCATGGG | 1573 | X50 |
| X | 108681302 | AAGAAACCTCTATAAGCCTCTTA | 1574 | X60 |
| X | 109943949 | AATCTACTGAATAACTCTCAGG | 1575 | RNA31 |
| X | 111810669 | ATGAATACTGAATAACATTCAGG | 1576 | X60 |
| X | 113640910 | AAGATACCAATAACCCTCAAA | 1577 | RNA22 |
| X | 117399450 | AATGTACCCGAACAACCCTCAGG | 1578 | X40 |
| X | 120228774 | CAGATAGCTGAAAGAACACTCAGG | 1579 | DNA41 |
| X | 125113165 | AACATAACTGAATAACCATAAGG | 1580 | X40 |
| X | 126715614 | AATCAACCTGAATATCCATCAGT | 1581 | X60 |
| X | 130340267 | AAGATACCCATTCACCCTCTGG | 1582 | RNA31 |
| X | 130463899 | AAAGAACCTAAAAAACCCTCTTG | 1583 | X60 |
| X | 132229997 | AAGATAGGGGAAAGCCCTCTGG | 1584 | RNA41 |
| X | 138021160 | AAGGCAAATGAATAACCCACAGC | 1585 | X60 |
| X | 139830410 | AAAATACAAATAACCCTCAGT | 1586 | RNA32 |
| X | 144953782 | AAGATCCAGAAGAATTCTCTGG | 1587 | RNA41 |
| X | 150328565 | AGAATACCTGAATACCCCCAGA | 1588 | RNA41 |
| X | 154034869 | CAAATACCTTAATCACCATGAGG | 1589 | X60 |
| Y | 4605941 | AAGAAATCTGACAAACCTTTAGG | 1571 | X60 |
| Y | 4641256 | GTGATACTGAATAAGTCTCAGG | 1459 | RNA41 |
| Y | 6194908 | AAGATGCCAACATAAAGCTCAGG | 1590 | X60 |
| Y | 13359292 | TAAATACCTATAACCCTGAGG | 1591 | RNA32 |
| Y | 16565563 | AGCACACATGAATAACCCTAAGG | 1592 | X50 |
| Y | 22230617 | AAGATCCCAGAATAACTACTGG | 1593 | RNA41 |

TABLE 14
ANGPTL3 gRNA off-target site
validation in human primary hepatocytes

| | | Editing % | | |
|---|---|---|---|---|
| Chro- | | | | Net |
| mosome | Location | treated | control | Editing % |
| 1 | 62604219 | 61.93 | 0.39 | 61.54 |
| 1 | 2.28E+08 | 0.75 | 0.81 | −0.06 |
| 1 | 2E+08 | 0.1 | 0.03 | 0.07 |
| 1 | 59422147 | 0.32 | 0.4 | −0.08 |
| 1 | 76436411 | 0.3 | 0.26 | 0.04 |
| 1 | 19936662 | 0.26 | 0.2 | 0.06 |
| 1 | 1.8E+08 | 0.47 | 0.55 | −0.08 |
| 2 | 1.7E+08 | 0.18 | 0.1 | 0.08 |
| 2 | 17555591 | 0.09 | 0.12 | −0.03 |
| 2 | 87443936 | 0.27 | 0.26 | 0.01 |
| 2 | 2.26E+08 | 0.13 | 0.19 | −0.06 |
| 2 | 1.22E+08 | 0.48 | 0.62 | −0.14 |
| 2 | 1.84E+08 | 0.26 | 0.36 | −0.1 |
| 2 | 1.88E+08 | 0.26 | 0.22 | 0.04 |
| 3 | 8738135 | 0.28 | 0.23 | 0.05 |
| 3 | 539550 | 1.24 | 0.44 | 0.8 |
| 3 | 1.21E+08 | 0.26 | 0.27 | −0.01 |
| 3 | 99319950 | 0.21 | 0.22 | −0.01 |
| 4 | 1.73E+08 | 0.22 | 0.22 | 0 |
| 4 | 1.44E+08 | 0.48 | 0.54 | −0.06 |
| 4 | 51965380 | 0.09 | 0.08 | 0.01 |
| 4 | 1.01E+08 | 0.09 | 0.08 | 0.01 |
| 4 | 26200297 | 0.14 | 0.11 | 0.03 |
| 4 | 74170265 | 0.54 | 0.3 | 0.24 |
| 5 | 1.14E+08 | 0.16 | 0.13 | 0.03 |
| 5 | 1.56E+08 | 0.47 | 0.59 | −0.12 |
| 5 | 8704833 | 0 | 0 | 0 |
| 5 | 16404802 | 0.15 | 0.19 | −0.04 |
| 6 | 1.13E+08 | 0.09 | 0.11 | −0.02 |
| 6 | 45506487 | 0.3 | 0.36 | −0.06 |
| 6 | 89636030 | 0.28 | 0.3 | −0.02 |
| 6 | 18241159 | 0.08 | 0.1 | −0.02 |
| 6 | 1.05E+08 | 0.45 | 0.39 | 0.06 |
| 6 | 84651006 | 0.15 | 0.11 | 0.04 |
| 6 | 1.26E+08 | 0.17 | 0.14 | 0.03 |
| 6 | 1.34E+08 | 0.23 | 0.29 | −0.06 |
| 6 | 22811364 | 0.3 | 0.31 | −0.01 |
| 6 | 6543792 | 0.08 | 0.15 | −0.07 |
| 6 | 3993855 | 0.39 | 0.45 | −0.06 |
| 6 | 51857715 | 0.19 | 0.29 | −0.1 |
| 6 | 90026983 | 0.28 | 0.31 | −0.03 |
| 6 | 1.48E+08 | 0.15 | 0.17 | −0.02 |
| 6 | 1.46E+08 | 0.32 | 0.35 | −0.03 |
| 7 | 1.58E+08 | 0.5 | 0.45 | 0.05 |
| 7 | 1.05E+08 | 0.4 | 0.61 | −0.21 |
| 7 | 18326887 | 0.03 | 0 | 0.03 |
| 7 | 81886792 | 0.23 | 0.47 | −0.24 |
| 7 | 1.24E+08 | 0.62 | 0.44 | 0.18 |
| 7 | 1.14E+08 | 0.41 | 0 | 0.41 |
| 8 | 66947451 | 17.71 | 0.67 | 17.04 |
| 8 | 19687879 | 0.19 | 0.26 | −0.07 |
| 8 | 76479079 | 0.44 | 0.44 | 0 |
| 8 | 1.09E+08 | 0.14 | 0.23 | −0.09 |
| 8 | 88225407 | 0.44 | 0.57 | −0.13 |
| 8 | 1.4E+08 | 0.29 | 0.34 | −0.05 |
| 8 | 1.22E+08 | 0.42 | 0.57 | −0.15 |
| 9 | 89929285 | 0.15 | 0.21 | −0.06 |
| 9 | 1.01E+08 | 0.41 | 0.49 | −0.08 |
| 10 | 32570562 | 0.17 | 0.23 | −0.06 |
| 11 | 2376222 | 0.05 | 0.11 | −0.06 |
| 11 | 58705310 | 0.36 | 0.39 | −0.03 |
| 11 | 80186841 | 0.24 | 0.24 | 0 |
| 11 | 12052022 | 0.35 | 0.32 | 0.03 |
| 12 | 26607410 | 0.41 | 0.46 | −0.05 |
| 12 | 64120945 | 0.26 | 0.27 | −0.01 |
| 12 | 98856708 | 0.34 | 0.42 | −0.08 |
| 12 | 71164415 | 0.42 | 0.37 | 0.05 |
| 13 | 60126783 | 0.23 | 0.22 | 0.01 |
| 13 | 1.12E+08 | 0.59 | 0.76 | −0.17 |
| 14 | 20357994 | 2.53 | 0.43 | 2.1 |
| 14 | 66348379 | 0.21 | 0.22 | −0.01 |
| 14 | 81206628 | 0.28 | 0.28 | 0 |
| 14 | 22348176 | 0.74 | 0.68 | 0.06 |
| 14 | 76759328 | 0.07 | 0.04 | 0.03 |
| 15 | 94867496 | 0.32 | 0.42 | −0.1 |
| 15 | 60876750 | 0.3 | 0.27 | 0.03 |
| 15 | 43079813 | 100 | 99.93 | 0.07 |
| 16 | 17094952 | 7.87 | 1.57 | 6.3 |
| 16 | 52525199 | 0.83 | 0.69 | 0.14 |
| 17 | 39300993 | 0.08 | 0.11 | −0.03 |
| 18 | 21942917 | 0.48 | 0.65 | −0.17 |
| 18 | 47612935 | 0.24 | 0.3 | −0.06 |
| 19 | 37641018 | 0.4 | 0.34 | 0.06 |
| 20 | 60198378 | 0.4 | 0.35 | 0.05 |
| 21 | 45566319 | 0.26 | 0.35 | −0.09 |
| 21 | 17566032 | 0.15 | 0.18 | −0.03 |
| 21 | 17021098 | 0.19 | 0.17 | 0.02 |
| 22 | 18016369 | 0.08 | 0.21 | −0.13 |
| X | 1.07E+08 | 0.25 | 0.29 | −0.04 |
| X | 1.17E+08 | 0.24 | 0.2 | 0.04 |
| X | 21471705 | 0.42 | 0.4 | 0.02 |
| X | 73819519 | 0.25 | 0.3 | −0.05 |
| X | 6286346 | 0.58 | 0.83 | −0.25 |
| X | 1.14E+08 | 0.38 | 0.38 | 0 |

[0708] Modifications and/or truncations to either the spacer or tracr portion of the gRNA was assessed by alteration of the gRNA GA100 spacer (5′-AAGATACCTGAATAACCCTC-3′ (SEQ ID NO: 15)) (Table 15). The modifications to the guide can serve to improve on-target editing efficiency and/or improve off-target editing efficiency. Additionally, four different ABE8.8 mRNAs were assessed (MA004, MA040, MA041, MA045; Table 23), in two different experiments (separated in the table below). Each of the gRNAs with an equivalent amount of in vitro transcribed ABE8.8 mRNA (1:1 ratio by weight) were co-transfected into primary human hepatocytes and primary cynomolgus hepatocytes at 5000, 2500, and 1250 ng/RNA/mL and processed as described.

TABLE 15
RNA and/or mRNA modifications improve gRNA specificity

| | | | | Human Primary Hepatocytes-Editing % at | | | | | |
|---|---|---|---|---|---|---|---|---|---|
| | | SEQ | | Position 6 (Dose, Replicate #) | | | | | |
| | Protospacer | ID | | 5000, | 5000, | 2500, | 2500, | 1250, | 1250, |
| gRNA | (5′-3′) | NO: | mRNA | rep 1 | rep 2 | rep 1 | rep 2 | rep 1 | rep 2 |
| GA441 | AAGATACCTG | 15 | MA004 | ND | 47.29 | 52.04 | 49.69 | 41.45 | 42.72 |
| | AATAACCCTC | | | | | | | | |
| GA442 | AAGATACCTG | 15 | MA004 | 35.34 | 32.48 | 35.2 | 35.78 | 31.54 | 27.9 |
| | AATAACCCTC | | | | | | | | |
| GA472 | AAGATACCTG | 15 | MA004 | 37.65 | 36.08 | 37.98 | 32.46 | 28.85 | 32.1 |
| | AATAACCCTC | | | | | | | | |
| GA473 | AAGATACCTG | 15 | MA004 | 37.9 | 31.23 | 37.55 | 35.45 | 28.07 | 26.92 |
| | AATAACCCTC | | | | | | | | |
| GA474 | AAGATACCTG | 15 | MA004 | 30.59 | 39.55 | 37.46 | 37.26 | 28.79 | 25.37 |
| | AATAACCCTC | | | | | | | | |
| GA475 | AGATACCTGA | 248 | MA004 | 36.82 | 37.79 | 37.96 | 40.49 | 28.11 | 28.81 |
| | ATAACCCTC | | | | | | | | |
| GA476 | GATACCTGAAT | 249 | MA004 | 37.2 | 37.7 | 42.27 | 40.86 | 31.97 | 31.48 |
| | AACCCTC | | | | | | | | |
| GA477 | ATACCTGAATA | 250 | MA004 | 25.59 | 24.9 | 27.3 | 25.25 | 19.23 | 19.19 |
| | ACCCTC | | | | | | | | |
| GA441 | AAGATACCTG | 15 | MA040 | 43.09 | 45.18 | 29.68 | 47.56 | 41.53 | 35.98 |
| | AATAACCCTC | | | | | | | | |
| GA442 | AAGATACCTG | 15 | MA040 | 41.76 | 43.74 | 41.43 | 41.19 | 31.04 | 32.85 |
| | AATAACCCTC | | | | | | | | |
| GA472 | AAGATACCTG | 15 | MA040 | 41.15 | 42.31 | 40.66 | 40.5 | 31.38 | 28.23 |
| | AATAACCCTC | | | | | | | | |
| GA473 | AAGATACCTG | 15 | MA040 | 39.8 | 39 | 40.85 | 34.58 | 29.19 | 28.19 |
| | AATAACCCTC | | | | | | | | |
| GA474 | AAGATACCTG | 15 | MA040 | 38.99 | 33.48 | 30.43 | 34.63 | 24.83 | 22.76 |
| | AATAACCCTC | | | | | | | | |
| GA475 | AGATACCTGA | 248 | MA040 | 37.64 | 39.98 | 37.03 | 39.31 | 28.67 | 26.83 |
| | ATAACCCTC | | | | | | | | |
| GA476 | GATACCTGAAT | 249 | MA040 | 41.08 | 39.14 | 37.69 | 38.01 | 28.8 | 27.26 |
| | AACCCTC | | | | | | | | |
| GA477 | ATACCTGAATA | 250 | MA040 | 20.51 | 19.43 | 22.64 | 22.01 | 15.69 | 16.61 |
| | ACCCTC | | | | | | | | |
| GA441 | AAGATACCTG | 15 | MA041 | 28.97 | 20.87 | 31.35 | 37.98 | 27.9 | 27.48 |
| | AATAACCCTC | | | | | | | | |
| GA442 | AAGATACCTG | 15 | MA041 | 26.39 | 25.73 | 29.01 | 27.38 | 20.18 | 20.53 |
| | AATAACCCTC | | | | | | | | |
| GA472 | AAGATACCTG | 15 | MA041 | 27.32 | 29.91 | 28.54 | 28.29 | 23.4 | 23.15 |
| | AATAACCCTC | | | | | | | | |
| GA473 | AAGATACCTG | 15 | MA041 | 19.75 | 19.89 | 19.6 | 17.62 | 14.97 | 14.04 |
| | AATAACCCTC | | | | | | | | |
| GA474 | AAGATACCTG | 15 | MA041 | 22.56 | 20.87 | 18.86 | 17.38 | 15.4 | 14.14 |
| | AATAACCCTC | | | | | | | | |
| GA475 | AGATACCTGA | 248 | MA041 | 31.47 | 29.18 | 27.34 | 23.98 | 17.67 | 18.89 |
| | ATAACCCTC | | | | | | | | |
| GA476 | GATACCTGAAT | 249 | MA041 | 31.01 | 33.84 | 29.37 | 28.62 | 19.77 | 21.75 |
| | AACCCTC | | | | | | | | |
| GA477 | ATACCTGAATA | 250 | MA041 | 3.7 | 2.53 | 3.92 | 3.47 | 2.96 | 3.24 |
| | ACCCTC | | | | | | | | |
| | | | | Human Primary Hepatocytes Editing % at | | | | | |
| Verve | | SEQ | Verve | Position 6 (Dose, Replicate #) | | | | | |
| gRNA | Protospacer | ID | mRNA | 5000, | 5000, | 2500, | 2500, | 1250, | 1250, |
| ID | (5′-3′) | NO: | ID | rep 1 | rep 2 | rep 1 | rep 2 | rep 1 | rep 2 |
| GA441 | AAGATACCTG | 15 | MA004 | 33.26 | 34.23 | 42 | 36.89 | 34.57 | 31.5 |
| | AATAACCCTC | | | | | | | | |
| GA442 | AAGATACCTG | 15 | MA004 | 27.1 | 35.52 | 36.03 | 32.59 | 28.21 | 32.14 |
| | AATAACCCTC | | | | | | | | |
| GA472 | AAGATACCTG | 15 | MA004 | 32.58 | 22.71 | 27.15 | 38.51 | 29.44 | 32.3 |
| | AATAACCCTC | | | | | | | | |
| GA473 | AAGATACCTG | 15 | MA004 | 28.63 | 27.84 | 18.2 | 36.76 | 31.84 | 29.58 |
| | AATAACCCTC | | | | | | | | |
| GA474 | AAGATACCTG | 15 | MA004 | 25.26 | 22.74 | 26.59 | 35.61 | 28.96 | 26.24 |
| | AATAACCCTC | | | | | | | | |
| GA475 | AGATACCTGA | 248 | MA004 | 28.61 | 34.79 | 30.52 | 35.29 | 29.14 | 30.03 |
| | ATAACCCTC | | | | | | | | |
| GA476 | GATACCTGAAT | 249 | MA004 | 31.45 | 27.75 | 31.88 | 32.11 | 26.99 | 30.15 |
| | AACCCTC | | | | | | | | |
| GA477 | ATACCTGAATA | 250 | MA004 | 15.07 | 13.4 | 15.01 | 18.73 | 16.78 | 16.96 |
| | ACCCTC | | | | | | | | |
| GA441 | AAGATACCTG | 15 | MA045 | 20.49 | 21.6 | 26.32 | 26.13 | 24.37 | 25.48 |
| | AATAACCCTC | | | | | | | | |
| GA442 | AAGATACCTG | 15 | MA045 | 25.65 | 17.51 | 25.36 | 18.73 | 18.54 | 20.34 |
| | AATAACCCTC | | | | | | | | |
| GA472 | AAGATACCTG | 15 | MA045 | 20.87 | 15.13 | 19.67 | 19.28 | 19.07 | ND |
| | AATAACCCTC | | | | | | | | |
| GA473 | AAGATACCTG | 15 | MA045 | 14.84 | 14.05 | 20.14 | 15.95 | 15.95 | 16.71 |
| | AATAACCCTC | | | | | | | | |
| GA474 | AAGATACCTG | 15 | MA045 | 15.81 | 16.04 | 17.08 | 20.15 | 15.02 | 14.33 |
| | AATAACCCTC | | | | | | | | |
| GA475 | AGATACCTGA | 248 | MA045 | 24.33 | 31.08 | 25.52 | 28.55 | 20.61 | 21.1 |
| | ATAACCCTC | | | | | | | | |
| GA476 | GATACCTGAAT | 249 | MA045 | 25.43 | 24.26 | 23.45 | 26.05 | 21.47 | 23.35 |
| | AACCCTC | | | | | | | | |
| GA477 | ATACCTGAATA | 250 | MA045 | 5.06 | 2.84 | 3.07 | 4.65 | 3.75 | 3.01 |
| | ACCCTC | | | | | | | | |

[0709] Off-target analysis for altered gRNA/mRNA combinations at the highest dose of 5,000 ng/RNA/mL was performed for two sites previously identified that showed off-target editing (Table 16). The calculated editing percentage across the protospacer was totaled, and the negative control editing % was subtracted. This data shows that modifications to the guide and/or to the ABE mRNA improve off-target editing efficiency.

TABLE 16
Modifications to the guide and/or to the ABE
mRNA improve off-target editing efficiency.

| gRNA | mRNA | OT Site A | OT Site B |
|---|---|---|---|
| | | Human Primary | |
| | | Hepatocytes—SUM | |
| | | total editing % (all | |
| | | positions) minus | |
| | | control, AVG | |
| | | of ~2 replicates | |
| GA441 | MA004 | 9.785 | 1.605 |
| | MA040 | 7.17 | 0.85 |
| | MA041 | −0.1 | −0.27 |
| GA442 | MA004 | 7.65 | 0.77 |
| | MA040 | 6.97 | 0.64 |
| | MA041 | −0.005 | −0.17 |
| GA472 | MA004 | 0.36 | −0.13 |
| | MA040 | 0.78 | −0.185 |
| | MA041 | −0.035 | −0.205 |
| GA473 | MA004 | −0.145 | −0.135 |
| | MA040 | −0.1 | −0.215 |
| | MA041 | −0.085 | −0.19 |
| GA474 | MA004 | 1.075 | 0.03 |
| | MA040 | 1.545 | 0.39 |
| | MA041 | −0.095 | −0.14 |
| GA475 | MA004 | 2.79 | 0.39 |
| | MA040 | 1.68 | ND |
| | MA041 | −0.13 | −0.205 |
| GA476 | MA004 | 0.48 | 0.385 |
| | MA040 | 0.785 | 0.295 |
| | MA041 | −0.17 | ND |
| GA477 | MA004 | −0.13 | −0.215 |
| | MA040 | −0.48 | −0.23 |
| | MA041 | −0.225 | −0.14 |
| | | Human Primary | |
| | | Hepatocytes—SUM | |
| | | total editing % (all | |
| | | positions) AVG | |
| | | of ~2 replicates | |
| GA441 | MA004 | 6.575 | 2.345 |
| | MA045 | 1.36 | 0.865 |
| GA442 | MA004 | 7.315 | 1.75 |
| | MA045 | 1.355 | 0.895 |
| GA472 | MA004 | 2.195 | 1.005 |
| | MA045 | 1.19 | 0.87 |
| GA473 | MA004 | 1.47 | 1.025 |
| | MA045 | 1.495 | 0.98 |
| GA474 | MA004 | 2.145 | 1.055 |
| | MA045 | 1.405 | 0.9 |
| GA475 | MA004 | 3.67 | 1.825 |
| | MA045 | 1.39 | 0.955 |
| GA476 | MA004 | 1.775 | 1.675 |
| | MA045 | 1.505 | 0.84 |
| GA477 | MA004 | 1.31 | 0.975 |
| | MA045 | 1.135 | 0.83 |

[0710] Lipid nanoparticles containing ABE8.8 mRNA and a gRNA matching the human/cynomolgus 5′-CCCGCACCTTGGCGCAGCGG-3′ (SEQ ID NO: 13) sequence (GA066) that targets the splice donor at the 5′ end of PCSK9 intron 1 were formulated at a 1:1 ratio by weight. The LNPs were administered to primary human hepatocytes and primary cynomolgus hepatocytes, using various dilutions to assess for editing activity at different concentrations of test article. LNP containing Cas9 mRNA and a gRNA matching a protospacer sequence in another gene, ANGPTL3, as a positive control was used for these experiments. This Cas9 mRNA/gRNA combination were chosen because it had been previously observed to produce high levels of genome-editing activity in primary human hepatocytes, primary cynomolgus hepatocytes, and cynomolgus liver in vivo. It was observed the ABE8.8/GA066 LNP substantially outperformed the control LNP with respect to editing, displaying much higher potency in both human and cynomolgus hepatocytes (FIG. 15).

### Example 5. Pcsk9 Gene Editing in Mice

[0711] LNPs containing SpCas9 mRNA and mouse Pcsk9-targeting gRNA with different tracr designs (GA052, GA053, GA054, and GA055) at a 1:1 weight ratio were formulated. Wild-type C57BL/6 mice were dosed with 2 mg/kg of the LNP test article. Seven days after dosing, the mice were euthanized and genomic DNA was harvested from mouse liver, and then assessed for editing of the target site with next-generation sequencing. GA052, GA054, and GA055 all outperformed GA053 that had a previously disclosed tracr design (FIG. 16).

### Example 6. Pcsk9 Base Editing in Mice

[0712] LNPs containing ABE8.8 mRNA and a mouse Pcsk9-targeting gRNA at a 1:1 weight ratio were formulated. This gRNA matches the 5′-CCCATACCTTGGAGCAACGG-3′ (SEQ ID NO: 69) protospacer sequence, which is the mouse ortholog of the human 5′-CCCGCACCTTGGCGCAGCGG-3′ (SEQ ID NO: 13) sequence (matched by GA066, GA095, GA096, GA097 and GA346) that targets the splice donor at the 5′ end of PCSK9 intron 1. Wild-type C57BL/6 mice were dosed with 2 mg/kg of the LNP test article via the lateral tail vein or retro-orbital in a total volume of 10 ml/kg. Seven days after dosing, the mice were euthanized and genomic DNA was harvested from mouse liver, and then assessed for base editing of the target splice site with next-generation sequencing. Approximately 60% editing of the target splice site was observed (mouse Pcsk9 intron 1 splice donor) (FIG. 17), providing a preclinical proof of concept of a base-editing therapy knocking down PCSK9 in the liver in vivo.

[0713] In a subsequent study, LNPs containing ABE8.8 mRNA and a mouse Pcsk9-targeting gRNA at a 1:1 weight ratio were formulated, and dosed in wild-type C57BL/6 mice at doses ranging from 0-2.0 mg total RNA/kg. The low dose of 0.05 mg RNA/kg showed high editing (>45%), while saturation of base editing occurred around 0.25 mg RNA/kg dose (FIG. 18).

[0714] In an additional study, LNPs containing ABE8.8 mRNA and a mouse Pcsk9-targeting gRNA were formulated at different weight ratios of mRNA and gRNA ranging from 1:1-1:6 and 2:1-6:1. This gRNA matches the 5′-CCCATACCTTGGAGCAACGG-3′ (SEQ ID NO: 69) protospacer sequence, which is the mouse ortholog of the human 5′-CCCGCACCTTGGCGCAGCGG-3′ (SEQ ID NO: 13) sequence (matched by GA066, GA095, GA096, GA097 and GA346) that targets the splice donor at the 5′ end of PCSK9 intron 1. Wild-type mice were dosed with the LNP at 0.05 mg/kg total RNA dose. Additionally, two individual LNPs constituted with the same mRNA and two guides, GA255 and GA257, which matches the 5′-CCCATACCTTGGAGCAACGG-3′ (SEQ ID NO: 69) protospacer sequence but has modifications to the tracr to improve stability, were also injected into mice. Seven days after dosing, the mice were euthanized and genomic DNA was harvested from mouse liver, and then assessed for base editing of the target splice site with next-generation sequencing (FIG. 19). Base editing was comparable between many of the ratios, with 1:6 and 6:1 (gRNA:mRNA) performing the poorest. The guides with modifications to the tracr had increased editing efficiency.

### Example 7. Angptl3 Base Editing in Mice

[0715] LNPs containing ABE8.8 mRNA and mouse Angptl3-targeting gRNAs (GA258, GA259, GA260, GA349, GA353) at a 1:1 weight ratio were formulated. Wild-type C57BL/6 mice were dosed with LNP test article at 0.05 mg/kg total RNA dose. The mice were later euthanized and genomic DNA was harvested from mouse liver, and then assessed for base editing of the target splice site with next-generation sequencing (FIG. 20).

### In Vivo Evaluation in Non-Human Primates (NHP)

### Example 8. Evaluation of PCSK9/ABE

[0716] First, a 2-week study was performed to evaluate editing of the PCSK9 gene in cynomolgus monkeys using specific gRNA and base editor nuclease ABE 8.8 through administration of LNPs (FIG. 21). The ABE8.8/GA066 LNP was administered to cynomolgus monkeys via intravenous infusion at two doses, 3 mg/kg (n=3 animals) and 1 mg/kg (n=2 animals) with the intent of producing high-level base editing of PCSK9 gene in the liver. Two weeks after administration of test article, blood samples were collected for clinical chemistry assays and PCSK9 ELISA assay, and the animals underwent necropsy for collection of liver samples, 2 samples each from each of the 4 lobes of the liver (8 in total from each animal).

[0717] Editing analysis of the liver specimens was performed by next generation sequencing. At the 3 mg/kg dose, a mean of 55% editing of the adenine base at the target splice site in the liver samples was observed; at the 1 mg/kg dose, a mean of 24% editing of the adenine base at the target splice site in the liver samples was observed (FIG. 22). For PCSK9 ELISA analysis, blood samples were collected from the animals on days D-10, D-7 and D-5 pre-dose (average shown) as well as on D8 and D15 post-dose. At 2 weeks after dosing there was a mean 76% reduction in the blood PCSK9 protein level compared to pre-dosing levels in the 3 mg/kg group (FIG. 23), and a mean 32% reduction in the blood PCSK9 protein level in the 1 mg/kg group (Table 17). Low density lipoprotein cholesterol (LDL-C) was determined in serum samples taken pre-dose and on D8 and D15 using a standard clinical analyzer (Table 18). There was a mean 57% reduction in the blood low-density lipoprotein cholesterol (LDL-C) level in the 3 mg/kg group (FIG. 24), and a mean 25% reduction in the blood LDL-C level in the 1 mg/kg group.

TABLE 17
Circulating PCSK9 protein levels decrease
after PCSK9 gRNA/ABE editing

| | Dose | | Concentration | | | Reduction from |
|---|---|---|---|---|---|---|
| PCSK9 | (total RNA, | Animal | (ng/ml) | | | basal on D15 |
| Group | mg/kg) | ID | Basal | D8 | D15 | (%) |
| 1 | 0 | 1001 | 432 | 387 | 366 | 15 |
| 2 | 1 | 2001 | 324 | 285 | 227 | 30 |
| 2 | 1 | 2002 | 144 | 116 | 95 | 34 |
| 3 | 3 | 3001 | 254 | 16 | 28 | 89 |
| 3 | 3 | 3002 | 170 | 34 | 31 | 82 |
| 3 | 3 | 3003 | 253 | 65 | 109 | 57 |

TABLE 18
LDL-C reduction after editing of the PCSK9 gene

| | Dose (total | | LDL-C concentration | | | Reduction |
|---|---|---|---|---|---|---|
| | RNA, | Animal | mg/dl) | | | from basal on |
| Group | mg/kg) | ID | Basal | D8 | D15 | D15 (%) |
| 1 | 0 | 1001 | 76.7 | 70 | 57 | 26 |
| 2 | 1 | 2001 | 72.3 | 55 | 54 | 25 |
| 2 | 1 | 2002 | 69.0 | 53 | 52 | 25 |
| 3 | 3 | 3001 | 57.0 | 23 | 17 | 70 |
| 3 | 3 | 3002 | 60.0 | 25 | 22 | 63 |
| 3 | 3 | 3003 | 107.7 | 88 | 66 | 39 |

[0718] In a subsequent experiment, LNPs were delivered in monkeys via intravenous infusion at a 1.0 mg/kg dose. For three monkeys that underwent necropsy at 2 weeks after LNP infusion, there was a mean 63% base editing frequency of the PCSK9 splice site adenine in the liver, with no bystander base editing observed elsewhere in the protospacer (FIG. 25); there was a mean indel frequency of 0.5%. The editing was accompanied by a mean 81% reduction in blood PCSK9 levels and a mean 65% reduction in blood LDL-C levels. For two monkeys that underwent necropsy at 24 hours after LNP infusion, there was a mean 48% editing frequency.

[0719] In a subsequent short-term dose-response study (0.5, 1.0, and 1.5 mg/kg doses, three monkeys each, with necropsy at 2 weeks), all doses achieved >50% mean base editing rates; PCSK9 editing and reductions in PCSK9 protein and LDL-C appeared to saturate at doses ≥1.0 mg/kg (FIG. 26).

[0720] In these studies we assessed liver function tests and in some groups noted moderate rises in AST and ALT that largely resolved by the end of the first week and entirely resolved by 2 weeks after LNP infusion, with no adverse health events observed in any of the animals. In assaying base editing in a wide variety of tissues, we found that the liver was the predominant site of editing, with much lower editing observed in the spleen and adrenal glands and minimal editing observed elsewhere (FIG. 27).

TABLE 25
Numeric formats of tissue distribution of editing
of the PCSK9 exon 1 splice donor adenine
base in three animals, as shown in FIG. 27.

| | control | NHP | NHP | NHP |
|---|---|---|---|---|
| Tissue | NHP | #1 | #2 | #3 |
| Liver | 0.12 | 59.49 | 73.83 | 55.10 |
| Spleen | 0.02 | 5.25 | 7.99 | 5.67 |
| Adrenal gland (left) | 0.02 | 1.81 | 7.49 | 1.79 |
| Adrenal gland (right) | 0.10 | 1.54 | 0.22 | 2.18 |
| Kidney (left) | 0.10 | 0.63 | 0.89 | 0.24 |
| Kidney (right) | 0.06 | 0.64 | 0.27 | 0.32 |
| Skin (injection site) | 0.13 | 0.08 | 1.47 | 1.56 |
| Mandibular lymph nodes (left) | 0.06 | 0.15 | 0.48 | 0.43 |
| Mandibular lymph nodes (right) | 0.06 | 0.18 | 0.17 | 0.96 |
| Mesenteric lymph nodes | 0.04 | 0.12 | 0.15 | 0.12 |
| Testis (left) | 0.13 | 0.11 | 0.06 | 0.38 |
| Testis (right) | 0.07 | 0.16 | 0.09 | 0.38 |
| Epididymis (left) | 0.09 | 0.12 | 0.58 | 0.83 |
| Epididymis (right) | 0.80 | 0.25 | 0.79 | 0.52 |
| Skeletal muscle | 0.16 | 0.40 | 0.33 | 0.07 |
| Duodenum | 0.07 | 0.30 | 0.83 | 0.26 |
| Jejunum | 0.06 | 0.19 | 0.28 | 0.58 |
| Colon | 0.08 | 0.07 | 0.08 | 0.13 |
| Lung (left) | 0.01 | 0.16 | 0.22 | 0.18 |
| Lung (right) | 0.10 | 0.54 | 0.24 | 0.16 |
| Brain | 0.12 | 0.17 | 0.05 | 0.15 |

[0721] In an additional study, different tracr designs were assessed. LNPs were delivered in NHPs via intravenous infusion at a 1.0 mg/kg total RNA dose, unless otherwise specified. Base editing of the liver was assessed, and several guides outperformed GA066 with the literature tracr (FIG. 28).

[0722] In the same NHP study, LNPs containing either: 1) Cas9 mRNA and a gRNA matching 5′-CCCGCACCTTGGCGCAGCGG-3′ (SEQ ID NO: 13) (GA097) protospacer sequence; or 2) ABE8.8 mRNA and gRNA matching 5′-CCCGCACCTTGGCGCAGCGG-3′ (SEQ ID NO: 13) (GA097) protospacer sequence, were delivered intravenously into NHPs. Importantly, the method by which classical CRISPR/Cas9 disrupts a gene by ultimately introducing an indel, is different than base editing where a base mutation has occurred. Further, a target region that is highly amenable to CRISPR/Cas9 editing does not necessarily mean base editing at that location will occur, and vice versa. This is highlighted in the NHP study, where the LNP containing SpCas9/gRNA resulted in low liver editing in the NHPs (<5%), while the LNP containing ABE8.8/gRNA had significantly higher editing close to 40% (FIG. 29) with a dose (1 mg/kg) lower than the SpCas9/gRNA dose (1.5 mg/kg).

[0723] In another study, two LNPs were compared for base editing activity after delivery in NHPs via intravenous infusion at doses ranging from 0.5 mg/kg-3.0 mg/kg. Both LNPs showed high efficacy, with the first LNP (LNP #1) outperforming the second LNP (LNP #2), at doses as low as 0.5 mg/kg having greater than 50% average editing (FIG. 30). Similar to past experiments, the PCSK9 protein levels decreased significantly upon high level of base editing at the splice site, decreasing circulating PCSK9 protein by 80-90% (FIG. 31).

[0724] In a long-term study (four animals, with liver biopsy at 2 weeks) LNPs were introduced via intravenous infusion at a higher dose of 3.0 mg/kg to assess drug tolerability and the durability of PCSK9 protein and LDL-C reductions resulting from PCSK9 editing. The liver biopsy samples showed a mean 66% base editing frequency (FIG. 32). Blood PCSK9 protein levels reached a trough by 1 week and have remained stable thereafter out to at least 6 months, settling at approximately 90% reductions (FIG. 33). Blood LDL-C and lipoprotein(a) [Lp(a)] levels have similarly achieved stable troughs persisting to 8 months, settling at ≈60% and ≈35% reductions, respectively (FIG. 34, FIG. 35).

[0725] There were transient, moderate rises in AST and ALT that entirely resolved by 2 weeks following LNP infusion (FIG. 36), with no changes in any other liver function tests and no adverse health events observed to date (FIG. 37). Importantly, the persistence of PCSK9 and LDL-C reductions for 8 months with no late AST and ALT elevations demonstrates that such a response, whatever its scale, does not adversely impact the treatment's efficacy.

[0726] To evaluate ABE8.8/gRNA (protospacer matching GA346) LNP-mediated off-target editing in primary cyno hepatocytes and monkey liver samples, ONE-seq was performed with a synthetic cynomolgus genomic library selected by homology to the gRNA spacer sequence. This library was treated with ABE8.8 protein and PCSK9 gRNA, and the top 48 ONE-seq-nominated sites (FIG. 38)—of which the PCSK9 target site was the very top site—was assessed with next-generation sequencing of targeted PCR amplicons from LNP-treated versus untreated NHP samples (FIG. 39).

[0727] In LNP-treated primary cynomolgus hepatocytes, besides editing at the PCSK9 target site, there was off-target editing (mean <1%) evident at only one site, designated C5, which has poor homology to the human genome (FIG. 39). Assessing the same 48 sites in liver samples from monkeys that were treated with a 1.0 mg/kg LNP dose (from the aforementioned dose-response study), low-level off-target editing (mean <1%) only at the C5 site (FIG. 40) was observed. No off-target editing with a 0.5 mg/kg LNP dose and only low-level off-target editing with a 1.5 mg/kg LNP dose (mean <1%) were detected.

### Example 9. Evaluation of ANGPTL3/ABE

[0728] Similar to the NHP studies performed with the ABE/PCSK9 guide(s), LNPs formulated with ABE8.8 mRNA and a gRNA with the 5′-AAGATACCTGAATAACTCTC-3′ (SEQ ID NO: 14) (GA067) cynomolgus spacer was administered to cynomolgus monkeys via intravenous infusion at two doses, 3 mg/kg (n=3 animals) and 1 mg/kg (n=2 animals) with the intent of producing high-level base editing of ANGPTL3 in the liver. Two weeks after administration of test article, blood samples were collected for clinical chemistry assays and ANGPTL3 ELISA assay, and the animals underwent necropsy for collection of liver samples. Small segments from the center and periphery of each lobe of the liver were excised and flash frozen in liquid nitrogen and stored at −86 to −60° C. Splice-site editing was analyzed by next generation sequencing, confirming that base change occurred. At the highest dose (3 mg/kg), a mean of 61% editing of the adenine base was observed at the target splice site in the liver; at the lowest dose (1 mg/kg), the editing observed was 28% at the target splice site in the liver (Table 19).

[0729] In addition, blood samples were collected pre-dose, on D7 and D15 post-dose to determine serum ANGPTL3, and triglycerides. At two weeks after dosing there was a mean 90% and 31% reduction in the blood ANGPTL3 protein level compared to pre-dosing levels in the higher (3 mg/kg) and lower (1 mg/kg) dosing groups (Table 20).

TABLE 19
Liver Editing in cynomolgus monkeys

| | Dose (total | Animal | Mean ± standard |
|---|---|---|---|
| Group | RNA, mg/kg) | ID | deviation |
| 1 | 0 | 1001 | 0.25 ± 0.06 |
| 4 | 1 | 4001 | 39.6 ± 2.7 |
| 4 | 1 | 4002 | 15.1 ± 3.9 |
| 5 | 3 | 5001 | 61.2 ± 3.2 |
| 5 | 3 | 5002 | 56.4 ± 5.2 |
| 5 | 3 | 5003 | 64.3 ± 2.6 |

TABLE 20
Knockdown of circulating cynomolgus monkey
ANGPTL3 following gene editing using ABE

| | Dose | | Concentration | | | Reduction |
|---|---|---|---|---|---|---|
| | (total RNA, | Animal | (ng/ml) | | | from basal |
| Group | mg/kg) | ID | Basal | D8 | D15 | on D15 (%) |
| 1 | 0 | 1001 | 39 | 47 | 41 | −7 |
| 4 | 1 | 4001 | 56 | 15 | 31 | 45 |
| 4 | 1 | 4002 | 38 | 22 | 31 | 17 |
| 5 | 3 | 5001 | 31 | 1 | 1 | 98 |
| 5 | 3 | 5002 | 33 | 11 | 9 | 72 |
| 5 | 3 | 5003 | 70 | 1 | 1 | 99 |

[0730] Triglycerides were determined in serum samples taken pre-dose and on D8 and D15 using a standard clinical analyzer. Serum triglyceride reduction in response to LNP-mediated ANGPTL3 base editing with ABE8.8 and GA067 are summarized in Table 21. The levels of triglycerides were reduced by 24% and 59% in response to doses of 1 mg/kg and 3 mg/kg base editor ABE8.8 and GA067 targeting ANGPTL3.

TABLE 21
Triglyceride reduction in response to ANGPTL3 gene in liver

| | | | Triglyceride | | | Reduction |
|---|---|---|---|---|---|---|
| | Dose (total | | concentration (mg/dl) | | | from basal |
| Group | RNA, mg/kg) | Animal ID | Basal | D8 | D15 | on D15 (%) |
| 1 | 0 | 1001 | 31.3 | 43 | 41 | −31 |
| 4 | 1 | 4001 | 71.0 | 46 | 49 | 31 |
| 4 | 1 | 4002 | 67.7 | 52 | 56 | 17 |
| 5 | 3 | 5001 | 59.3 | 23 | 21 | 65 |
| 5 | 3 | 5002 | 41.3 | 33 | 25 | 40 |
| 5 | 3 | 5003 | 55.0 | 27 | 15 | 73 |

[0731] In another independent study, the same ABE8.8/GA067 LNP was administered to cynomolgus monkeys via intravenous infusion at a dose of 3 mg/kg (n=3 animals) with the intent of producing high-level base editing of ANGPTL3 in the liver. Two weeks after administration of test article, blood samples were collected for clinical chemistry assays, and the animals underwent a liver biopsy for collection of liver samples. At the 3 mg/kg dose, a mean of 60% editing of the adenine base at the target splice site was achieved in the liver biopsy samples. Concordantly, at 2 weeks after dosing there was a mean 95% reduction in the blood ANGPTL3 protein level compared to pre-dosing levels and there was a mean 64% reduction in the blood triglyceride level (FIG. 41). These results provide an additional preclinical proof of concept of a base-editing therapy knocking down ANGPTL3 in the liver in vivo and effecting reductions in blood ANGPTL3 protein and triglyceride levels.

### Example 10. Evaluation of Dual PCSK9 and ANGPTL3 Base Editing

[0732] To assess whether it was possible to affect simultaneous base editing of PCSK9 and ANGPTL3 with a single test article, LNPs were formulated containing a mix of three components: ABE8.8 mRNA, PCSK9-targeting gRNA (GA095), and ANGPTL3-targeting gRNA (GA098) at a 2:1:1 weight ratio. Primary human hepatocytes were incubated with various dilutions of the LNPs. Three days after incubation, genomic DNA was harvested from the hepatocytes, and then assessed for base editing of the target splice site with next-generation sequencing. At the highest LNP concentrations, ≈40% editing of the PCSK9 splice site (intron 1 splice donor) and ≈40% editing of the ANGPTL3 splice site (intron 6 splice donor) was observed (FIG. 42), demonstrating the feasibility of dual gene disruption in human hepatocytes with a single test article and providing a preclinical proof of concept of a single base-editing therapy simultaneously knocking down PCSK9 and ANGPTL3, which would be predicted to substantially reduce both blood LDL cholesterol levels and blood triglyceride levels in human recipients. An advantage of this approach is that because the base editors do not require double strand breaks (DSBs) for editing, in contrast to standard CRISPR-Cas9, there is substantially lower risk of chromosomal rearrangements or other structural changes inherent in the simultaneous targeting of two different sites in the genome.

[0733] A follow-up NHP study was performed to address: 1) if a second dose of administered LNPs administered can cause editing of the target gene; 2) if a different target can be base edited. LNPs formulated with ABE8.8 mRNA and either a gRNA targeting PCSK9 (GA346) or a gRNA targeting ANGPTL3 (GA347) was administered to cynomolgus monkeys via intravenous infusion at doses ranging from 0.5-2 mg/kg. Two weeks after administration of test article, biopsies were performed to assess for base editing. After 30 days from the initiation of the study, the opposite LNP was administered. Following a second biopsy after an additional 2 weeks, the gDNA was extracted, and base editing was assessed using next generation sequencing. The findings from this study show that high level editing of both the PCSK9 and ANGPTL3 targets are achieved after the first and second doses of LNPs (FIG. 43). Blood samples were collected on both biopsy timepoints and show significant decrease of around 90% in circulating PCSK9 and ANGPTL3 after subsequent dosing with 1 mg/kg LNPs (FIG. 44). In the same study an LNP encapsulating ABE8.8 mRNA, PCSK9 gRNA GA346 and ANGPTL3 gRNA GA347 at 1:0.5:0.5 weight ratio was adminstered at 2 mg/kg total RNA dose, which resulted in robust synchronized PCSK9 and ANGPTL3 gene editing (FIG. 44, top and bottom data labelled GA346+GA347 (D1)—top and bottom panels show PSCK9 and ANGPTL3 editing). The data demonstrate that robust multi-gene editing is possible with single 1-dose administration of ABE base editor mRNA and two or more gRNAs targeting two or more genes of interest in mammals (and/or mammalian cell). FIG. 44 mirrors corresponding knockdown of ANGPTL3 (bottom) and PCSK9 (top) proteins.

[0734] In another study, NHPs were repeat dosed with LNPs (FIG. 45). NHPs were dosed with LNP #1 and LNP #2 formulated with ABE8.8 mRNA MA004 and a gRNA targeting PCSK9 (GA097) via intravenous infusion at a total RNA doses of 0.5 mg/kg. NHPs received an additional LNP dose on day 30 and on day 60. Liver biopsies from Day 14, Day 46, and Day 75 were extracted for adenosine base editing analysis. All gDNA was extracted, and base editing was assessed using next generation sequencing. These results demonstrate that repeat dosing of LNP containing ABE8.8 mRNA and PCSK9 gRNA causes additive base editing in the liver, as editing efficiency was near 30% after the first dose of LNP, while over 50% after the third dose LNP. It was also observed that the magnitude of additive editing was LNP-dependent.

[0735] Further, repeat dosing of LNPs reduced PCSK9 protein levels in NHPs (FIG. 46). The PCSK9 protein levels were monitored over 90 days in NHPs that were repeat dosed with LNPs formulated with ABE8.8 mRNA MA004 and a gRNA targeting PCSK9 (GA097). NHPs were dosed via intravenous infusion at a total RNA dose of 0.5 mg/kg at days 0, 30, and 60 (arrow is illustrated on graph to depict dosing). For description of analysis of PCSK9 protein levels, see detailed methods section. Compared to basal levels, PCSK9 protein dropped by nearly 40% after the initial dose of LNP, but upon additional doses, decreased even further.

[0736] Liver markers were assessed following repeat dosing of LNPs (FIG. 47). ALT, AST, total bilirubin, and creatine kinase levels were assessed up to 71 days in NHPs that were repeat dosed with LNPs formulated with ABE8.8 mRNA MA004 and a gRNA targeting PCSK9 (GA097). NHPs were dosed via intravenous infusion at a total RNA dose of 0.5 mg/kg at days 0, 30, and 60, which is shown as D1, D2 and D3 on graph, respectively. Liver biopsy was performed at days 14 and 46 which is shown as B1 and B2 on graph, respectively. Blood was collected at multiple timepoints, as described on the graph. Although ALT and AST minimally rose upon dosing, this was a transient response that returned to normal after a period of several days. Similarly, Creatine Kinase levels increased upon dosing, with the largest effect seen after the first dose, and returned to basal levels after a period of several days.

[0737] The liver enzymes, LDH, GLDH, GGT, and ALP, were assessed in NHPs that were repeat dosed with LNPs formulated with ABE8.8 mRNA MA004 and a gRNA targeting PCSK9 (GA097) (FIG. 48). NHPs were dosed via intravenous infusion at a total RNA doses of 0.5 mg/kg at days 0, 30, and 60. Blood was collected at multiple timepoints, as described on the graph. Although LDH and GLDH rose upon dosing, this was a transient response that returned to normal after a period of several days.

[0738] Further, long-term adenine base editing of ANGPTL3 was assessed in non-human primates (FIG. 49). Cynomolgus monkeys received an intravenous infusion of a 3 mg/kg dose of an LNP formulation with ABE8.8 mRNA MA004 and ANGPTL3 gRNA GA067. Blood was collected at timepoints specified and the graph, and ANGPTL3 protein levels (FIG. 49A) and triglyceride levels (FIG. 49B) were analyzed. As compared to controls, both ANGPTL3 protein levels (96% reduction) and triglyceride levels substantially decreased upon base editing of the gene, and remain stably reduced for more than 170 days.

[0739] Cytokine activation and immune response were assessed in NHPs receiving LNPs. In one set of studies, cynomolgus monkeys received intravenous infusions of 0.5 mg/kg doses at three specified time points (FIG. 50A and FIG. 50B) of an LNP formulation with ABE8.8 mRNA MA004 and PCSK9 gRNA GA346. Blood was collected at timepoints specified and the graph, and IP-10 and MCP-1 were analyzed. These results demonstrated: 1) that NHPs receiving LNPs had no evidence of cytokine activation nor immune response, as compared to control; and 2) that repeat dosing of the same LNP does not elicit cytokine activation nor an immune response.

[0740] In additional studies, IL-6, MCP-1, and SC5b-9 (FIG. 50C, FIG. 50D, and FIG. 50E, respectively) were analyzed at different time points from blood collected from NHPs that received an intravenous infusion of 1.0 mg/kg total RNA dose of LNP formulated with MA004 and PCSK9 gRNA GA346. This caused minimal cytokine/complement activation that returned to baseline by/before 336 hours, as compared to control.

### Example 11. Evaluation of SpCa9-Mediated On-Target Editing Efficiency

[0741] Gene editing of ANGPTL3 or PCSK9 in non-human primates was assessed. Cynomolgus monkeys received an intravenous infusion of a 1.5 mg/kg dose of an LNP formulation with SpCas9 mRNA MS004 and one gRNA targeting either ANGPTL3 (GA261-GA263) or PCSK9 (GA266-GA271). Upon necropsy after 2 weeks, two pieces from each liver lobe (8 pieces total) were isolated and gDNA was extracted. Samples were processed as described in the detailed methods section. Indel % was analyzed for each separate piece and are graphed as individual points (FIG. 51). High editing efficiency was observed in most NHP livers. LDL-C levels were measured (FIG. 52). All NHPs that received LNPs with SpCas9 mRNA/PCSK9 gRNA had at least 35% reduction in circulating LDL-C levels. Although more modest, LNPs with SpCas9 mRNA/ANGPTL3 gRNA had 10-25% reduction in circulating LDL-C levels. Additionally, NHPs that received LNPs with SpCas9 mRNA/ANGPTL3 gRNA had around 10-50% reduction in triglyceride levels (FIG. 53). NHPs that received LNPs with SpCas9 mRNA/PCSK9 gRNA did not show a significant reduction in triglyceride levels.

[0742] Cynomolgus primary hepatocytes were transfected at 2500, 1250, and 625 ng/test article/mL with SpCas9 mRNA MS002 and a gRNA targeting PCSK9 with modifications to the tracr. Genomic DNA was processed, sequenced, and analyzed as described in the detailed methods section. GA266 was transfected independently twice to serve as two positive controls. Almost all transfections resulted in high editing efficiency compared to positive control, while GA405 had slightly lower editing efficiency.

TABLE 22
Modifications to guides retain on-target editing
efficiency in cynomolgus primary hepatocytes.

| | Cynomolgus Primary Hepatocytes-% Editing | | | | | |
|---|---|---|---|---|---|---|
| | (dose, replicate #) | | | | | |
| | 2500, | 2500, | 1250, | 1250, | 625, | 625, |
| gRNA | rep1 | rep2 | rep1 | rep2 | rep1 | rep2 |
| GA266, #1 | 56.51 | 49.95 | 51.81 | 55.2 | 44.53 | 42.53 |
| GA266, #2 | 50.34 | 48.3 | 43.56 | 46.2 | 39.75 | 36.59 |
| GA395 | 43.91 | 49.53 | 41.48 | 44.35 | 33.87 | 34.57 |
| GA396 | 53.98 | 56.84 | 56.02 | 52.02 | 44.44 | 41.53 |
| GA397 | 56.65 | 58.59 | 56.47 | 58.68 | 40.72 | 46.28 |
| GA398 | 59.85 | 63.97 | 56.45 | 55.21 | 39.09 | 44 |
| GA399 | 58.97 | 62.75 | 55.55 | 53.02 | 37.75 | 41.8 |
| GA401 | 53.74 | 52.79 | 49.12 | 48.83 | 38.33 | 38.77 |
| GA402 | 45.58 | 55.34 | 44.46 | 47.93 | 35.05 | 40.31 |
| GA403 | 52.62 | 55.84 | 50.5 | 47.13 | 38.28 | 35.58 |
| GA404 | 48.3 | 50.59 | 41.68 | 35.04 | 31.63 | 30.16 |
| GA405 | 41.85 | 47.33 | 35.84 | 35.88 | 26.2 | 26.36 |
| GA406 | 57.17 | 51.45 | 45.11 | 43.68 | 37.58 | 40.31 |
| GA408 | 50.4 | 46.92 | 47.21 | 49.8 | 36.7 | 37.14 |

[0743] PACE-modifications to the gRNA have been previously demonstrated to reduce off-target editing efficiency. Human primary hepatocytes were transfected at 2500, 1250, 500, and 250 ng/test article/mL with SpCas9 mRNA MS002 and a gRNA targeting PCSK9 with modifications to the tracr. Genomic DNA was processed, sequenced, and analyzed as described in the detailed methods section. GA156 was transfected to serve as a positive control. GA248 and GA249 contain PACE-modifications to the gRNA that have previously been demonstrated to decrease off-target editing efficiency. Indeed, although GA248 and GA249 had lower on-target editing compared to the unmodified gRNA, GA156 (FIG. 54A), GA248 and GA249 showed decreased off-target editing at an identified off-target site (FIG. 54B).

[0744] ABE mRNA sequences—MA004, MA019, MA020, and MA021—were evaluated for their GC content (FIG. 55A). In general, MA004 sequence has a higher GC content than MA019, MA020, MA021, and ABE8.8m sequences. GC levels in sequence MA004 are also elevated (above 60%) in certain regions throughout the ABE sequence such as the TadA domain, N-terminal linker, and C-terminal linker, as well as various sub-regions. For all sequences, GC levels below 60% are shaded in gray to provide contrast to the elevated GC regions. GC content is calculated by determining the relative amount of G and C within a given 25 nucleotide stretch across the entire mRNA sequence, i.e. for every 25 nucleotides, the sum of G's and C's is divided by the total number of nucleotides. This comparison shows that mRNA MA004 sequence has a distinct distribution and enrichment of G and C nucleotides relative to other mRNA sequences.

[0745] The region-specific GC characterization of sequence MA004 is further illustrated (FIG. 55). The graph in each row shows the GC content in every 1,000-nucleotide stretch comprising the full ABE coding sequence (4,767 nt). The GC content is particularly high in the 5′ end of the sequence, which includes the TadA region and the N-terminal linker. The GC content is also high various parts of the Cas9 nickase and in the 3′ end of the ABE sequence; there the high GC % is centered around the linker region instead of the NLS. Sub-regions with high GC content are delineated by where GC reaches a threshold level of 60%. GC content in each sub-region is calculated by determining the number of G and C nucleotides divided by the total number of nucleotides for each sub-region.

TABLE 26
GC comparison of ABE-encoding nucleotides, MA004,
MA019, MA020, MA021, and ABE8.8m

| | | | | | | |
|---|---|---|---|---|---|---|
| ABE sequence | MA004 | MA019 | MA020 | MA021 | ABE8.8m | ΔGC* |

Region-specific GC %

| | | | | | | |
|---|---|---|---|---|---|---|
| Total sequence | 63 | 54 | 47 | 54 | 55 | 11 |
| TadA (nt: 1-501) | 70 | 58 | 54 | 60 | 54 | 14 |
| N-terminal linker | 79 | 64 | 65 | 54 | 59 | 19 |
| (nt: 502-597) | | | | | | |
| Cas9 nickase | 62 | 54 | 45 | 53 | 56 | 10 |
| (nt: 598-4698) | | | | | | |
| C-terminal linker | 83 | 58 | 67 | 58 | 60 | 22 |
| (nt: 4699-4710) | | | | | | |
| NLS | 63 | 53 | 49 | 60 | 48 | 11 |
| (nt: 4711-4767) | | | | | | |

Sub-region GC %

| | | | | | | |
|---|---|---|---|---|---|---|
| nt: 27-109 | 75 | 59 | 55 | 63 | 59 | 16 |
| nt: 111-213 | 73 | 56 | 55 | 66 | 57 | 15 |
| nt: 250-385 | 71 | 60 | 57 | 62 | 57 | 12 |
| nt: 389-475 | 70 | 59 | 56 | 54 | 53 | 15 |
| nt: 479-601 | 76 | 62 | 61 | 65 | 55 | 15 |
| nt: 615-661 | 72 | 64 | 51 | 66 | 68 | 10 |
| nt: 699-714 | 75 | 63 | 63 | 56 | 69 | 12 |
| nt: 735-829 | 74 | 62 | 54 | 61 | 61 | 15 |
| nt: 1192-1345 | 67 | 58 | 51 | 55 | 61 | 11 |
| nt: 1363-1627 | 66 | 58 | 52 | 55 | 61 | 10 |
| nt: 1661-1706 | 70 | 57 | 57 | 65 | 63 | 10 |
| nt: 1735-1880 | 66 | 54 | 52 | 57 | 60 | 10 |
| nt: 1938-1999 | 71 | 60 | 55 | 63 | 60 | 12 |
| nt: 2023-2073 | 63 | 55 | 45 | 53 | 63 | 9 |
| nt: 2184-2231 | 67 | 60 | 54 | 63 | 60 | 8 |
| nt: 2542-2600 | 71 | 63 | 51 | 53 | 64 | 13 |
| nt: 2719-2798 | 69 | 56 | 54 | 65 | 64 | 9 |
| nt: 3294-3334 | 73 | 61 | 54 | 61 | 66 | 13 |
| nt: 3542-3584 | 72 | 67 | 58 | 72 | 67 | 6 |
| nt: 3745-3864 | 67 | 54 | 53 | 57 | 62 | 11 |
| nt: 3977-4045 | 65 | 57 | 48 | 59 | 59 | 9 |
| nt: 4207-4286 | 70 | 56 | 54 | 66 | 59 | 11 |
| nt: 4427-4517 | 65 | 60 | 51 | 53 | 55 | 10 |
| nt: 4537-4569 | 73 | 58 | 48 | 64 | 61 | 15 |
| nt: 4583-4741 | 67 | 58 | 49 | 57 | 61 | 11 |

*ΔGC is the difference between the GC content of sequence MA004 CDS (cDNA sequence) and the average of sequences MA019 CDS, MA020 CDS, MA021 CDS, and ABE8.8m.

[0746] The editing efficiency of these mRNA constructs were assessed in mice (FIG. 55B). These mRNAs, MA004, MA019, MA020, and MA021 code for the same ABE protein sequence but have different nucleotide sequence optimizations. The only difference between these groups is the mRNA sequence; the mRNAs have the same base modifications, and each group used the same LNP formulation and gRNA. Each group was administered intravenously to mouse, and a low dose of 0.05 mg/kg was used in this study to achieve sub-saturating levels of liver editing to resolve efficacy differences. At day 5 post-dose, gDNA was isolated and base editing was assessed by next generation sequencing. These results demonstrate that mRNA sequence changes can affect adenosine base editing performance in vivo.

### Additional Details of Methods Described

[0747] Plating, culturing, and transfection of primary hepatocytes. Primary human liver hepatocytes (PHH) and primary cynomolgus liver hepatocytes (PCH) from BioIVT were cultured per the manufacturer's protocol. Briefly, primary human hepatocytes and primary cyno hepatocytes were obtained as frozen aliquots from BioIVT. Four lots of primary human hepatocytes, each derived from a de-identified individual donor, were used for the experiments: STL (main donor) was used for all experiments, including screening experiments and off-target experiments; HLY, JLP, and TLY were used for off-target experiments. The HFG lot of primary cyno hepatocytes were used for experiments. Following the manufacturer's instructions, cells were thawed and rinsed prior to plating in 24-well plates that had been coated with bovine collagen overnight, with a density of approximate 350,000 cells/well in INVITROGRO hepatocyte medium supplemented with TORPEDO antibiotic mix (BioIVT). The cells were thawed and resuspended in hepatocyte thawing medium followed by centrifugation at 100 g for 10 min at 4° C. The supernatant was discarded, and the pelleted cells resuspended in hepatocyte plating medium. Each vial contains approximately 5 million cells that were used for plating one 24-well plate. Plated cells were allowed to settle and adhere for 4-6 h in a tissue culture incubator at 37° C. under 5% CO₂ atmosphere. After incubation, cells were checked for monolayer formation. The incubating media were then replaced with fresh hepatocyte maintenance media (complete INVITROGRO medium obtained from BioIVT, the cell line provider). The cells thus became ready for transfection. Each of the gRNAs were co-transfected with an equivalent amount of in vitro transcribed ABE8.8 mRNA (1:1 ratio by molecular weight) into primary human hepatocytes via MessengerMax reagent (Lipofectamine), using various dilutions to assess for editing activity at different concentrations of test article. MessengerMAX from Thermo Fisher is used for transfection. Solution A: desired amount of guide RNA is mixed with 1:1 wt ratio of mRNA in OptiMEM. Solution B: MessengerMAX in OptiMEM. After mixing solutions A and B, the mixture was incubated at room temperature for 20 min. 60 μL of the incubated solution was added dropwise to each cell wells. For protospacer sequences that were a perfect match to the corresponding cynomolgous monkey PCSK9 or ANGPTL3 gene sequence, each gRNA was also co-transfected with an equivalent amount of ABE8.8 mRNA (1:1 ratio by molecular weight) into primary cynomolgous hepatocytes, and followed the same transfection protocol. The cells were then allowed to remain at 37° C. for 3 days. Cells were harvested and prepared for genomic DNA extraction using either a Thermo Kingfisher, or Qiagen DNEasy blood and Tissue Kit, per manufacturer's instructions.

[0748] Bioinformatic analysis. Targeted amplicon sequencing data were analyzed with CRISPResso2 v2.0.31 in batch mode (CRISPRessoBatch). For Cas9 experiments, the following parameters were set: “-quantification_window_center-3-quantification_window_size 5-min_frequency_alleles_around_cut_to_plot 0.1-max_rows_alleles_around_cut_to_plot 100”. For ABE experiments, the following parameters were set: “-default_min_aln_score 95-quantification_window_center-10-quantification_window_size_10-base_editor_output-conversion_nuc_from A-conversion_nuc_to G-min_frequency_alleles_around_cut_to_plot 0.1-max_rows_alleles_around_cut_to_plot 100”. For NHP experiments, an additional parameter was set to exclude low quality reads: “-min_single_bp_quality 30”, Moreover, in all cases, the parameter “-max_paired_end_reads_overlap” was set to 2R-F+0.25*F, following FLASH recommendations (http://ccb.jhu.edu/software/FLASH/), where R was the read length and F was the amplicon length.

[0749] Editing was quantified from the “Quantification_window_nucleotide_percentage_table.txt” output table as the percentage of reads that supported any A-to-G/C/T substitution in the main edited position (position 6 of the protospacer DNA sequence). Indels were quantified from the “Alleles_frequency_table_around_sgRNA_*.txt” output table as the percentage of reads that supported insertions or deletions over a 5-bp window on either side of the nick site (at position −3 upstream of the PAM sequence), having excluded reads that supported deletions larger than 30 bp. For candidate off-target sites, editing was quantified from the “Alleles_frequency_table_around_sgRNA_*txt” output table as the percentage of reads from alleles with an A->G substitution in the editing window (positions 1-10 in the PAM distal side of the protospacer), having excluded reads from alleles with deletions larger than 30 bp.

[0750] Reverse transcription. The collected cells were processed with the miRNeasy Mini Kit (QIAGEN) according to the manufacturer's instructions to isolate both large and small RNA species, with the other part harvested for genomic DNA to establish PCSK9 editing and thereby confirm base editor activity in the cells. Reverse transcription was performed using the iScript Reverse Transcription Supermix reagent according to the manufacturer's instructions, with four different primer pairs used for PCR amplification of transcripts spanning exon 1 and exon 2, with or without any portions of intron 1. Paired-end reads of 250-bp length generated using an Illumina MiSeq System, as described above, were trimmed for adapters using trimmomatic v0.39 with parameters “ILLUMINACLIP:NexteraPE-PE.fa:2:30:10:1:true LEADING:3 TRAILING:3 SLIDINGWINDOW:4:15 MINLEN:36”. Reads were then merged with FLASH v1.2.11³⁴ and aligned to the PCSK9 gene body with Bowtie2 v2.4.1 with parameters “-local-very-sensitive-local-k 1-np 0”. Gene annotations were obtained from Ensembl v98 (ftp://ftp.ensembl.org/pub/release-98/gtf/homo_sapiens/Homo_sapiens.GRCh38.98.gtfgz). Alignments were filtered with samtools v1.10 and converted to BED format with the bedtools v2.25.0 bamtobed function. A minimum of 1000 mapped reads per sample were required and the end positions of mapped reads were tallied. Positions throughout PCSK9 intron 1 supported by a minimum of 10 reads in at least one treated sample are report.

[0751] ONE-seq analysis to predict candidate off-target sites. The design of a ONE-seq library starts with the computational identification of sites in a reference genome that have sequence homology to the on-target. For human ONE-seq libraries, the reference human genome (GRCh38, Ensembl v98, chromosomes ftp://ftp.ensembl.org/pub/release-98/fasta/homo_sapiens/dna/Homo_sapiens.GRCh38.dna.chromosome. {1-22,X,Y,MT}.fa and ftp://ftp.ensembl.org/pub/release-98/fasta/homo_sapiens/dna/Homo_sapiens.GRCh38.dna.nonchromosomal.fa), was searched for potential off-target sites with up to 6 mismatches to the protospacer sequence above, and sites with up to 4 mismatches plus up to 2 DNA or RNA bulges, using Cas-Designer v1.2 (http://www.rgenome.net/cas-designer/).

[0752] For the ONE-seq library pertaining to the cynomolgus monkey, the reference cynomolgus monkey genome (macFas5, Ensembl 98, chromosomes ftp://ftp.ensembl.org/pub/release-98/fasta/Macaca_fascicularis/dna/Macaca_fascicularis.Macaca_fascicularis_5.0.dna.chromos ome.{1-20,X,MT}.fa.gz and ftp://ftp.ensembl.org/pub/release-98/fasta/Macaca fascicularis/dna/Macaca fascicularis.Macaca fascicularis 5.0.dna.nonchro mosomal.fa.gz) was searched using similar parameters.

[0753] Sites with up to 6 mismatches and no bulges are referred to using a X<number of mismatches><number of bulges> code. As such, the on-target site is labelled as X00; a site with 1 mismatch to the on-target and no bulges is labelled as X10, and so on. Sites with DNA bulges are referred to with a similar nomenclature, DNA<number of mismatches><number of bulges>. As such, a site with 4 mismatches to the on-target and 2 DNA bulges is labelled as DNA42. The same nomenclature is used for RNA bulges, but these are coded as RNA<number of mismatches><number of bulges>.

[0754] The protospacer sequences identified were extended by 10 nucleotides (nt) on both sides with adjacent sequence from the respective reference genome (these regions are herein referred to as the genomic context). These extended sequences were then padded by additional sequences up to a final length of approximately 200 nt, including 6 predefined constant regions of different nucleotide composition and sequence length; 2 copies of a 14-nt site-specific barcode, one on each side of the central protospacer sequence; and 2 distinct 11-nt unique molecular identifiers (UMIs), one on each side of the central protospacer sequence. The UMIs are used to correct for bias from PCR amplification, and the barcodes allow for the unambiguous identification of each site during analysis. The barcodes are selected from an initial list of 668,420 barcodes, which contain neither a CC nor a GG in their sequences, and each barcode has a Hamming distance of 2 from any other barcode. A custom Python script was used for designing the final library.

[0755] The final oligonucleotide libraries are synthesized by a commercial vendor (Agilent Technologies). Each library is PCR-amplified and subjected to 1.25× AMPure XP bead purification (Beckman Coulter). After incubation at 25° C. for 10 minutes in CutSmart buffer (New England Biolabs), RNP comprising 769 nM recombinant ABE8.8-m protein and 1.54 μM gRNA is mixed with 100 ng of the purified library and incubated at 37° C. for 8 hours. The RNP dose is derived from an analysis documenting that it is a super-saturating dose, ie, above the dose that achieves the maximum amount of on-target editing in the biochemical assay.

[0756] Proteinase K (New England Biolabs) is added to quench the reaction at 37° C. for 45 minutes, followed by 2× AMPure XP bead purification. The reaction is then serially incubated with EndoV (New England Biolabs) at 37° C. for 30 minutes, Klenow Fragment (New England Biolabs) at 37° C. for 30 minutes, and NEBNext Ultra II End Prep Enzyme Mix (New England Biolabs) at 20° C. for 30 minutes followed by 65° C. for 30 minutes, with 2× AMPure XP bead purification after each incubation. The reaction is ligated with an annealed adaptor oligonucleotide duplex at 20° C. for 1 hour to facilitate PCR amplification of the cleaved library products, followed by 2× AMPure XP bead purification. Size selection of the ligated reaction is performed on a PippinHT system (Sage Sciences) to isolate DNA of 150 to 200 bp on a 3% agarose gel cassette, followed by 2 rounds of PCR amplification to generate a barcoded library, which undergoes paired-end sequencing on an Illumina MiSeq System as described above.

[0757] Two cleavage products are obtained in a ONE-seq experiment. The PROTO side includes the part of the oligonucleotide upstream of the cleavage position, whereas the PAM side includes part of the oligonucleotide downstream of the cleavage position. In an ABE experiment, only the PROTO side is informative of editing activity (an A→G substitution); therefore, only this side is sequenced.

[0758] Paired-end reads were trimmed for sequencing adapters using trimmomatic v0.39 [symbol] with custom Nextera adapters (PrefixPE/1: ACACTCTTTCCCTACACGACGCTCTTCCGATCT (SEQ ID NO: 3157); PrefixPE/2: GTGACTGGAGTTCAGACGTGTGCTCTTCCGATCT (SEQ ID NO: 3158); as specified in file) and parameters “ILLUMINACLIP:NEB_custom.fa:2:30:10:1:true LEADING:0 TRAILING:0 SLIDINGWINDOW:4:30 MINLEN:36”. For experiments with lower sequencing quality (VOL014), these parameters were set to “ILLUMINACLIP NEB_custom.fa:2:30:10:1:true LEADING:2 TRAILING:0 SLIDINGWINDOW:30:30 MINLEN:36”. Reads were then merged using FLASH v1.2.11 [symbol] [symbol] with parameters “-max-mismatch-density=0.25-max-overlap=160”. Merged reads were scanned for the constant sequences, barcodes and protospacer sequences unique to each site, and filtered to those with evidence of an A→G substitution in the editing window (defined as the 1-10 most PAM-distal positions of the protospacer). Duplicated reads were discarded.

[0759] For each site, the total number of edited reads was normalized to the total number of edited reads assigned to the on-target site, and this ratio defines the ONE-seq score for the site. Sites were ranked by ONE-seq score, and those with a score equal to or larger than 0.001, were selected for validation. This implies the sponsor follows up on sites that have down to 1000-fold less editing activity in the biochemical assay compared to editing of the on-target site. This threshold is based on the premise that in cells, if there is 100% on-target editing, 1/1000-fold less editing activity would translate to <0.1% off-target editing, which falls below the lower limit of detection of editing by NGS.

[0760] SureSelect. SureSelect panels were designed and purchased from Agilent Technologies. Bases in raw FASTQ files with quality lower than 30 were masked to Ns using seqtk v1.3-r106 (https://github.com/lh3/seqtk). Adapters were trimmed using the “Trimmer” script in Agilent's AGeNT v2.0.5 tool. Reads were aligned to the GRCh38 reference human genome (ftp://ftp.ncbi.nlm.nih.gov/genomes/all/GCA/000/001/405/GCA_000001405.15_GRCh38/seq s_for_alignment_pipelines.ucsc_ids/GCA_000001405.15_GRCh38_no_alt_analysis_set.fna) using BWA MEM v 0.7.17-r1188 with parameter “-C”. Aligned reads were processed and duplicates were removed using the “LocatIt” script in Agilent's AGeNT v2.0.5 tool, with parameters “-i -R -IB -OB -U -l<Covered.bed>”. Nucleotide distributions at each position in the editing window (positions 1-10 in the PAM distal side of the protospacer) were determined using perbase v0.6.3 (https://github.com/sstadick/perbase), with parameters “base-depth-F 3848”. Editing was quantified by summing the percentage of reads supporting an A→G substitution in the editing window.

[0761] RNA-seq for guide-independent off-target analysis. The RNA samples were processed and sequenced by GENEWIZ; following rRNA depletion, libraries were prepared and underwent 2×150-bp paired-end sequencing on an Illumina HiSeq System, with approximate 50 million reads per sample. RNA-seq variant calling for all samples was executed using GATK Best Practices. In short, reads were aligned using STAR to the GRCh38 reference genome (ftp.ncbi.nlm.nih.gov/genomes/all/GCA/000/001/405/GCA_000001405.15_GRCh38/seqs_fo r_alignment_pipelines.ucsc_ids/GCA_000001405.15_GRCh38_no_alt_analysis_set.fna.gz) with gencode v34 (ftp://ftp.ebi.ac.uk/pub/databases/gencode/Gencode_human/release_34/gencode.v34.primary_assembly.annotation.gtf.gz). PCR duplicates were removed using GATK MarkDuplicates, followed by variant identification using GATK HaplotypeCaller. Variants were then filtered by excluding those with QD (Quality of Depth)<2.0 and FS (Fisher strand—evidence of strand bias)>30. All GATK analyses were performed with gatk4 v4.1.8.1.

[0762] Variants obtained as above were further filtered by comparison with untreated control samples as follows. (1) Nucleotide distributions at each identified variant in treated cells each untreated control sample and each treated sample using perbase v0.5.1 (https://github.com/sstadick/perbase). (2) For all variants covered by at least 20 reads in both treated and untreated conditions, RNA edits were identified as those that had the reference allele (A or T) in at least 95% of reads in all untreated control samples and the alternate allele (G or C) in at least one read in the treated sample. The above steps were executed with each of the ABE8.8-treated and SpCas9-treated samples.

[0763] Guide RNA synthesis. The guide RNAs shown in Table 1 were/are synthesized under solid phase oligonucleotide synthesis and deprotection conditions using controlled pore glass support and commercially available phosphoramidite monomers and oligonucleotide synthesis reagents (Methods in Molecular Biology, 1993, 20, 81-114; ACS Chem. Biol. 2015, 10, 1181-1187, incorporated herein by reference in its entirety). The spacer section of the guide RNAs were converted to the corresponding ribonucleotides except the first 1-3 nucleotides from the 5′-end. The first 1-3 nucleotides from the 5′-end was/were converted to the corresponding 2′-O-methylribonucleotide as outlined in Table 1. The deprotected guide RNAs were purified by HPLC and the integrity of each guide RNA was confirmed by mass spectrometric analysis. The observed mass of each guide RNA was conformed to calculated mass.

[0764] mRNA production by in vitro transcription (IVT) The mRNA described herein are produced by different methods well known in the art. One of such methods is in vitro transcription (IVT) using T7 polymerase or additional RNA polymerase variants. Typically, IVT of mRNA uses a linearized DNA template that comprises a T7 polymerase promoter and associated regulatory sequences, mRNA coding sequence (CDS), 3′ and 5′ untranslated regions (UTRs), poly A tail, and additional sequence elements to enhance mRNA stability and in vivo performance. Prior to IVT, the DNA template is in the form of a plasmid, PCR product, synthetic DNA product, or any other double-stranded DNA construct; linearization of the DNA template, typically with a restriction digestion enzyme, is performed to promote run-off transcription. A typical IVT reaction includes T7 polymerase, DNA template, RNase inhibitor, cap analog, inorganic pyrophosphatase, and naturally occurring ribonucleotide triphosphates (NTPs) such as GTP, ATP, CTP, UTP, or substitutions of natural NTPs with modified NTPs such as pseudouridine, N1-methylpseudouridine, 5′methylcytidine, 5-methoxyuridine, N6-methyladenosine, and N4-acetylcytidine. The cap analog can be added during transcription or supplemented after the IVT reaction using a capping enzyme; in both instances a 2′-O-methyl group, or additional 2′ chemical modification, is added to first initiating nucleotide to produce a cap-1 form of mRNA. In some instances, poly A tail is added to the mRNA after the IVT reaction using an RNA ligase enzyme. After IVT, in some cases DNase is added to the transcription mixture to remove DNA template; alternatively, residual DNA is removed with chromatography, precipitation, or tangential flow filtration. Purification and concentration of mRNA is performed with methods such as ion exchange chromatography, affinity chromatography, precipitation, ion-pairing reversed-phase chromatography, hydrogen bond chromatography, cellulose chromatography, reversed-phase chromatography, enzymatic reactions, size exclusion chromatography, and tangential flow filtration. Similar IVT and purification process are used to produce mRNA encoding luciferase, eGFP, SpCas9, Cas12b, CBE, and ABE; in all cases the DNA template, reaction conditions, and purification parameters are optimized for the specific gene of interest.

[0765] Lipid nanoparticle formulation and analysis. LNPs used were formulated as previously described (Conway, A. et al. 2019 Mol. Ther. 27, 866-877; Villiger, L. et al 2021 Nat. Biomed. Eng. 5, 179-189) and generated either by (1) microfluidic mixing using the Precision Nanosystems NanoAssemblr system according to the manufacturer's protocol, with some optimization for individual payloads or by (2) rapid inline mixing of a solution of lipid excipients in an organic solvent and an aqueous solution of gRNA and mRNA. The lipid solution generally comprises of a mixture of four formulation excipients namely: an amino lipid, a monomethoxypolyethylene glycol (or methoxypoluyethyle glycol) of average molecular weight 2000 Da conjugated to a lipid called PEG-Lipid, cholesterol and 1,2-distearoyl-sn-glycero-3-phosphocholine (DSPC), mixed in a predetermined molar ratio in ethanol. LNP composition comprised 40-65% of amino lipid, 2-20% DSPC, 1-5% PEG-Lipid, with the balance being cholesterol (all in mol %). The RNA aqueous solution contains a 1:1 by weight mixture of desired mRNA and guide RNA (gRNA) unless otherwise specified. For evaluating impact of mRNA to gRNA ratio, aqueous solution containing desired weight ratio of mRNA and gRNA were prepared prior to the preparation of corresponding LNPs, for evaluation; for example, the preparation of LNP test article to evaluate 6:1, 3:1, 2:1, 1:1, 1:2, 1:3 and 1:6 mRNA to gRNA ratio in mice (Example 6, FIG. 19). In some other instances, the mRNA and two gRNAs were mixed in 1:0.5:0.5 (mRNA:gRNA1:gRNA2) weight ratio to prepare LNPs containing desired mRNA and two gRNAs in a single test article (Example 10, FIG. 43). The aqueous solution of desired mRNA to gRNA was then mixed with the lipid excipients in ethanol by microfluidic or by rapid inline mixing. All LNPs for reported NHP studies were prepared by following the inline mixing protocols as described WO 2019/036028 A1, WO 2015/199952 A1, WO 2017/004143, WO 2020/081938 A1 and WO 2020/061426 A2. The PEG-Lipid used for the preparation of the NHP LNP test articles was selected from WO 2019/036028 A1, WO 2015/199952 A1. The LNP compositions and ionizable amino lipids were selected from the from Patent Publications WO/2017/004143A1, WO/2017/075531A1 and WO/2018/191719 A1. The ionizable amino lipids used for the preparation of LNP #1 and LNP #2 (Example 8, FIG. 30 & FIG. 45) were selected from the publication WO 2018/191719 A1. The resulting LNP formulations were subsequently dialyzed against test article buffer and filtered using a 0.2 μm sterile filter.

[0766] As an example, the LNPs used for cellular and NHP studies had an average hydrodynamic diameter range of 55 to 65 nm, with a polydispersity index of <0.2 as determined by dynamic light scattering and 85-98% total RNA encapsulation as measured by the Quant-iT Ribogreen Assay. The LNP particle size (Z-Ave, hydrodynamic diameter), polydispersity index and total RNA encapsulation were measured as described in the literature prior to administration.

[0767] As an example, the LNPs used for cellular and mouse studies had a particle size of 55-120 nm (Z-Ave, hydrodynamic diameter), with a polydispersity index of <0.2 as determined by dynamic light scattering (Malvern NanoZS Zetasizer) and 85-100% total RNA encapsulation as measured by the Quant-iT Ribogreen Assay (Thermo Fisher).

[0768] Genomic DNA extraction. The whole mouse liver or 100-200 mg of monkey liver was loaded into 2 mL lysing matrix tubes (MP Bio). Livers were lysed with 0.5 ml PBS for the mouse liver or 0.25 mL PBS for the monkey liver, using the FastPrep-24 system (MP Bio) according to the manufacturer's protocol. Genomic DNA was isolated from approximately 20 μL of mouse or monkey liver lysate using a bead-based extraction kit, MagMAX-96 DNA Multi-Sample Kit (Thermo-Fisher Scientific) on the KingFisher Flex automated extraction instrument (Thermo-Fisher Scientific) according to the manufacturer's protocols. For monkey liver biopsy samples, Qiagen DNEasy Blood & Tissue kit extraction was used to extract genomic DNA according to the manufacturer's instructions. Extracted genomic DNA was stored at 4° C. until further use or at −80° C. for long term storage.

[0769] PCSK9 protein levels quantified by ELISA. Blood samples were collected and processed to plasma following blood draw. The plasma cynomolgus PCSK9 levels were determined by ELISA using the described ELISA; briefly, test samples or standards of purified cynomolgus monkey PCSK9 diluted in assay diluent D (Biolegend, part #76384) were incubated with assay buffer A (Biolegend, part #78232) in a 96-well microplate coated with a monoclonal antibody specific for human PCSK9 (Biolegend, part #76157). After four washes with wash buffer (Biolegend, part #78233), a polyclonal antibody specific for human PCSK9 (Biolegend, part #76158) was incubated in individual wells. After four washes, avidin-HRP (Biolegend, part #77897) were next incubated in individual wells. After six washes, substrate solution F (Biolegend, part #79132), which contains TMB, was used to develop the plate. Optical density was determined using on a microplate reader set to 450 nm. Readings at 570 nm were subtracted from the readings at 450 nm to correct for optical imperfections in the plate. Blood samples were collected and processed to plasma following blood draw and stored at −86 to −60° C. until analysis.

[0770] ANGPTL3 protein levels quantified by ELISA. The plasma cynomolgus ANGPTL3 levels were determined by ELISA; briefly, test samples or standards of purified cynomolgus monkey ANGPTL3 diluted in calibrator diluent RD6Q (R&D, part #895128) were incubated with assay diluent RD1-76 (R&D, part #895812) in a 96-well microplate coated with a monoclonal antibody specific for human ANGPTL3 (R&D, part #893734). After four washes with wash buffer (R&D, part #895003), human ANGPTL3 conjugate (R&D, part #893735) which contains a polyclonal antibody specific for human ANGPTL3 conjugated to horseradish peroxidase (HRP) were next incubated in individual wells. After four washes, TMB substrate solution (R&D, part #895000 and 895001) was used to develop the plate. Optical density was determined using on a microplate reader set to 450 nm. Readings at 540 nm were subtracted from the readings at 450 nm to correct for optical imperfections in the plate.

[0771] Quantifying lipid levels. Reagent kits each analyte contain reagent, cholesterol, triglycerides and HDL-C are quantified using absorbance measurements of specific enzymatic reaction products. LDL-C is determined indirectly. Most of the circulating cholesterol is found in three major lipoprotein fractions: very low-density lipoproteins (VLDL), LDL and HDL. [Total C]=[VLDL-C]+[LDL-C]+[HDL-C]. Thus the LDL-C can be calculated from measured values of total cholesterol, triglycerides and HDL-C according to the relationship: [LDL-C]=[total C]−[HDL-C]−[TG]/5, where [TG]/5 is an estimate of VLDL-cholesterol expressed. These results provide a preclinical proof of concept of a base-editing therapy knocking down PCSK9 in the human liver in vivo and effecting reductions in blood PCSK9 protein and LDL-C levels.

[0772] Direct measurement of triglyceride levels. A clinical analyzer instrument is used to measure a ‘lipid panel’ in serum samples. This entails the direct measurement of cholesterol (total C), triglycerides (TG) and high-density lipoprotein cholesterol (HDL-C). A reagent kit specific for triglycerides contains buffers, calibrators, blanks and controls. Using the provided reagents, serum samples from the study are analyzed. Triglycerides are measured using a series of coupled enzymatic reactions. H₂O₂ is the end product of the last one and its absorbance at 500 nm is used to quantify the analyte. The color intensity is proportional to triglyceride concentrations. All values are reported in mg/dL.

[0773] LNP treatment of mice. The mouse studies were approved by the Institutional Animal Care and Use Committee of the Charles River Accelerator and Development Lab (CRADL), where the studies were performed. Female C57BL/6J mice were obtained from The Jackson Laboratory and used for experiments at 8-10 weeks of age, with random assignment of animals to various experimental groups. LNP were administered to the mice via injection into the lateral tail vein and/or retro-orbital injection of the of the venous sinus (Lab Anim 2011; 40(5): 155-160) at mg/kg doses that correspond to mg of total RNA per animal weight (kilogram). The dose is calculated based on total RNA that constitute the amount of mRNA and gRNA, after formulating the LNP. One week following treatment, the mice were euthanized unless otherwise stated, and liver samples were obtained on necropsy and processed with the KingFisher Flex Purification System according to the manufacturer's instructions to isolate genomic DNA.

[0774] LNP treatment of NHPs. The NHP studies were approved by the Institutional Animal Care and Use Committees of Envol Biomedical and Altasciences, respectively. NHPs studies were performed at Envol Biomedical (study #VTP2001) and Altasciences (study #1388.02, 04, 05, 09, and 11), with both studies using Macaca fascicularis) of Cambodian origin. The animals were 2-3 years of age and 2-3 kilograms in weight at the time of study initiation. All the animals were genotyped at the PCSK9 and/or ANGPTL3 editing site(s) to ensure that any animals receiving LNPs were homozygous for the protospacer DNA sequences perfectly matching the gRNA sequence, and animals were randomly assigned to various experimental groups. The animals were premediated with 1 mg/kg dexamethasone, 0.5 mg/kg famotidine, and 5 mg/kg diphenhydramine prior to LNP administration unless otherwise stated. The LNP were administered using a temporary catheter inserted into a peripheral vein connected to a primed infusion line, over the course of 1 hour (+/−5 minutes). Dose formulations were administered at a volume of 6 ml/kg, unless otherwise specified, and dosed at mg/kg corresponding to mg of total RNA per animal weight (kilogram). The dose is calculated based on total RNA that constitute the amount of mRNA and gRNA, after formulating the LNP. The appropriate volume based on the weight of the animal was delivered using an infusion pump. Control animals received phosphate-buffered saline instead of LNP under the same infusion conditions. When there are two LNPs constituted from amino lipid 1 and amino lipid 2 used in the same NHP study, the test articles are identified as LNP #1 and LNP #2 where mRNA and gRNA used for preparing these LNPs are the same. If there is only one LNP composition used in a study, the test article is identified as LNP

[0775] For blood chemistry samples, animals were fasted for at least 4 hours before collection via peripheral venipuncture. NHP studies generally followed collection on the following schedule: day −10, day −7, day −5, day 1 (6 hours after LNP infusion), day 2, day 3, day 5, day 8, and day 15. In the long-term study, samples were also collected at day 21 and day 28 and have generally been collected every 2 weeks thereafter and analyzed by the study site for LDL cholesterol, HDL cholesterol, total cholesterol, triglycerides, AST, and ALT. For each analyte, the mean of the values at day −10, day −7, and day −5 were regarded as the baseline value. A portion of each blood sample was sent to the investigators for PCSK9 or ANGPTL3 protein measurement.

[0776] Analysis of cytokine levels. The serum cynomolgus IL-6, MCP-1 and IP-10 levels were determined by U-PLEX Biomarker Group 1 (NHP) Assays (Meso Scale Discovery, #K15068L-2) according to manufacturer's instruction. Briefly, U-PLEX (Meso Scale Discovery, #N05230) plate was incubated overnight at 4° C. with linker-coupled capture antibodies (MCP-1 antibody; Meso Scale Discovery, #C26UG-3, IL-6 antibody; Meso Scale Discovery, #C21TX-3, IP-10 antibody; Meso Scale Discovery, #C21UF-3). After 3 washes with PBS-T (PBS containing 0.05% Tween 20), test samples or Calibrator standards (Calibrator 1; Meso Scale Discovery, #C0060-2, Calibrator 2: Meso Scale Discovery, #C0061-2) were incubated with assay diluent 43 (Meso Scale Discovery, #R50AG-2), which contains serum, blockers and preservatives, at room temperature for an hour. After 3 washes, SULFO-TAG conjugated detection antibodies for IL-6 (Meso Scale Discovery, #D26TX-3), MCP-1 (Meso Scale Discovery, #D26UG-3) and IP-10 (Meso Scale Discovery, #D21UF-3) were incubated in individual wells at at room temperature for an hour. After 3 washes and adding Gold™ read buffer B (Meso Scale Discovery, #R60AM-2) to each well, the plate was analyzed by MSD instrument (Meso Scale Discovery, #R31QQ-3.

Lengthy table referenced here
US20240390523A1-20241128-T00001
Please refer to the end of the specification for access instructions.

Lengthy table referenced here
US20240390523A1-20241128-T00002
Please refer to the end of the specification for access instructions.

[0777] All patents and publications mentioned in this specification are herein incorporated by reference to the same extent as if each independent patent and publication was specifically and individually indicated to be incorporated by reference.

### OTHER EMBODIMENTS

[0778] From the foregoing description, it will be apparent that variations and modifications may be made to the disclosure described herein to adopt it to various usages and conditions. Such embodiments are also within the scope of the following claims.

[0779] The recitation of a listing of elements in any definition of a variable herein includes definitions of that variable as any single element or combination (or subcombination) of listed elements. The recitation of an embodiment herein includes that embodiment as any single embodiment, any portion of the embodiment, or in combination with any other embodiments or any portion thereof.

[0780] As is set forth herein, it will be appreciated that the disclosure comprises specific embodiments and examples of base editing systems to effect a nucleobase alteration in a gene and methods of using same for treatment of disease including compositions that comprise such base editing systems, designs and modifications thereto; and specific examples and embodiments describing the synthesis, manufacture, use, and efficacy of the foregoing individually and in combination including as pharmaceutical compositions for treating disease and for in vivo and in vitro delivery of active agents to mammalian cells under described conditions.

[0781] While specific examples and numerous embodiments have been provided to illustrate aspects and combinations of aspects of the foregoing, it should be appreciated and understood that any aspect, or combination thereof, of an exemplary or disclosed embodiment may be excluded therefrom to constitute another embodiment without limitation and that it is contemplated that any such embodiment can constitute a separate and independent claim. Similarly, it should be appreciated and understood that any aspect or combination of aspects of one or more embodiments may also be included or combined with any aspect or combination of aspects of one or more embodiments and that it is contemplated herein that all such combinations thereof fall within the scope of this disclosure and can be presented as separate and independent claims without limitation. Accordingly, it should be appreciated that any feature presented in one claim may be included in another claim; any feature presented in one claim may be removed from the claim to constitute a claim without that feature; and any feature presented in one claim may be combined with any feature in another claim, each of which is contemplated herein. The following enumerated clauses are further illustrative examples of aspects and combination of aspects of the foregoing embodiments and examples:

[0782] Following is the first example of enumerated clauses:

[0783] 1. A composition for editing a gene target comprising:
[0784] (i) a base editor fusion protein comprising a programmable DNA binding domain and a deaminase, or a mRNA encoding the same,
[0785] (ii) a guide RNA comprising a tracr sequence that serves as a binding scaffold for the base editor fusion protein, and a spacer sequence that corresponds to a protospacer on a PCSK9 gene,
[0786] wherein the guide RNA directs the base editor fusion protein to effect a nucleobase alteration in the PCSK9 gene in vivo when administered to a mammalian subject,
[0787] wherein when the guide RNA and the mRNA is administered at a total amount of at least 0.05 mg/kg, the base alteration occurs in at least 35% of whole liver cells in the mammalian subject as measured by next generation sequencing or Sanger sequencing.

[0788] 2. The composition of clause 1, wherein the mammalian subject is a cynomolgus monkey,
[0789] wherein when the guide RNA and the mRNA is administered at a total amount of at least 0.5 mg/kg, the base alteration occurs in at least 40% of whole liver cells in the cynomolgus monkey as measured by next generation sequencing or Sanger sequencing.

[0790] 3. The composition of clause 1, wherein the mammalian subject is a cynomolgus monkey,
[0791] wherein when the guide RNA and the mRNA is administered at a total amount of at least 1 mg/kg, the base alteration occurs in at least 45% of whole liver cells in the cynomolgus monkey as measured by next generation sequencing or Sanger sequencing.

[0792] 4. The composition of clause 1, wherein the mammalian subject is a cynomolgus monkey,
[0793] wherein when the guide RNA and the mRNA is administered at a total amount of at least 1.5 mg/kg, the base alteration occurs in at least 50% of whole liver cells in the cynomolgus monkey as measured by next generation sequencing or Sanger sequencing.

[0794] 5. The composition of clause 1, wherein the mammalian subject is a cynomolgus monkey,
[0795] wherein when the guide RNA and the mRNA is administered at a total amount of at least 3 mg/kg, the base alteration occurs in at least 55% of whole liver cells in the cynomolgus monkey as measured by next generation sequencing or Sanger sequencing.

[0796] 6. The composition of clause 1, wherein the mammalian subject is a mouse,
[0797] wherein when the guide RNA and the mRNA is administered at a total amount of at least 0.125 mg/kg, the base alteration occurs in at least 40% of whole liver cells in the mouse as measured by next generation sequencing or Sanger sequencing.

[0798] 7. The composition of clause 1, wherein the mammalian subject is a mouse,
[0799] wherein when the guide RNA and the mRNA is administered at a total amount of at least 0.5 mg/kg, the base alteration occurs in at least 45% of whole liver cells in the mouse as measured by next generation sequencing or Sanger sequencing.

[0800] 8. The composition of clause 1, wherein the mammalian subject is a mouse,
[0801] wherein when the guide RNA and the mRNA is administered at a total amount of at least 2 mg/kg, the base alteration occurs in at least 50% of whole liver cells in the mouse as measured by next generation sequencing or Sanger sequencing.

[0802] 9. The composition of clause 2, wherein the nucleobase alteration results in a reduction of at least 50% in blood low-density lipoprotein cholesterol (LDL-C) level in the subject as compared to prior to the administration.

[0803] 10. The composition of any one of clauses 1-9, wherein the protospacer is located in a splice site.

[0804] 11. The composition of any one of clauses 1-9, wherein the protospacer complementary sequence is in the antisense strand of the PCSK9 gene.

[0805] 12. The composition of any one of clauses 1-9, wherein the protospacer complementary sequence is in the sense strand of the PCSK9 gene.

[0806] 13. The composition of any one of clauses 1-12, wherein the base alteration happens outside of the protospacer on the PCSK9 gene (off-target sites),
[0807] wherein the editing percentages of off-target sites set forth in Table 11 are below or equal to the editing percentages set forth in Table 11, respectively.

[0808] 14. The composition of any one of clauses 1-13, wherein the deaminase is an adenine deaminase and wherein the nucleobase alteration is a A•T to G•C alteration.

[0809] 15. The composition of any one of clauses 1-14, wherein the programmable DNA binding domain comprises a nuclease inactive Cas9 or a Cas9 nickase.

[0810] 16. The composition of any one of clauses 1-15, wherein the nucleobase alteration is at a splice site of the PCSK9 gene.

[0811] 17. The composition of clause 16, wherein the nucleobase alteration is at a splice donor site of the PCSK9 gene.

[0812] 18. The composition of clause 17, wherein the splice donor site is at 5′ end of PCSK9 intron 1 as referenced in SEQ ID NO: 5.

[0813] 19. The composition of clause 16, wherein the nucleobase alteration is at a splice acceptor site of the PCSK9 gene.

[0814] 20. The composition of any one of clauses 1-19, wherein the nucleobase alteration results in a frame shift, a premature stop codon, an insertion or deletion in a transcript encoded by the PCSK9 gene.

[0815] 21. The composition of any one of clauses 1-20, wherein the nucleobase alteration results in an aberrant transcript encoded by the PCSK9 gene.

[0816] 22. The composition of any one of clauses 1-21, wherein the guide RNA is chemically modified.

[0817] 23. The composition of clause 16, wherein the tracr sequence of the guide RNA is chemically modified following the scheme depicted in FIG. 7.

[0818] 24. The composition of any one of clauses 1-22, wherein the spacer sequence comprises a PCSK9 ABE guide RNA spacer sequence set forth in Table 1.

[0819] 25. The composition of clause 24, wherein the guide RNA comprises the PCSK9 ABE guide RNA sequence of GA096, GA097, GA343, GA346, GA375-377, GA380-389, GA391, GA439 or GA440 as set forth in Table 1.

[0820] 26. The composition of any one of clauses 1-23, wherein the protospacer sequence comprises a PCSK9 ABE protospacer sequence set forth in Table 1.

[0821] 27. The composition of clause 26, wherein the protospacer comprises the sequence 5′-CCCGCACCTTGGCGCAGCGG-3′ (SEQ ID No: 13) or 5′-CCGCACCTTGGCGCAGCGG-3′ (SEQ ID No: 247).

[0822] 28. The composition of any one of clauses 1-27, wherein the base editor fusion protein comprises an amino acid sequence of SEQ ID No: 2137.

[0823] 29. The composition of any one of clauses 1-28, wherein the GC % content of the mRNA sequence is greater than 50%.

[0824] 30. The composition of clause 29, wherein the GC % content of the mRNA sequence is greater than 56%.

[0825] 31. The composition of clause 30, wherein the GC % content of the mRNA sequence is greater than or equal to 63%.

[0826] 32. The composition of clause 29, wherein the mRNA comprises an adenine tTNA deaminase (TadA) region, a Cas9 region and a nuclear localization sequence (NLS) region.

[0827] 33. The composition of clause 32, wherein the mRNA further comprises a first linker region which connects the TadA region and the Cas9 region, and a second linker region which connects the Cas9 region and the NLS region.

[0828] 34. The composition of clause 32 or 33, wherein the GC % content of the TadA region is greater than 60%.

[0829] 35. The composition of clause 32 or 33, wherein the GC % content of the TadA region is greater than or equal to 70%.

[0830] 36. The composition of clause 32 or 33, wherein the GC % content of the Cas9 region is greater than 56%.

[0831] 37. The composition of clause 32 or 33, wherein the GC % content of the Cas9 region is greater than or equal to 62%.

[0832] 38. The composition of clause 32 or 33, wherein the GC % content of the NLS region is greater than 54%.

[0833] 39. The composition of clause 32 or 33, wherein the GC % content of the NLS region is greater than or equal to 63%.

[0834] 40. The composition of clause 33, wherein the GC % content of the first linker region is greater than 65%.

[0835] 41. The composition of clause 33, wherein the GC % content of the first linker region is greater than or equal to 79%.

[0836] 42. The composition of clause 33, wherein the GC % content of the second linker region is greater than 67%.

[0837] 43. The composition of clause 33, wherein the GC % content of the second linker region is greater than or equal to 83%.

[0838] 44. The composition of clause 33, wherein the GC % content of the TadA region is greater than 60%, the GC % content of the Cas9 region is greater than 56%, the GC % content of the NLS region is greater than 54%, the GC % content of the first linker region is greater than 65%, and the GC % content of the second linker region is greater than 67%.

[0839] 45. The composition of clause 29, wherein the mRNA comprises a mRNA sequence selected from Table 23.

[0840] 46. The composition of clause 45, wherein the mRNA comprises a mRNA sequence of SEQ ID No: 2136.

[0841] 47. The composition of any one of clauses 29-46, wherein the mRNA comprises a poly A tail.

[0842] 48. The composition of any one of clauses 1-47, further comprising a lipid nanoparticle (LNP) enclosing (i).

[0843] 49. The composition of clause 48, wherein the LNP further encloses (ii).

[0844] 50. The composition of clause 48, further comprising a second LNP enclosing (ii).

[0845] 51. The composition of any one of clauses 1-44, wherein the ratio of the guide RNA and the mRNA encoding the base editor fusion protein is about 1:10 to about 10:1 by weight.

[0846] 52. The composition of clause 51, wherein the ratio of the guide RNA and the mRNA encoding the base editor fusion protein is about 1:1, 1.5:1, 2:1, 3:1, 4:1, 1:1.5, 1:2, 1:3, or 1:4 by weight.

[0847] 53. The composition of clause 51, wherein the ratio of the guide RNA and the mRNA encoding the base editor fusion protein is about 1:1 by weight.

[0848] 54. A pharmaceutical composition comprising the composition of any one of the preceding clauses and a pharmaceutically acceptable carrier or excipient.

[0849] 55. A method for treating or preventing a condition in a subject in need thereof, the method comprising administering to the subject a therapeutically effective amount of the composition of clause 1.

[0850] 56. The method of clause 55, wherein the administration is via intravenous infusion.

[0851] 57. The method of clause 55 or 56, comprising sequential administration of a LNP enclosing (i) and a LNP enclosing (ii).

[0852] 58. The method of clause 55 or 56, comprising concurrent administration of the t LNP enclosing (i) and the LNP enclosing (ii).

[0853] 59. The method of clause 57, comprising administering a single dose of the LNP enclosing (ii) followed by staggered doses of the LNP enclosing (i) over an interval of 1 day.

[0854] 60. The method of clause 57, comprising administering a single dose of the LNP enclosing (ii) followed by staggered doses of the LNP enclosing (i) over an interval of 2 days.

[0855] 61. The method of clause 57, comprising administering a single dose of the LNP enclosing (ii) followed by staggered doses of the LNP enclosing (i) over an interval of 3 days.

[0856] 62. The method of clause 57, comprising administering a single dose of the LNP enclosing (ii) followed by staggered doses of the LNP enclosing (i) over an interval of 4 days.

[0857] 63. The method of clause 57, comprising administering a single dose of the LNP enclosing (ii) followed by staggered doses of the LNP enclosing (i) over an interval of 5 days.

[0858] 64. The method of clause 57, comprising administering a single dose of the LNP enclosing (ii) followed by staggered doses of the LNP enclosing (i) over an interval of 6 days.

[0859] 65. The method of clause 57, comprising administering a single dose of the LNP enclosing (ii) followed by staggered doses of the LNP enclosing (i) over an interval of 7 days.

[0860] 66. The method of clause 55 or 56, comprising administering a single dose of the LNP enclosing (i) and (ii).

[0861] 67. The method of clause 66, wherein the single dose of the LNP is at about 0.3 to about 3 mg/kg.

[0862] 68. The method of clause 66 or 67, comprising administering a treatment course of one or more treatments to the subject, wherein each one of the one or more treatment comprises one or more of the single doses of the LNP.

[0863] 69. The method of clause 68, comprising administering a treatment course of two to ten treatments.

[0864] 70. The method of clause 68, comprising administering a treatment course of two to five treatments.

[0865] 71. The method of clause 68, comprising administering a treatment course of two treatments.

[0866] 72. The method of clause 68, comprising administering a treatment course of three treatments.

[0867] 73. The method of clause 68, comprising administering a treatment course of four treatments.

[0868] 74. The method of clause 68, comprising administering a treatment course of five treatments.

[0869] 75. The method of any one of clauses 55-74, wherein the condition is an atherosclerotic cardiovascular disease.

[0870] 76. The method of any one of clauses 55-74, wherein the condition is an atherosclerotic vascular disease.

[0871] 77. The method of any one of clauses 55-74, wherein the subject is a human.

[0872] 78. A composition for editing a gene target comprising:
[0873] (i) a base editor fusion protein comprising a programmable DNA binding domain and a deaminase, or a mRNA encoding the same,
[0874] (ii) a guide RNA comprising a tracr sequence that serves as a binding scaffold for the base editor fusion protein, and a spacer sequence that corresponds to a protospacer on a PCSK9 gene,
[0875] wherein the guide RNA directs the base editor fusion protein to effect a nucleobase alteration in the PCSK9 gene in vivo when administered to a mammalian subject, and
[0876] wherein the guide RNA comprises the PCSK9 ABE guide RNA sequences as set forth in Table 1.

[0877] 79. A composition for editing a gene target comprising:
[0878] (i) a base editor fusion protein comprising a programmable DNA binding domain and a deaminase, or a mRNA encoding the same,
[0879] (ii) a guide RNA comprising a tracr sequence that serves as a binding scaffold for the base editor fusion protein, and a spacer sequence that corresponds to a protospacer on a PCSK9 gene,
[0880] wherein the guide RNA directs the base editor fusion protein to effect a nucleobase alteration in the PCSK9 gene in vivo when administered to a mammalian subject, and
[0881] wherein the mRNA comprises a sequence selected from Table 23.

[0882] 80. A method for treating or preventing an atherosclerotic cardiovascular disease in a subject in need thereof, the method comprising administering to the subject a therapeutically effective amount of a first composition, comprising
[0883] (i) a base editor fusion protein comprising a programmable DNA binding domain and a deaminase, or a mRNA encoding the same,
[0884] (ii) a guide RNA comprising a tracr sequence that serves as a binding scaffold for the base editor fusion protein, and a spacer sequence that corresponds to a protospacer on a PCSK9 gene,
[0885] wherein the guide RNA directs the base editor fusion protein to effect a nucleobase alteration in the PCSK9 gene in vivo when administered to a mammalian subject,
[0886] wherein when the guide RNA and the mRNA is administered at a total amount of at least 0.05 mg/kg, the base alteration occurs in at least 35% of whole liver cells in the mammalian subject as measured by next generation sequencing or Sanger sequencing; and
[0887] a second composition, comprising
[0888] (i) a base editor fusion protein comprising a programmable DNA binding domain and a deaminase, or a mRNA encoding the same,
[0889] (ii) a guide RNA comprising a tracr sequence that serves as a binding scaffold for the base editor fusion protein, and a spacer sequence that corresponds to a protospacer on a ANGPTL3 gene,
[0890] wherein the guide RNA directs the base editor fusion protein to effect a nucleobase alteration in the ANGPTL3 gene in vivo when administered to a mammalian subject,
[0891] wherein when the guide RNA and the mRNA is administered at a total amount of at least 0.5 mg/kg, the base alteration occurs in at least 35% of whole liver cells in the mammalian subject as measured by next generation sequencing or Sanger sequencing.

[0892] 81. The method of clause 80, comprising sequential administration of the first composition and the second composition.

[0893] 82. The method of clause 81, comprising administering one or more doses of the first composition followed by one or more dose of the second composition.

[0894] 83. The method of clause 82, comprising administering one or more doses of the second composition followed by one or more dose of the first composition.

[0895] 84. The method of clause 80, comprising concurrent administration of the first composition and the second composition.

[0896] 85. The method of clause 84, comprising one or more doses of the first composition and the second composition.

[0897] 86. A composition for editing a gene target comprising:
[0898] (i) a base editor fusion protein comprising a programmable DNA binding domain and a deaminase, or a mRNA encoding the same,
[0899] (ii) a guide RNA comprising a tracr sequence that serves as a binding scaffold for the base editor fusion protein, and a spacer sequence that corresponds to a protospacer on a APOC3 gene,
[0900] wherein the guide RNA comprises the APOC3 ABE guide RNA sequence of GA300-303 as set forth in Table 24.

[0901] 87. A composition for editing a gene target comprising:
[0902] (i) a base editor fusion protein comprising a programmable DNA binding domain and a deaminase, or a mRNA encoding the same,
[0903] (ii) a guide RNA comprising a tracr sequence that serves as a binding scaffold for the base editor fusion protein, and a spacer sequence that corresponds to a protospacer on a PCSK9 gene,
[0904] wherein the guide RNA directs the base editor fusion protein to effect a nucleobase alteration in the PCSK9 gene in vitro,
[0905] wherein when the guide RNA and the mRNA is administered at a total amount of at least 2.5 mg/kg, the base alteration occurs in at least 35% of whole liver cells in the mammalian subject as measured by next generation sequencing or Sanger sequencing.

[0906] 88. A composition for editing a PCSK9 gene comprising:
[0907] (a) a mRNA encoding an adenine base editor protein having an editing window, and
[0908] (b) a guide RNA comprising a tracr sequence that serves as a binding scaffold for the base editor protein and a spacer sequence that serves to guide the base editor protein to a protospacer sequence on the PCSK9 gene,
[0909] wherein the spacer sequence is complimentary, at least in part, to a splice site or an exon region of the PCSK9 gene.

[0910] 89. The composition for editing the PCSK9 gene of clause 88, wherein when the base editor protein is operatively bound to the guide RNA and the guide RNA is hybridized with the complementary strand to the protospacer sequence on the PCSK9 gene, the editing window encompasses the splice site of the PCSK9 gene.

[0911] 90. The composition for editing the PCSK9 gene of clause 88, wherein when the base editor protein is operatively bound to the guide RNA and the guide RNA is hybridized with the complementary strand to the protospacer sequence on the PCSK9 gene, the editing window encompasses a region of an intron of the PCSK9 gene.

[0912] 91. The composition for editing the PCSK9 gene of clause 88, wherein when the base editor protein is operatively bound to the guide RNA and the guide RNA is hybridized with the complementary strand to the protospacer sequence on the PCSK9 gene, the editing window encompasses a region of intron 1, intron 3 or intron 4 of the PCSK9 gene.

[0913] 92. The composition for editing the PCSK9 gene of clause 88, wherein when the base editor protein is operatively bound to the guide RNA and the guide RNA is hybridized with the complementary strand to the protospacer sequence on the PCSK9 gene, the editing window encompasses a region of intron 1 of the PCSK9 gene.

[0914] 93. The composition for editing the PCSK9 gene of clause 88, wherein the spacer sequence has a 80-100% nucleotide sequence identity to a spacer sequence selected from the group of guide RNA sequences identified as GA066, GA073 and GA074.

[0915] 94. The composition for editing the PCSK9 gene of clause 88, wherein the tracr sequence has a 80-100% nucleotide sequence identity to a tracr sequence selected from the group of guide RNA sequences identified as GA066, GA095, GA096, GA097, GA343, GA346, GA375, GA376, GA377, GA380, GA381, GA382, GA383, GA384, GA385, GA386, GA387, GA388, GA389, GA439, and GA440.

[0916] 95. The composition for editing the PCSK9 gene of clause 88, wherein the mRNA has an 80-100% sequence identity to the mRNA sequences identified as MA002, MA004, MA040, MA0041, or MA045.

[0917] 96. The composition for editing the PCSK9 gene of clause 88, wherein the mRNA has one or more of the GC nucleotide region percentages set forth in the following table:

| Nucleotide region | Average GC Nucleotide Content |
|---|---|
| 27-213 | 67-73% |
| 389-661 | 67-71% |
| 735-829 | 63-74% |
| 4207-4286 | 67-70% |
| 4537-4569 | 65-73% |
| 4683-4741 | 62-67% |

[0918] 97. The composition for editing the PCSK9 gene of clause 88, wherein the mRNA has one or more of the GC nucleotide region percentages set forth in the following table

| Nucleotide region | Average GC Nucleotide Content |
|---|---|
| 27-213 | At least 73% |
| 389-661 | At least 71% |
| 735-829 | At least 74% |
| 4207-4286 | At least 70% |
| 4537-4569 | At least 73% |
| 4683-4741 | At least 67% |

[0919] 98. The composition for editing the PCSK9 gene of clause 88, wherein the mRNA and gRNA are encapsulated within a lipid nanoparticle.

[0920] 99. The composition for editing the PCSK9 gene of clause 88, wherein the mRNA and gRNA are encapsulated within a lipid nanoparticle having the following:
[0921] LNP composition (mol %):
[0922] 40-65% iLipid
[0923] 2-20% DSPC
[0924] 1-5% PEG
[0925] Remaining mol % balance is cholesterol;
[0926] LNP Particle size: 55-120 nm Z average hydrodynamic diameter; and
[0927] Polydispersity index of <0.2 as determined by dynamic light scattering.

[0928] 100. The composition for editing the PCSK9 gene of clause 88, wherein the mRNA and gRNA are encapsulated within the lipid nanoparticle having an LNP particle size between 50-70 nm Z average hydrodynamic diameter.

[0929] 101. The composition for editing the PCSK9 gene of clause 88, wherein the composition when administered to a group of cynomolgus monkeys via intravenous infusion at a dose of approximately 0.5 mg of the guide RNA and mRNA combined total weight per kg of the cynomolgus monkey weight is capable of inducing adenine base editing at the PCSK9 target splice site in the liver of the cynomolgus monkeys with an average editing percentage of greater than 40 percent.

[0930] 102. The composition for editing the PCSK9 gene of clause 88, wherein the composition when administered to a group of cynomolgus monkeys via intravenous infusion at a dose of approximately 0.5 mg of the guide RNA and mRNA combined total weight per kg of the cynomolgus monkey weight is capable of inducing adenine base editing at the PCSK9 target splice site in the liver of the cynomolgus monkeys with an average editing percentage of greater than 50 percent.

[0931] 103. The composition for editing the PCSK9 gene of clause 88, wherein the composition when administered to a group of cynomolgus monkeys via intravenous infusion at a dose of approximately 0.5 mg of the guide RNA and mRNA combined total weight per kg of the cynomolgus monkey weight is capable of inducing adenine base editing at the PCSK9 target splice site in the liver of the cynomolgus monkeys with an average editing percentage of greater than 30 percent.

[0932] 104. The composition for editing the PCSK9 gene of clause 88, wherein the composition when administered to a group of cynomolgus monkeys via intravenous infusion at a dose of approximately 1 mg of the guide RNA and mRNA combined total weight per kg of the cynomolgus monkey weight is capable of inducing adenine base editing at the PCSK9 target splice site in the liver of the cynomolgus monkeys with an average editing percentage of greater than 40 percent.

[0933] 105. The composition for editing the PCSK9 gene of clause 88, wherein the composition when administered to a group of cynomolgus monkeys via intravenous infusion at a dose of approximately 1 mg of the guide RNA and mRNA combined total weight per kg of the cynomolgus monkey weight is capable of inducing adenine base editing at the PCSK9 target splice site in the liver of the cynomolgus monkeys with an average editing percentage of greater than 50 percent.

[0934] 106. The composition for editing the PCSK9 gene of clause 88, wherein the composition when administered to a group of cynomolgus monkeys via intravenous infusion at a dose of approximately 1 mg of the guide RNA and mRNA combined total weight per kg of the cynomolgus monkey weight is capable of inducing adenine base editing at the PCSK9 target splice site in the liver of the cynomolgus monkeys with an average editing percentage of greater than 60 percent.

[0935] 107. The composition for editing the PCSK9 gene of clause 88, wherein the composition when administered to a group of cynomolgus monkeys via intravenous infusion at a dose of approximately 1 mg of the guide RNA and mRNA combined total weight per kg of the cynomolgus monkey weight is capable of inducing adenine base editing at the PCSK9 target splice site in the liver of the cynomolgus monkeys with an average editing percentage of greater than 70 percent.

[0936] 108. The composition for editing the PCSK9 gene of clause 88, wherein the composition when administered to a group of cynomolgus monkeys via intravenous infusion at a dose of approximately 1.5 mg of the guide RNA and mRNA combined total weight per kg of the cynomolgus monkey weight is capable of inducing adenine base editing at the PCSK9 target splice site in the liver of the cynomolgus monkeys with an average editing percentage of greater than 40 percent.

[0937] 109. The composition for editing the PCSK9 gene of clause 88, wherein the composition when administered to a group of cynomolgus monkeys via intravenous infusion at a dose of approximately 1.5 mg of the guide RNA and mRNA combined total weight per kg of the cynomolgus monkey weight is capable of inducing adenine base editing at the PCSK9 target splice site in the liver of the cynomolgus monkeys with an average editing percentage of greater than 50 percent.

[0938] 110. The composition for editing the PCSK9 gene of clause 88, wherein the composition when administered to a group of cynomolgus monkeys via intravenous infusion at a dose of approximately 1.5 mg of the guide RNA and mRNA combined total weight per kg of the cynomolgus monkey weight is capable of inducing adenine base editing at the PCSK9 target splice site in the liver of the cynomolgus monkeys with an average editing percentage of greater than 60 percent.

[0939] 111. The composition for editing the PCSK9 gene of clause 88, wherein the composition when administered to a group of cynomolgus monkeys via intravenous infusion at a dose of approximately 1.5 mg of the guide RNA and mRNA combined total weight per kg of the cynomolgus monkey weight is capable of inducing adenine base editing at the PCSK9 target splice site in the liver of the cynomolgus monkeys with an average editing percentage of greater than 70 percent.

[0940] 112. The composition for editing the PCSK9 gene of clause 88, wherein the composition when at administered to a group of cynomolgus monkeys via intravenous infusion at a dose of approximately 1.5 mg of the guide RNA and mRNA combined total weight per kg of the cynomolgus monkey weight is capable of inducing adenine base editing at the PCSK9 target splice site in the liver of the cynomolgus monkeys with an average editing percentage of greater than 80 percent.

[0941] 113. The composition for editing the PCSK9 gene of clause 88, wherein the composition when administered to a group of cynomolgus monkeys via intravenous infusion at a dose of approximately 3 mg of the guide RNA and mRNA combined total weight per kg of the cynomolgus monkey weight is capable of inducing adenine base editing at the PCSK9 target splice site in the liver of the cynomolgus monkeys with an average editing percentage of greater than 40 percent.

[0942] 114. The composition for editing the PCSK9 gene of clause 88, wherein the composition when administered to a group of cynomolgus monkeys via intravenous infusion at a dose of approximately 3 mg of the guide RNA and mRNA combined total weight per kg of the cynomolgus monkey weight is capable of inducing adenine base editing at the PCSK9 target splice site in the liver of the cynomolgus monkeys with an average editing percentage of greater than 50 percent.

[0943] 115. The composition for editing the PCSK9 gene of clause 88, wherein the composition when administered to a group of cynomolgus monkeys via intravenous infusion at a dose of approximately 3 mg of the guide RNA and mRNA combined total weight per kg of the cynomolgus monkey weight is capable of inducing adenine base editing at the PCSK9 target splice site in the liver of the cynomolgus monkeys with an average editing percentage of greater than 60 percent.

[0944] 116. The composition for editing the PCSK9 gene of clause 88, wherein the composition when administered to a group of cynomolgus monkeys via intravenous infusion at a dose of approximately 3 mg of the guide RNA and mRNA combined total weight per kg of the cynomolgus monkey weight is capable of inducing adenine base editing at the PCSK9 target splice site in the liver of the cynomolgus monkeys with an average editing percentage of greater than 70 percent.

[0945] 117. The composition for editing the PCSK9 gene of clause 88, wherein the composition when administered to a group of cynomolgus monkeys via intravenous infusion at a dose of approximately 3 mg of the guide RNA and mRNA combined total weight per kg of the cynomolgus monkey weight is capable of inducing adenine base editing at the PCSK9 target splice site in the liver of the cynomolgus monkeys with an average editing percentage of greater than 80 percent.

[0946] 118. The compositions for editing the PCSK9 gene of clauses 87-117, wherein the percent editing is determined at 15 days after dosing through analysis of dosed cynomolgus monkey liver either via liver biopsy or necropsy of the monkey.

[0947] 119. The compositions for editing of the PCSK9 gene of clauses 87-117, wherein the percent editing is determined to be durably maintained by periodic liver biopsy testing of the dosed cynomolgus monkeys over a span of at least 168 days after dosing.

[0948] 120. The compositions for editing of the PCSK9 gene of clauses 87-117, wherein the percent editing is determined to be durably maintained by periodic liver biopsy testing of the dosed cynomolgus monkeys over a span of at least 300 days after dosing.

[0949] 121. The composition for editing the PCSK9 gene of clause 88, wherein the composition when administered to a group of cynomolgus monkeys via intravenous infusion at a dose of approximately 0.5 mg of the guide RNA and mRNA combined total weight per kg of cynomolgus monkey weight is capable of reducing PCSK9 protein in the plasma of the dosed cynomolgus monkeys on average of at least 35 percent as compared to baseline.

[0950] 122. The composition for editing the PCSK9 gene of clause 88, wherein the composition when administered to a group of cynomolgus monkeys via intravenous infusion at a dose of approximately 0.5 mg of the guide RNA and mRNA combined total weight per kg of cynomolgus monkey weight is capable of reducing PCSK9 protein in the plasma of the dosed cynomolgus monkeys on average of at least 40 percent as compared to baseline.

[0951] 123. The composition for editing the PCSK9 gene of clause 88, wherein the composition when administered to a group of cynomolgus monkeys via intravenous infusion at a dose of approximately 0.5 mg of the guide RNA and mRNA combined total weight per kg of monkey weight is capable of reducing PCSK9 protein in the plasma of the dosed cynomolgus monkeys on average of at least 50 percent as compared to baseline.

[0952] 124. The composition for editing the PCSK9 gene of clause 88, wherein the composition when administered to a group of cynomolgus monkeys via intravenous infusion at a dose of approximately 0.5 mg of the guide RNA and mRNA combined total weight per kg of cynomolgus monkey weight is capable of reducing PCSK9 protein in the plasma of the dosed monkeys on average of at least 60 percent as compared to baseline.

[0953] 125. The composition for editing the PCSK9 gene of clause 88, wherein the composition when administered to a group of cynomolgus monkeys via intravenous infusion at a dose of approximately 0.5 mg of the guide RNA and mRNA combined total weight per kg of cynomolgus monkey weight is capable of reducing PCSK9 protein in the plasma of the dosed cynomolgus monkeys on average of at least 70 percent as compared to baseline.

[0954] 126. The composition for editing the PCSK9 gene of clause 88, wherein the composition when administered to a group of cynomolgus monkeys via intravenous infusion at a dose of approximately 0.5 mg of the guide RNA and mRNA combined total weight per kg of cynomolgus monkey weight is capable of reducing PCSK9 protein in the plasma of the dosed cynomolgus monkeys on average of at least 80 percent as compared to baseline.

[0955] 127. The composition for editing the PCSK9 gene of clause 88, wherein the composition when administered to a group of cynomolgus monkeys via intravenous infusion at a dose of approximately 1 mg of the guide RNA and mRNA combined total weight per kg of cynomolgus monkey weight is capable of reducing PCSK9 protein in the plasma of the dosed cynomolgus monkeys on average of at least 35 percent as compared to baseline.

[0956] 128. The composition for editing the PCSK9 gene of clause 88, wherein the composition when administered to a group of cynomolgus monkeys via intravenous infusion at a dose of approximately 1 mg of the guide RNA and mRNA combined total weight per kg of cynomolgus monkey weight is capable of reducing PCSK9 protein in the plasma of the dosed cynomolgus monkeys on average of at least 40 percent as compared to baseline.

[0957] 129. The composition for editing the PCSK9 gene of clause 88, wherein the composition when administered to a group of cynomolgus monkeys via intravenous infusion at a dose of approximately 1 mg of the guide RNA and mRNA combined total weight per kg of monkey weight is capable of reducing PCSK9 protein in the plasma of the dosed cynomolgus monkeys on average of at least 50 percent as compared to baseline.

[0958] 130. The composition for editing the PCSK9 gene of clause 88, wherein the composition when administered to a group of cynomolgus monkeys via intravenous infusion at a dose of approximately 1 mg of the guide RNA and mRNA combined total weight per kg of cynomolgus monkey weight is capable of reducing PCSK9 protein in the plasma of the dosed cynomolgus monkeys on average of at least 60 percent as compared to baseline.

[0959] 131. The composition for editing the PCSK9 gene of clause 88, wherein the composition when administered to a group of cynomolgus monkeys via intravenous infusion at a dose of approximately 1 mg of the guide RNA and mRNA combined total weight per kg of cynomolgus monkey weight is capable of reducing PCSK9 protein in the plasma of the dosed cynomolgus monkeys on average of at least 70 percent as compared to baseline.

[0960] 132. The composition for editing the PCSK9 gene of clause 88, wherein the composition when administered to a group of cynomolgus monkeys via intravenous infusion at a dose of approximately 1 mg of the guide RNA and mRNA combined total weight per kg of cynomolgus monkey weight is capable of reducing PCSK9 protein in the plasma of the dosed cynomolgus monkeys on average of at least 80 percent as compared to baseline.

[0961] 133. The composition for editing the PCSK9 gene of clause 88, wherein the composition when administered to a group of cynomolgus monkeys via intravenous infusion at a dose of approximately 1.5 mg of the guide RNA and mRNA combined total weight per kg of cynomolgus monkey weight is capable of reducing PCSK9 protein in the plasma of the dosed cynomolgus monkeys on average of at least 35 percent as compared to baseline.

[0962] 134. The composition for editing the PCSK9 gene of clause 88, wherein the composition when administered to a group of cynomolgus monkeys via intravenous infusion at a dose of approximately 1.5 mg of the guide RNA and mRNA combined total weight per kg of cynomolgus monkey weight is capable of reducing PCSK9 protein in the plasma of the dosed cynomolgus monkeys on average of at least 40 percent as compared to baseline.

[0963] 135. The composition for editing the PCSK9 gene of clause 88, wherein the composition when administered to a group of cynomolgus monkeys via intravenous infusion at a dose of approximately 1.5 mg of the guide RNA and mRNA combined total weight per kg of cynomolgus monkey weight is capable of reducing PCSK9 protein in the plasma of the dosed cynomolgus monkeys on average of at least 50 percent as compared to baseline.

[0964] 136. The composition for editing the PCSK9 gene of clause 88, wherein the composition when administered to a group of cynomolgus monkeys via intravenous infusion at a dose of approximately 1.5 mg of the guide RNA and mRNA combined total weight per kg of cynomolgus monkey weight is capable of reducing PCSK9 protein in the plasma of the dosed cynomolgus monkeys on average of at least 60 percent as compared to baseline.

[0965] 137. The composition for editing the PCSK9 gene of clause 88, wherein the composition when administered to a group of cynomolgus monkeys via intravenous infusion at a dose of approximately 1.5 mg of the guide RNA and mRNA combined total weight per kg of cynomolgus monkey weight is capable of reducing PCSK9 protein in the plasma of the dosed cynomolgus monkeys on average of at least 70 percent as compared to baseline.

[0966] 138. The composition for editing the PCSK9 gene of clause 88, wherein the composition when administered to a group of cynomolgus monkeys via intravenous infusion at a dose of approximately 1.5 mg of the guide RNA and mRNA combined total weight per kg of cynomolgus monkey weight is capable of reducing PCSK9 protein in the plasma of the dosed cynomolgus monkeys on average of at least 80 percent as compared to baseline.

[0967] 139. The composition for editing the PCSK9 gene of clause 88, wherein the composition when administered to a group of cynomolgus monkeys via intravenous infusion at a dose of approximately 3 mg of the guide RNA and mRNA combined total weight per kg of cynomolgus monkey weight is capable of reducing PCSK9 protein in the plasma of the dosed cynomolgus monkeys on average of at least 35 percent as compared to baseline.

[0968] 140. The composition for editing the PCSK9 gene of clause 88, wherein the composition when administered to a group of cynomolgus monkeys via intravenous infusion at a dose of approximately 3 mg of the guide RNA and mRNA combined total weight per kg of cynomolgus monkey weight is capable of reducing PCSK9 protein in the plasma of the dosed cynomolgus monkeys on average of at least 40 percent as compared to baseline.

[0969] 141. The composition for editing the PCSK9 gene of clause 88, wherein the composition when administered to a group of cynomolgus monkeys via intravenous infusion at a dose of approximately 3 mg of the guide RNA and mRNA combined total weight per kg of cynomolgus monkey weight is capable of reducing PCSK9 protein in the plasma of the dosed cynomolgus monkeys on average of at least 50 percent as compared to baseline.

[0970] 142. The composition for editing the PCSK9 gene of clause 88, wherein the composition when administered to a group of cynomolgus monkeys via intravenous infusion at a dose of approximately 3 mg of the guide RNA and mRNA combined total weight per kg of cynomolgus monkey weight is capable of reducing PCSK9 protein in the plasma of the dosed cynomolgus monkeys on average of at least 60 percent as compared to baseline.

[0971] 143. The composition for editing the PCSK9 gene of clause 88, wherein the composition when administered to a group of cynomolgus monkeys via intravenous infusion at a dose of approximately 3 mg of the guide RNA and mRNA combined total weight per kg of cynomolgus monkey weight is capable of reducing PCSK9 protein in the plasma of the dosed cynomolgus monkeys on average of at least 70 percent as compared to baseline.

[0972] 144. The composition for editing the PCSK9 gene of clause 88, wherein the composition when administered to a group of cynomolgus monkeys via intravenous infusion at a dose of approximately 3 mg of the guide RNA and mRNA combined total weight per kg of cynomolgus monkey weight is capable of reducing PCSK9 protein in the plasma of the dosed cynomolgus monkeys on average of at least 80 percent as compared to baseline.

[0973] 145. The compositions for editing of the PCSK9 gene of clauses 121-144, wherein the reduction in plasma protein is determined at 15 days after dosing via blood sampling and analysis of the dosed cynomolgus monkey.

[0974] 146. The composition for editing the PCSK9 gene of clause 88, wherein the composition when administered to a group of cynomolgus monkeys via intravenous infusion at a dose of approximately 0.5 mg of the guide RNA and mRNA combined total weight per kg of monkey weight is capable of reducing LDL-C in the plasma of the dosed monkeys on average of at least 20 percent as compared to baseline.

[0975] 147. The composition for editing the PCSK9 gene of clause 88, wherein the composition when administered to a group of cynomolgus monkeys via intravenous infusion at a dose of approximately 0.5 mg of the guide RNA and mRNA combined total weight per kg of cynomolgus monkey weight is capable of reducing LDL-C in the plasma of the dosed cynomolgus monkeys on average of at least 25 percent as compared to baseline.

[0976] 148. The composition for editing the PCSK9 gene of clause 88, wherein the composition when administered to a group of cynomolgus monkeys via intravenous infusion at a dose of approximately 0.5 mg of the guide RNA and mRNA combined total weight per kg of cynomolgus monkey weight is capable of reducing LDL-C in the plasma of the dosed cynomolgus monkeys on average of at least 30 percent as compared to baseline.

[0977] 149. The composition for editing the PCSK9 gene of clause 88, wherein the composition when administered to a group of cynomolgus monkeys via intravenous infusion at a dose of approximately 0.5 mg of the guide RNA and mRNA combined total weight per kg of cynomolgus monkey weight is capable of reducing LDL-C in the plasma of the dosed cynomolgus monkeys on average of at least 35 percent as compared to baseline.

[0978] 150. The composition for editing the PCSK9 gene of clause 88, wherein the composition when administered to a group of cynomolgus monkeys via intravenous infusion at a dose of approximately 0.5 mg of the guide RNA and mRNA combined total weight per kg of cynomolgus monkey weight is capable of reducing LDL-C in the plasma of the dosed cynomolgus monkeys on average of at least 40 percent as compared to baseline.

[0979] 151. The composition for editing the PCSK9 gene of clause 88, wherein the composition when administered to a group of cynomolgus monkeys via intravenous infusion at a dose of approximately 0.5 mg of the guide RNA and mRNA combined total weight per kg of cynomolgus monkey weight is capable of reducing LDL-C in the plasma of the dosed cynomolgus monkeys on average of at least 45 percent as compared to baseline.

[0980] 152. The composition for editing the PCSK9 gene of clause 88, wherein the composition when administered to a group of cynomolgus monkeys via intravenous infusion at a dose of approximately 1 mg of the guide RNA and mRNA combined total weight per kg of cynomolgus monkey weight is capable of reducing LDL-C in the plasma of the dosed cynomolgus monkeys on average of at least 20 percent as compared to baseline.

[0981] 153. The composition for editing the PCSK9 gene of clause 88, wherein the composition when administered to a group of cynomolgus monkeys via intravenous infusion at a dose of approximately 1 mg of the guide RNA and mRNA combined total weight per kg of cynomolgus monkey weight is capable of reducing LDL-C in the plasma of the dosed cynomolgus monkeys on average of at least 25 percent as compared to baseline.

[0982] 154. The composition for editing the PCSK9 gene of clause 88, wherein the composition when administered to a group of cynomolgus monkeys via intravenous infusion at a dose of approximately 1 mg of the guide RNA and mRNA combined total weight per kg of cynomolgus monkey weight is capable of reducing LDL-C in the plasma of the dosed cynomolgus monkeys on average of at least 30 percent as compared to baseline.

[0983] 155. The composition for editing the PCSK9 gene of clause 88, wherein the composition when administered to a group of cynomolgus monkeys via intravenous infusion at a dose of approximately 1 mg of the guide RNA and mRNA combined total weight per kg of cynomolgus monkey weight is capable of reducing LDL-C in the plasma of the dosed cynomolgus monkeys on average of at least 35 percent as compared to baseline.

[0984] 156. The composition for editing the PCSK9 gene of clause 88, wherein the composition when administered to a group of cynomolgus monkeys via intravenous infusion at a dose of approximately 1 mg of the guide RNA and mRNA combined total weight per kg of cynomolgus monkey weight is capable of reducing LDL-C in the plasma of the dosed cynomolgus monkeys on average of at least 40 percent as compared to baseline.

[0985] 157. The composition for editing the PCSK9 gene of clause 88, wherein the composition when administered to a group of cynomolgus monkeys via intravenous infusion at a dose of approximately 1 mg of the guide RNA and mRNA combined total weight per kg of cynomolgus monkey weight is capable of reducing LDL-C in the plasma of the dosed cynomolgus monkeys on average of at least 45 percent as compared to baseline.

[0986] 158. The composition for editing the PCSK9 gene of clause 88, wherein the composition when administered to a group of cynomolgus monkeys via intravenous infusion at a dose of approximately 1 mg of the guide RNA and mRNA combined total weight per kg of cynomolgus monkey weight is capable of reducing LDL-C in the plasma of the dosed cynomolgus monkeys on average of at least 50 percent as compared to baseline.

[0987] 159. The composition for editing the PCSK9 gene of clause 88, wherein the composition when administered to a group of cynomolgus monkeys via intravenous infusion at a dose of approximately 1 mg of the guide RNA and mRNA combined total weight per kg of cynomolgus monkey weight is capable of reducing LDL-C in the plasma of the dosed cynomolgus monkeys on average of at least 55 percent as compared to baseline.

[0988] 160. The composition for editing the PCSK9 gene of clause 88, wherein the composition when administered to a group of cynomolgus monkeys via intravenous infusion at a dose of approximately 1 mg of the guide RNA and mRNA combined total weight per kg of cynomolgus monkey weight is capable of reducing LDL-C in the plasma of the dosed cynomolgus monkeys on average of at least 60 percent as compared to baseline.

[0989] 161. The composition for editing the PCSK9 gene of clause 88, wherein the composition when administered to a group of cynomolgus monkeys via intravenous infusion at a dose of approximately 1.5 mg of the guide RNA and mRNA combined total weight per kg of cynomolgus monkey weight is capable of reducing LDL-C in the plasma of the dosed cynomolgus monkeys on average of at least 20 percent as compared to baseline.

[0990] 162. The composition for editing the PCSK9 gene of clause 88, wherein the composition when administered to a group of cynomolgus monkeys via intravenous infusion at a dose of approximately 1.5 mg of the guide RNA and mRNA combined total weight per kg of cynomolgus monkey weight is capable of reducing LDL-C in the plasma of the dosed cynomolgus monkeys on average of at least 25 percent as compared to baseline.

[0991] 163. The composition for editing the PCSK9 gene of clause 88, wherein the composition when administered to a group of cynomolgus monkeys via intravenous infusion at a dose of approximately 1.5 mg of the guide RNA and mRNA combined total weight per kg of cynomolgus monkey weight is capable of reducing LDL-C in the plasma of the dosed cynomolgus monkeys on average of at least 30 percent as compared to baseline.

[0992] 164. The composition for editing the PCSK9 gene of clause 88, wherein the composition when administered to a group of cynomolgus monkeys via intravenous infusion at a dose of approximately 1.5 mg of the guide RNA and mRNA combined total weight per kg of cynomolgus monkey weight is capable of reducing LDL-C in the plasma of the dosed cynomolgus monkeys on average of at least 35 percent as compared to baseline.

[0993] 165. The composition for editing the PCSK9 gene of clause 88, wherein the composition when administered to a group of cynomolgus monkeys via intravenous infusion at a dose of approximately 1.5 mg of the guide RNA and mRNA combined total weight per kg of cynomolgus monkey weight is capable of reducing LDL-C in the plasma of the dosed cynomolgus monkeys on average of at least 40 percent as compared to baseline.

[0994] 166. The composition for editing the PCSK9 gene of clause 88, wherein the composition when administered to a group of cynomolgus monkeys via intravenous infusion at a dose of approximately 1.5 mg of the guide RNA and mRNA combined total weight per kg of cynomolgus monkey weight is capable of reducing LDL-C in the plasma of the dosed cynomolgus monkeys on average of at least 45 percent as compared to baseline.

[0995] 167. The composition for editing the PCSK9 gene of clause 88, wherein the composition when administered to a group of cynomolgus monkeys via intravenous infusion at a dose of approximately 1.5 mg of the guide RNA and mRNA combined total weight per kg of cynomolgus monkey weight is capable of reducing LDL-C in the plasma of the dosed cynomolgus monkeys on average of at least 50 percent as compared to baseline.

[0996] 168. The composition for editing the PCSK9 gene of clause 88, wherein the composition when administered to a group of cynomolgus monkeys via intravenous infusion at a dose of approximately 1.5 mg of the guide RNA and mRNA combined total weight per kg of cynomolgus monkey weight is capable of reducing LDL-C in the plasma of the dosed cynomolgus monkeys on average of at least 55 percent as compared to baseline.

[0997] 169. The composition for editing the PCSK9 gene of clause 88, wherein the composition when administered to a group of cynomolgus monkeys via intravenous infusion at a dose of approximately 1.5 mg of the guide RNA and mRNA combined total weight per kg of cynomolgus monkey weight is capable of reducing LDL-C in the plasma of the dosed cynomolgus monkeys on average of at least 60 percent as compared to baseline.

[0998] 170. The composition for editing the PCSK9 gene of clause 88, wherein the composition when administered to a group of cynomolgus monkeys via intravenous infusion at a dose of approximately 1.5 mg of the guide RNA and mRNA combined total weight per kg of cynomolgus monkey weight is capable of reducing LDL-C in the plasma of the dosed cynomolgus monkeys on average of at least 65 percent as compared to baseline.

[0999] 171. The composition for editing the PCSK9 gene of clause 88, wherein the composition when administered to a group of cynomolgus monkeys via intravenous infusion at a dose of approximately 3 mg of the guide RNA and mRNA combined total weight per kg of cynomolgus monkey weight is capable of reducing LDL-C in the plasma of the dosed cynomolgus monkeys on average of at least 20 percent as compared to baseline.

[1000] 172. The composition for editing the PCSK9 gene of clause 88, wherein the composition when administered to a group of cynomolgus monkeys via intravenous infusion at a dose of approximately 3 mg of the guide RNA and mRNA combined total weight per kg of cynomolgus monkey weight is capable of reducing LDL-C in the plasma of the dosed cynomolgus monkeys on average of at least 25 percent as compared to baseline.

[1001] 173. The composition for editing the PCSK9 gene of clause 88, wherein the composition when administered to a group of cynomolgus monkeys via intravenous infusion at a dose of approximately 3 mg of the guide RNA and mRNA combined total weight per kg of cynomolgus monkey weight is capable of reducing LDL-C in the plasma of the dosed cynomolgus monkeys on average of at least 30 percent as compared to baseline.

[1002] 174. The composition for editing the PCSK9 gene of clause 88, wherein the composition when administered to a group of cynomolgus monkeys via intravenous infusion at a dose of approximately 3 mg of the guide RNA and mRNA combined total weight per kg of cynomolgus monkey weight is capable of reducing LDL-C in the plasma of the dosed cynomolgus monkeys on average of at least 35 percent as compared to baseline.

[1003] 175. The composition for editing the PCSK9 gene of clause 88, wherein the composition when administered to a group of cynomolgus monkeys via intravenous infusion at a dose of approximately 3 mg of the guide RNA and mRNA combined total weight per kg of cynomolgus monkey weight is capable of reducing LDL-C in the plasma of the dosed cynomolgus monkeys on average of at least 40 percent as compared to baseline.

[1004] 176. The composition for editing the PCSK9 gene of clause 88, wherein the composition when administered to a group of cynomolgus monkeys via intravenous infusion at a dose of approximately 3 mg of the guide RNA and mRNA combined total weight per kg of cynomolgus monkey weight is capable of reducing LDL-C in the plasma of the dosed cynomolgus monkeys on average of at least 45 percent as compared to baseline.

[1005] 177. The composition for editing the PCSK9 gene of clause 88, wherein the composition when administered to a group of cynomolgus monkeys via intravenous infusion at a dose of approximately 3 mg of the guide RNA and mRNA combined total weight per kg of cynomolgus monkey weight is capable of reducing LDL-C in the plasma of the dosed cynomolgus monkeys on average of at least 50 percent as compared to baseline.

[1006] 178. The composition for editing the PCSK9 gene of clause 88, wherein the composition when administered to a group of cynomolgus monkeys via intravenous infusion at a dose of approximately 3 mg of the guide RNA and mRNA combined total weight per kg of cynomolgus monkey weight is capable of reducing LDL-C in the plasma of the dosed cynomolgus monkeys on average of at least 55 percent as compared to baseline.

[1007] 179. The composition for editing the PCSK9 gene of clause 88, wherein the composition when administered to a group of cynomolgus monkeys via intravenous infusion at a dose of approximately 3 mg of the guide RNA and mRNA combined total weight per kg of cynomolgus monkey weight is capable of reducing LDL-C in the plasma of the dosed cynomolgus monkeys on average of at least 60 percent as compared to baseline.

[1008] 180. The composition for editing the PCSK9 gene of clause 88, wherein the composition when administered to a group of cynomolgus monkeys via intravenous infusion at a dose of approximately 3 mg of the guide RNA and mRNA combined total weight per kg of cynomolgus monkey weight is capable of reducing LDL-C in the plasma of the dosed cynomolgus monkeys on average of at least 65 percent as compared to baseline.

[1009] 181. The compositions for editing the PCSK9 gene of clauses 148-182, wherein the reduction in LDL-C is determined at 15 days after dosing via blood sampling and analysis of the dosed cynomolgus monkey.

[1010] 182. The compositions for editing the PCSK9 gene of clauses 148-182, wherein the reduction in LDL-C is determined to be durably maintained over a span of at least 168 days by periodic blood sampling and analysis of the dosed cynomolgus monkey.

[1011] 183. The compositions for editing the PCSK9 gene of clauses 148-182, wherein the reduction in LDL-C is determined to be durably maintained over a span of at least 300 days by periodic blood sampling and analysis of the dosed cynomolgus monkey.

[1012] 184. The composition for editing the PCSK9 gene of clause 88, wherein the composition when administered to a group of cynomolgus monkeys via intravenous infusion at a dose of approximately 3 mg of the guide RNA and mRNA combined total weight per kg of cynomolgus monkey weight is capable of reducing lipoprotein(a) in the plasma of the dosed cynomolgus monkeys on average of at least 10 percent as compared to baseline.

[1013] 185. The composition for editing the PCSK9 gene of clause 88, wherein the composition when administered to a group of cynomolgus monkeys via intravenous infusion at a dose of approximately 3 mg of the guide RNA and mRNA combined total weight per kg of cynomolgus monkey weight is capable of reducing lipoprotein(a) level in the plasma of the dosed cynomolgus monkeys on average of at least 15 percent as compared to baseline.

[1014] 186. The composition for editing the PCSK9 gene of clause 88, wherein the composition when administered to a group of cynomolgus monkeys via intravenous infusion at a dose of approximately 3 mg of the guide RNA and mRNA combined total weight per kg of cynomolgus monkey weight is capable of reducing lipoprotein(a) level in the plasma of the dosed cynomolgus monkeys on average of at least 20 percent as compared to baseline.

[1015] 187. The composition for editing the PCSK9 gene of clause 88, wherein the composition when administered to a group of cynomolgus monkeys via intravenous infusion at a dose of approximately 3 mg of the guide RNA and mRNA combined total weight per kg of cynomolgus monkey weight is capable of reducing lipoprotein(a) level in the plasma of the dosed cynomolgus monkeys on average of at least 25 percent as compared to baseline.

[1016] 188. The composition for editing the PCSK9 gene of clause 88, wherein the composition when administered to a group of cynomolgus monkeys via intravenous infusion at a dose of approximately 3 mg of the guide RNA and mRNA combined total weight per kg of cynomolgus monkey weight is capable of reducing lipoprotein(a) level in the plasma of the dosed cynomolgus monkeys on average of at least 30 percent as compared to baseline.

[1017] 189. The composition for editing the PCSK9 gene of clause 88, wherein the composition when administered to a group of cynomolgus monkeys via intravenous infusion at a dose of approximately 3 mg of the guide RNA and mRNA combined total weight per kg of cynomolgus monkey weight is capable of reducing lipoprotein(a) level in the plasma of the dosed cynomolgus monkeys on average of approximately 35 percent as compared to baseline.

[1018] 190. The compositions for editing the PCSK9 gene of clauses 186-191, wherein the reduction in lipoprotein(a) is determined at 15 days after dosing via blood sampling and analysis of the dosed cynomolgus monkey.

[1019] 191. The compositions for editing the PCSK9 gene of clauses 186-191, wherein the reduction in lipoprotein(a) is determined to be durably maintained over a span of at least 224 days by periodic blood sampling and analysis of the dosed cynomolgus monkey.

[1020] 192. The compositions for editing the PCSK9 gene of clauses 186-191, wherein the reduction in lipoprotein(a) is determined to be durably maintained over a span of at least 300 days by periodic blood sampling and analysis of the dosed cynomolgus monkey.

[1021] 193. The compositions for editing the PCSK9 gene of clauses 101-194, wherein to the extent that the dosing of the cynomolgus monkeys results in elevation of AST, ALT, or Cytokines, the elevations resulting from the dosing of the composition are transient and resolved back to approximately baseline levels within 3-15 days after dosing.

[1022] 194. The composition for editing the PCSK9 gene of clauses 101-103, 121-126, 148-153, wherein the percent editing of PCSK9 is negligible outside of the liver, spleen and adrenal glands tissues as illustrated in FIG. 27.

[1023] 195. The compositions for editing the PCSK9 gene of clauses 101-107, 121-132, 148-162, wherein repeat dosing results is additive with respect to the editing percentage of PCSK9 editing percentage.

[1024] 196. The compositions for editing the PCSK9 gene of clause 195, wherein the repeat dosing does not elicit cytokine activation nor an immune response.

[1025] 197. The composition for editing the PCSK9 gene of clause 88, wherein the spacer sequence has at least 80% nucleotide correlation with the nucleotide sequence of a targeted protospacer on the PCSK9 gene, wherein an RNA nucleotide on the spacer sequence is in correlation with a DNA nucleotide of the protospacer if it has the same nucleotide as the DNA nucleotide in the same order and wherein uracil and thymine bases are considered the same nucleotide for purposes of determining correlation.

[1026] 198. The composition for editing the PCSK9 gene of clause 197, wherein the spacer sequence has at least 85% nucleotide correlation with the nucleotide sequence of a targeted protospacer on the PCSK9 gene.

[1027] 199. The composition for editing the PCSK9 gene of clause 197, wherein the spacer sequence has at least 90% nucleotide correlation with the nucleotide sequence of a targeted protospacer on the PCSK9 gene.

[1028] 200. The composition for editing the PCSK9 gene of clause 197, wherein the spacer sequence has at least 95% nucleotide correlation with the nucleotide sequence of a targeted protospacer on the PCSK9 gene.

[1029] 201. The composition for editing the PCSK9 gene of clause 197, wherein the spacer sequence has at least 99% nucleotide correlation with the nucleotide sequence of a targeted protospacer on the PCSK9 gene.

[1030] 202. The composition for editing the PCSK9 gene of clause 197, wherein the spacer sequence has at least 100% nucleotide correlation with the nucleotide sequence of a targeted protospacer on the PCSK9 gene.

[1031] 203. A method for treating or preventing an atherosclerotic cardiovascular disease in a subject in need thereof, the method comprising administering to the subject a therapeutically effective amount of
[1032] (a) a mRNA encoding an adenine base editor protein having an editing window,
[1033] (b) a first guide RNA comprising a tracr sequence that serves as a binding scaffold for the base editor protein and a spacer sequence that serves to guide the base editor protein to a protospacer sequence on a PCSK9 gene, wherein the spacer sequence is complimentary, at least in part, to a splice site or an exon region of the PCSK9 gene; and
[1034] (c) a second guide RNA comprising a tracr sequence that serves as a binding scaffold for the base editor protein and a spacer sequence that serves to guide the base editor protein to a protospacer sequence on a ANGPTL3 gene, wherein the spacer sequence is complimentary, at least in part, to a splice site or an exon region of the ANGPTL3 gene.

[1035] 204. The method of clause 203, further comprising a first LNP enclosing (a).

[1036] 205. The method of clause 204, wherein the first LNP encloses (b) and (c).

[1037] 206. The method of clause 204, wherein the first LNP was administered repeatedly.

[1038] 207. The method of clause 204, wherein the first LNP was administered repeatedly at an interval of one to sixty days.

[1039] 208. The method of clause 204, wherein the first LNP was administered repeatedly at an interval of seven days.

[1040] 209. The method of clause 204, wherein the first LNP further encloses (b).

[1041] 210. The method of clause 209, further comprising a second LNP enclosing (a) and (c).

[1042] 211. The method of clause 210, wherein the first LNP and the second LNP are administered sequentially.

[1043] 212. The method of clause 211, wherein the first LNP and the second LNP are administered sequentially at an interval of one day to 12 months.

[1044] 213. The method of clause 212, wherein the interval is one day.

[1045] 214. The method of clause 212, wherein the interval is five days.

[1046] 215. The method of clause 212, wherein the interval is ten days.

[1047] 216. The method of clause 212, wherein the interval is fifteen days.

[1048] 217. The method of clause 212, wherein the interval is twenty days.

[1049] 218. The method of clause 212, wherein the interval is twenty-five days.

[1050] 219. The method of clause 212, wherein the interval is one month.

[1051] 220. The method of clause 212, wherein the interval is two months.

[1052] 221. The method of clause 212, wherein the interval is three months.

[1053] 222. The method of clause 212, wherein the interval is five months.

[1054] 223. The method of clause 212, wherein the interval is eight months.

[1055] 224. The method of clause 212, wherein the interval is ten months.

[1056] 225. The method of clause 212, wherein the interval is twelve months.

[1057] Following is the second example of enumerated clauses:

[1058] 1. A single guide RNA that comprises: (a) a spacer sequence, wherein the spacer sequence comprises (i) one or more chemical modification(s) and (ii) one or more unmodified nucleotide(s) at select position(s), and (b) a tracr sequence having at least 70% identity to SEQ ID NO: 61, wherein the tracr sequence serve as a binding scaffold for a Type II Cas protein, and wherein the tracr sequence comprises (i) one or more chemical modification(s) and (ii) one or more unmodified nucleotide(s) at select position(s).

[1059] 2. The single guide RNA of clause 1, wherein the spacer sequence hybridizes with a target polynucleotide sequence in a gene of interest when contacted with the target polynucleotide sequence, wherein the single guide RNA directs the Cas protein to effect alteration in the gene when administered to a mammalian subject.

[1060] 3. The single guide RNA of clause 1 or 2, wherein the tracr sequence comprises unmodified nucleotides at positions 2 to 7, 23 to 25, 27, 29, 31, 38, 39, 42 to 45 48, 49 and 62 as numbered in SEQ ID NO: 61 or a corresponding position thereof.

[1061] 4. The single guide RNA of clause 1 or 2, wherein the tracr sequence comprises unmodified nucleotides at positions 2 to 7, 13, 23 to 25, 27, 29, 31, 38, 39, 42 to 45, 48, 49, 53 and 62 as numbered in SEQ ID NO: 61 or a corresponding position thereof.

[1062] 5. The single guide RNA of clause 1 or 2, wherein the tracr sequence comprises unmodified nucleotides at positions 2 to 7, 13, 23 to 25, 27, 29, 31, 38, 39, 42 to 45, 48, 49, 53, 61, 68, 70 and 11 as numbered in SEQ ID NO: 61 or a corresponding position thereof.

[1063] 6. The single guide RNA of any one of clauses 1 to 3, wherein the tracr sequence comprises modified nucleotides at positions 1, 8 to 22, 26, 28, 30, 32 to 37, 40, 41, 46, 47, 50 to 61, and 63 to 80 as numbered in SEQ ID NO: 61 or a corresponding position thereof.

[1064] 7. The single guide RNA of any one of clauses 1 to 3, wherein the tracr sequence comprises modified nucleotides at positions 1, 8 to 12, 14 to 22, 26, 28, 30, 32 to 37, 40, 41, 46, 47, 50 to 52, 54 to 61, and 63 to 80 as numbered in SEQ ID NO: 61 or a corresponding position thereof.

[1065] 8. The single guide RNA of any one of clauses 1 to 7, wherein the tracr sequence comprises modified nucleotides at positions 1, 8 to 12, 14 to 22, 26, 28, 30, 32 to 34, 37, 41, 46, 47, 50 to 52, 54 to 60, 62 to 67, 69 and 72 to 80 as numbered in SEQ ID NO: 61 or a corresponding position thereof.

[1066] 9. The single guide RNA of any one of clauses 3 to 8, wherein more than 60% of the nucleotides in the tracr sequence with SEQ ID NO: 61 are modified.

[1067] 10. The single guide RNA of clauses 9, wherein more than 70% of the nucleotides in the tracr sequence with SEQ ID NO: 61 are modified.

[1068] 11. The single guide RNA of any one of clauses 1 to 10, wherein the tracr sequence comprises unmodified nucleotides at positions 13, 49, 53 and 62 as numbered in SEQ ID NO: 61 or a corresponding position thereof.

[1069] 12. The single guide RNA of any one of clauses 11, wherein the tracr sequence comprises unmodified nucleotides at positions 49 and 62 as numbered in SEQ ID NO: 61 or a corresponding position thereof.

[1070] 13. The single guide RNA of any one of clauses 1 to 10, wherein the tracr sequence comprises unmodified nucleotides at positions 13, 40, 49, 53, 61, 68, 70 and 71 as numbered in SEQ ID NO: 61 or a corresponding position thereof.

[1071] 14. The single guide RNA of any one of clause 13, wherein the tracr sequence comprises unmodified nucleotides at positions 13, 49 and 53 as numbered in SEQ ID NO: 61 or a corresponding position thereof.

[1072] 15. The single guide RNA of any one of clauses 1 to 10, wherein the tracr sequence comprises modified nucleotides at positions 1, 8, 21, 22, 26, 28, 30, 32 to 37, 40, 41, 46 and 47 as numbered in SEQ ID NO: 61 or a corresponding position thereof.

[1073] 16. The single guide RNA of any one of clauses 1-15, wherein the tracr sequence comprises at least 80% identity to SEQ ID NO: 61.

[1074] 17. The single guide RNA of any one of clauses 1-15, wherein the tracr sequence comprises at least 90% identity to SEQ ID NO: 61.

[1075] 18. The single guide RNA of any one of clauses 1-17, wherein the chemical modification comprises a 2′-OMe modification.

[1076] 19. The single guide RNA of any one of clauses 1-17, wherein the chemical modification comprises a nebularin or a deoxynebularin.

[1077] 20. The single guide RNA of any one of clauses 1-17, wherein the chemical modification comprises a phosphorothioate linkage.

[1078] 21. The single guide RNA of any one of clauses 1-20, wherein the tracr sequence comprises SEQ ID No. 61, and wherein the single guide RNA further comprises one or more phosphorothioate linkage at a 5′ end, at a 3′ end, at select internal positions or any combinations thereof.

[1079] 22. The single guide RNA of clause 21, wherein the single guide RNA further comprises two and no more than two contiguous phosphorothioate linkages at the 5′ end, at the 3′ end or both.

[1080] 23. The single guide RNA of clause 21, wherein the single guide RNA further comprises three contiguous phosphorothioate linkages at the 5′ end, at the 3′ end or both.

[1081] 24. The single guide RNA of any one of clauses 1-21, wherein the single guide RNA comprises the sequence 5′-ususuNNN-3′ at the 3′end, wherein N independently indicates a unmodified ribonucleotide, and wherein each u indicates 2′-O-methyluridine and each s indicates phosphorothioate linkage.

[1082] 25. The single guide RNA of clauses 24, wherein each N is uridine.

[1083] 26. The single guide RNA of any one of clauses 1-21, wherein the single guide RNA comprises the sequence 5′-ususuNNn-3′ at the 3′end, wherein each N independently indicates a unmodified ribonucleotide, wherein the n indicates a modified nucleotide, wherein each u indicates 2′-O-methyluridine and wherein each s indicates phosphorothioate linkage.

[1084] 27. The single guide RNA of clauses 26, wherein each N is uridine and the n is 2′-O-methyluridine.

[1085] 28. A single guide RNA that comprises (i) a spacer sequence and (ii) a tracr sequence, wherein the spacer sequence hybridizes with a target polynucleotide sequence in a PCSK9 gene or an ANGPTL3 gene when contacted with the target polynucleotide sequence, wherein the tracr sequence binds a Type II Cas protein when contacted with the Type II Cas protein, and wherein the single guide RNA comprises a nebularine, a deoxynebularine, or a 2′-O-methylnebularine.

[1086] 29. A single guide RNA that comprises (i) a spacer sequence and (ii) a tracr sequence, wherein the spacer sequence hybridizes with a target polynucleotide sequence in a PCSK9 gene or an ANGPTL3 gene when contacted with the target polynucleotide sequence, wherein the tracr sequence binds a Type II Cas protein when contacted with the Type II Cas protein, and wherein the single guide RNA comprises two and no more than two phosphorothioate linkages at a 5′ end or at a 3′ end.

[1087] 30. The single guide RNA of clause 29, wherein the single guide RNA comprises two and no more than two phosphorothioate linkages at the 5′ end and at the 3′ end.

[1088] 31. The single guide RNA of clause 29, wherein the single guide RNA comprises three phosphorothioate linkages at the 5′ end.

[1089] 32. The single guide RNA of clause 29, wherein the single guide RNA comprises three phosphorothioate linkages at the 3′ end.

[1090] 33. The single guide RNA of clause 29, wherein the two phosphorothioate linkages at the 5′ end are two contiguous phosphorothioate linkages at the first two nucleotide positions of the 5′ end.

[1091] 34. The single guide RNA of clause 29, wherein the two phosphorothioate linkages at the 5′ end are within the first 3-10 nucleotides of the 5′ end.

[1092] 35. The single guide RNA of clause 29, wherein the two phosphorothioate linkages at the 3′ end are two contiguous phosphorothioate linkages at the last two nucleotide positions of the 3′ end.

[1093] 36. The single guide RNA of clause 29, wherein the two phosphorothioate linkages at the 3′ end are within the last 3-10 nucleotides of the 3′ end.

[1094] 37. The single guide RNA of clause 29 comprising the sequence 5′-UsUsUs-3′ at the 3′ end, wherein U indicates a uridine and s indicates a phosphorothioate linkage.

[1095] 38. The single guide RNA of clause 29 comprising the sequence 5′-UUU-3′ at the 3′end.

[1096] 39. The single guide RNA of any one of clauses 1-27, wherein the tracr sequence binds the Type II Cas protein with increased binding affinity compared to a tracr sequence in an unmodified single guide RNA.

[1097] 40. The single guide RNA of any one of clauses 28-38, wherein the Type II Cas protein is a Cas9 protein.

[1098] 41. The single guide RNA of clause 40, wherein the Cas9 protein is a Streptococcus pyogenes Cas9.

[1099] 42. A single guide RNA that comprises a guide RNA sequence selected from Table 1, wherein a, u, g, and c indicate 2′-OMe modified adenine, uridine, guanine, and cytidine, wherein s indicates a phosphorothioate linkage, wherein X indicates a nebularine, wherein x indicates a 2′-O-methylnebularine and wherein dX indicates a 2′-deoxynebularine.

[1100] 43. A pharmaceutical composition for gene modification comprising the single guide RNA of any one of clauses 1-42 and a Type II Cas protein or a nucleic acid sequence encoding the Type II Cas protein.

[1101] 44. The pharmaceutical composition of clause 43 further comprising a vector that comprises the nucleic acid sequence encoding the Type II Cas protein.

[1102] 45. The pharmaceutical composition of clause 43 or 44, wherein the Type II Cas protein is a Cas9.

[1103] 46. The pharmaceutical composition of any one of clauses 43-45 further comprising a pharmaceutically acceptable carrier.

[1104] 47. A lipid nanoparticle comprising the pharmaceutical composition of any one of clauses 43-46.

[1105] 48. A method for modifying a target polynucleotide sequence in a cell comprising introducing into the cell the pharmaceutical composition of any one of clauses 43-46, wherein the single guide RNA directs the Type II Cas protein to effect a modification in the target polynucleotide sequence in the cell.

[1106] 49. The method of clause 48, wherein the target polynucleotide sequence is in a PCSK9 gene.

[1107] 50. The method of clause 49, wherein the modification reduces expression of functional PCSK9 protein encoded by the PCSK9 gene in the cell.

[1108] 51. The method of clause 50, wherein the target polynucleotide sequence is in an ANGPTL3 gene.

[1109] 52. The method of clause 51 wherein the modification reduces expression of functional ANGPTL3 protein encoded by the ANGPTL3 gene in the cell.

[1110] 53. The method of any one of clauses 48-52, wherein the introduction is performed via a lipid nanoparticle that comprises the composition.

[1111] 54. A method for treating or preventing a condition in a subject in need thereof, the method comprising administering to the subject the pharmaceutical composition of any one of clauses 43-46 or the lipid nanoparticle of clause 47, wherein the single guide RNA directs the Type II Cas protein to effect a modification in a target polynucleotide sequence in a cell of the subject, thereby treating or preventing the condition.

[1112] 55. The method of clause 54, wherein the target polynucleotide sequence is in a PCSK9 gene.

[1113] 56. The method of clause 54, wherein the target polynucleotide sequence is in an ANGPTL3 gene.

[1114] 57. The method of clause 55, wherein the modification reduces expression of functional PCSK9 protein encoded by the PCSK9 gene in the subject.

[1115] 58. The method of clause 56, wherein the modification reduces expression of functional ANGPTL3 protein encoded by the ANGPTL3 gene in the subject.

[1116] 59. The method of any one of clauses 48-58 wherein the condition is an atherosclerotic vascular disease.

[1117] 60. The method of any one of clauses 48-58, wherein the condition is an atherosclerotic vascular disease, hypertriglyceridemia, or diabetes.

[1118] 61. The method of any one of clauses 48-60, wherein the subject exhibits a reduced blood LDL cholesterol level, and/or a reduced blood triglycerides level as compared to before the administration.

[1119] Following is the third example of enumerated clauses:

[1120] 1. A composition for editing a gene target comprising:
[1121] (i) a base editor fusion protein comprising a programmable DNA binding domain and a deaminase, or a mRNA encoding the same,
[1122] (ii) a guide RNA comprising a tracr sequence that serves as a binding scaffold for the base editor fusion protein, and a spacer sequence that corresponds to a protospacer on a ANGPTL3 gene,
[1123] wherein the guide RNA directs the base editor fusion protein to effect a nucleobase alteration in the ANGPTL3 gene in vivo when administered to a mammalian subject,
[1124] wherein when the guide RNA and the mRNA is administered at a total amount of at least 0.5 mg/kg, the base alteration occurs in at least 35% of whole liver cells in the mammalian subject as measured by next generation sequencing or Sanger sequencing.

[1125] 2. The composition of clause 1, wherein the mammalian subject is a cynomolgus monkey,
[1126] wherein when the guide RNA and the mRNA is administered at a total amount of about 1 mg/kg, the base alteration occurs in at least 35% of whole liver cells in the cynomolgus monkey as measured by next generation sequencing or Sanger sequencing.

[1127] 3. The composition of clause 1, wherein the mammalian subject is a cynomolgus monkey,
[1128] wherein when the guide RNA and the mRNA is administered at a total amount of about 3 mg/kg, the base alteration occurs in at least 50% of whole liver cells in the cynomolgus monkey as measured by next generation sequencing or Sanger sequencing.

[1129] 4. The composition of clause 2, wherein the nucleobase alteration results in a reduction of at least 20% in blood triglyceride level in the cynomolgus monkey as compared to prior to the administration.

[1130] 5. The composition of clause 3, wherein the nucleobase alteration results in a reduction of at least 50% in blood triglyceride level in the cynomolgus monkey as compared to prior to the administration.

[1131] 6. The composition of any one of clauses 1-5, wherein the protospacer is located in a splice site.

[1132] 7. The composition of any one of clauses 1-5, wherein the protospacer complementary sequence is in the antisense strand of the ANGPTL3 gene.

[1133] 8. The composition of any one of clauses 1-5, wherein the protospacer complementary sequence is in the sense strand of the ANGPTL3 gene.

[1134] 9. The composition of any one of clauses 1-8, wherein the base alteration happens outside of the protospacer on the ANGPTL3 gene (off-target sites), wherein the editing percentages of off-target sites set forth in Table 14 are below or equal to the editing percentages set forth in Table 14, respectively.

[1135] 10. The composition of any one of clauses 1-9, wherein the deaminase is an adenine deaminase and wherein the nucleobase alteration is a A•T to G•C alteration.

[1136] 11. The composition of any one of clauses 1-10, wherein the programmable DNA binding domain comprises a nuclease inactive Cas9 or a Cas9 nickase.

[1137] 12. The composition of any one of clauses 1-11, wherein the nucleobase alteration is at a splice site of the ANGPTL3 gene.

[1138] 13. The composition of clause 12, wherein the nucleobase alteration is at a splice donor site of the ANGPTL3 gene.

[1139] 14. The composition of clause 13, wherein the splice donor site is at 5′ end of ANGPTL3 intron 6 as referenced in SEQ ID NO: 7.

[1140] 15. The composition of clause 12, wherein the nucleobase alteration is at a splice acceptor site of the ANGPTL3 gene.

[1141] 16. The composition of any one of clauses 1-15, wherein the nucleobase alteration results in a frame shift, a premature stop codon, an insertion or deletion in a transcript encoded by the ANGPTL3 gene.

[1142] 17. The composition of any one of clauses 1-16, wherein the nucleobase alteration results in an aberrant transcript encoded by the ANGPTL3 gene.

[1143] 18. The composition of any one of clauses 1-17, wherein the guide RNA is chemically modified.

[1144] 19. The composition of clause 16, wherein the tracr sequence of the guide RNA is chemically modified following the scheme depicted in FIG. 7.

[1145] 20. The composition of any one of clauses 1-19, wherein the spacer sequence comprises an ANGPTL3 ABE guide RNA spacer sequence set forth in Table 1.

[1146] 21. The composition of clause 20, wherein the guide RNA comprises the ANGPTL3 ABE guide RNA sequence of GA067, GA091, GA098, GA099, GA100, GA101, GA102, GA103, GA347, GA441, GA442, GA472, GA473, GA474, GA475, GA476, GA517 or GA547 as set forth in Table 1.

[1147] 22. The composition of any one of clauses 1-19, wherein the protospacer sequence comprises an ANGPTL3 ABE protospacer sequence set forth in Table 1.

[1148] 23. The composition of clause 22, wherein the protospacer comprises the sequence 5′-AAGATACCTGAATAACTCTC-3′ (SEQ ID No: 14), 5′-AAGATACCTGAATAACCCTC-3′ (SEQ ID No: 15), 5′-GATACCTGAATAACTCTC-3′ (SEQ ID No: 1606), 5′-AGATACCTGAATAACCCTC-3′ (SEQ ID No: 248), or 5′-GATACCTGAATAACCCTC-3′ (SEQ ID No: 249).

[1149] 24. The composition of any one of clauses 1-23, wherein the base editor fusion protein comprises an amino acid sequence of SEQ ID No: 2137.

[1150] 25. The composition of any one of clauses 1-24, wherein the GC % content of the mRNA sequence is greater than 50%.

[1151] 26. The composition of clause 25, wherein the GC % content of the mRNA sequence is greater than 56%.

[1152] 27. The composition of clause 26, wherein the GC % content of the mRNA sequence is greater than or equal to 63%.

[1153] 28. The composition of clause 25, wherein the mRNA comprises an adenine tTNA deaminase (TadA) region, a Cas9 region and a nuclear localization sequence (NLS) region.

[1154] 29. The composition of clause 28, wherein the mRNA further comprises a first linker region which connects the TadA region and the Cas9 region, and a second linker region which connects the Cas9 region and the NLS region.

[1155] 30. The composition of clause 28 or 29, wherein the GC % content of the TadA region is greater than 60%.

[1156] 31. The composition of clause 28 or 29, wherein the GC % content of the TadA region is greater than or equal to 70%.

[1157] 32. The composition of clause 28 or 29, wherein the GC % content of the Cas9 region is greater than 56%.

[1158] 33. The composition of clause 28 or 29, wherein the GC % content of the Cas9 region is greater than or equal to 62%.

[1159] 34. The composition of clause 28 or 29, wherein the GC % content of the NLS region is greater than 54%.

[1160] 35. The composition of clause 28 or 29, wherein the GC % content of the NLS region is greater than or equal to 63%.

[1161] 36. The composition of clause 29, wherein the GC % content of the first linker region is greater than 65%.

[1162] 37. The composition of clause 29, wherein the GC % content of the first linker region is greater than or equal to 79%.

[1163] 38. The composition of clause 29, wherein the GC % content of the second linker region is greater than 67%.

[1164] 39. The composition of clause 29, wherein the GC % content of the second linker region is greater than or equal to 83%.

[1165] 40. The composition of clause 29, wherein the GC % content of the TadA region is greater than 60%, the GC % content of the Cas9 region is greater than 56%, the GC % content of the NLS region is greater than 54%, the GC % content of the first linker region is greater than 65%, and the GC % content of the second linker region is greater than 67%.

[1166] 41. The composition of clause 25, wherein the mRNA comprises a mRNA sequence selected from Table 23.

[1167] 42. The composition of clause 41, wherein the mRNA comprises a mRNA sequence of SEQ ID No: 2136.

[1168] 43. The composition of any one of clauses 25-42, wherein the mRNA comprises a poly A tail.

[1169] 44. The composition of any one of clauses 1-43, further comprising a lipid nanoparticle (LNP) enclosing (i).

[1170] 45. The composition of clause 44, wherein the LNP further encloses (ii).

[1171] 46. The composition of clause 44, further comprising a second LNP enclosing (ii).

[1172] 47. The composition of any one of clauses 1-44, wherein the ratio of the guide RNA and the mRNA encoding the base editor fusion protein is about 1:10 to about 10:1 by weight.

[1173] 48. The composition of clause 47, wherein the ratio of the guide RNA and the mRNA encoding the base editor fusion protein is about 1:1, 1.5:1, 2:1, 3:1, 4:1, 1:1.5, 1:2, 1:3, or 1:4 by weight.

[1174] 49. The composition of clause 48, wherein the ratio of the guide RNA and the mRNA encoding the base editor fusion protein is about 1:1 by weight.

[1175] 50. A pharmaceutical composition comprising the composition of any one of the preceding clauses and a pharmaceutically acceptable carrier or excipient.

[1176] 51. A method for treating or preventing a condition in a subject in need thereof, the method comprising administering to the subject a therapeutically effective amount of the composition of clause 1.

[1177] 52. The method of clause 51, wherein the administration is via intravenous infusion.

[1178] 53. The method of clause 51 or 52, comprising sequential administration of a LNP enclosing (i) and a LNP enclosing (ii).

[1179] 54. The method of clause 51 or 52, comprising concurrent administration of the LNP enclosing (i) and the LNP enclosing (ii).

[1180] 55. The method of clause 53, comprising administering a single dose of the LNP enclosing (ii) followed by staggered doses of the LNP enclosing (i) over an interval of 1 day.

[1181] 56. The method of clause 53, comprising administering a single dose of the LNP enclosing (ii) followed by staggered doses of the LNP enclosing (i) over an interval of 2 days.

[1182] 57. The method of clause 53, comprising administering a single dose of the LNP enclosing (ii) followed by staggered doses of the LNP enclosing (i) over an interval of 3 days.

[1183] 58. The method of clause 53, comprising administering a single dose of the LNP enclosing (ii) followed by staggered doses of the LNP enclosing (i) over an interval of 4 days.

[1184] 59. The method of clause 53, comprising administering a single dose of the LNP enclosing (ii) followed by staggered doses of the LNP enclosing (i) over an interval of 5 days.

[1185] 60. The method of clause 53, comprising administering a single dose of the LNP enclosing (ii) followed by staggered doses of the LNP enclosing (i) over an interval of 6 days.

[1186] 61. The method of clause 53, comprising administering a single dose of the LNP enclosing (ii) followed by staggered doses of the LNP enclosing (i) over an interval of 7 days.

[1187] 62. The method of clause 51 or 52, comprising administering a single dose of the LNP enclosing (i) and (ii).

[1188] 63. The method of clause 62, wherein the single dose of the LNP is at about 0.3 to about 3 mg/kg.

[1189] 64. The method of clause 62 or 63, comprising administering a treatment course of one or more treatments to the subject, wherein each one of the one or more treatment comprises one or more of the single doses of the LNP.

[1190] 65. The method of clause 64, comprising administering a treatment course of two to ten treatments.

[1191] 66. The method of clause 64, comprising administering a treatment course of two to five treatments.

[1192] 67. The method of clause 64, comprising administering a treatment course of two treatments.

[1193] 68. The method of clause 64, comprising administering a treatment course of three treatments.

[1194] 69. The method of clause 64, comprising administering a treatment course of four treatments.

[1195] 70. The method of clause 62, comprising administering a treatment course of five treatments.

[1196] 71. The method of any one of clauses 51-70, wherein the condition is an atherosclerotic cardiovascular disease.

[1197] 72. The method of any one of clauses 51-70, wherein the condition is an atherosclerotic vascular disease.

[1198] 73. The method of any one of clauses 51-72, wherein the subject is a human.

[1199] 74. A composition for editing a gene target comprising:
[1200] (i) a base editor fusion protein comprising a programmable DNA binding domain and a deaminase, or a mRNA encoding the same,
[1201] (ii) a guide RNA comprising a tracr sequence that serves as a binding scaffold for the base editor fusion protein, and a spacer sequence that corresponds to a protospacer on a ANGPTL3 gene,
[1202] wherein the guide RNA directs the base editor fusion protein to effect a nucleobase alteration in the ANGPTL3 gene in vivo when administered to a mammalian subject, and
[1203] wherein the guide RNA comprises the ANGPTL3 ABE guide RNA sequences as set forth in Table 1.

[1204] 75. A composition for editing a gene target comprising:
[1205] (i) a base editor fusion protein comprising a programmable DNA binding domain and a deaminase, or a mRNA encoding the same,
[1206] (ii) a guide RNA comprising a tracr sequence that serves as a binding scaffold for the base editor fusion protein, and a spacer sequence that corresponds to a protospacer on a ANGPTL3 gene,
[1207] wherein the guide RNA directs the base editor fusion protein to effect a nucleobase alteration in the ANGPTL3 gene in vivo when administered to a mammalian subject, and
[1208] wherein the mRNA comprises a sequence selected from Table 23.

[1209] 76. A method for treating or preventing an atherosclerotic cardiovascular disease in a subject in need thereof, the method comprising administering to the subject a therapeutically effective amount of a first composition, comprising
[1210] (i) a base editor fusion protein comprising a programmable DNA binding domain and a deaminase, or a mRNA encoding the same,
[1211] (ii) a guide RNA comprising a tracr sequence that serves as a binding scaffold for the base editor fusion protein, and a spacer sequence that corresponds to a protospacer on a PCSK9 gene,
[1212] wherein the guide RNA directs the base editor fusion protein to effect a nucleobase alteration in the PCSK9 gene in vivo when administered to a mammalian subject,
[1213] wherein when the guide RNA and the mRNA is administered at a total amount of at least 0.5 mg/kg, the base alteration occurs in at least 35% of whole liver cells in the mammalian subject as measured by next generation sequencing or Sanger sequencing; and
[1214] a second composition, comprising
[1215] (i) a base editor fusion protein comprising a programmable DNA binding domain and a deaminase, or a mRNA encoding the same,
[1216] (ii) a guide RNA comprising a tracr sequence that serves as a binding scaffold for the base editor fusion protein, and a spacer sequence that corresponds to a protospacer on a ANGPTL3 gene,
[1217] wherein the guide RNA directs the base editor fusion protein to effect a nucleobase alteration in the ANGPTL3 gene in vivo when administered to a mammalian subject,
[1218] wherein when the guide RNA and the mRNA is administered at a total amount of at least 1 mg/kg, the base alteration occurs in at least 35% of whole liver cells in the mammalian subject as measured by next generation sequencing or Sanger sequencing.

[1219] 77. The method of clause 76, comprising sequential administration of the first composition and the second composition.

[1220] 78. The method of clause 77, comprising administering one or more doses of the first composition followed by one or more dose of the second composition.

[1221] 79. The method of clause 78, comprising administering one or more doses of the second composition followed by one or more dose of the first composition.

[1222] 80. The method of clause 76, comprising concurrent administration of the first composition and the second composition.

[1223] 81. The method of clause 80, comprising one or more doses of the first composition and the second composition.

[1224] 82. A composition for editing a gene target comprising:
[1225] (i) a base editor fusion protein comprising a programmable DNA binding domain and a deaminase, or a mRNA encoding the same,
[1226] (ii) a guide RNA comprising a tracr sequence that serves as a binding scaffold for the base editor fusion protein, and a spacer sequence that corresponds to a protospacer on a ANGPTL3 gene,
[1227] wherein the guide RNA directs the base editor fusion protein to effect a nucleobase alteration in the ANGPTL3 gene in vitro,
[1228] wherein when the guide RNA and the mRNA is administered at a total amount of at least 0.5 mg/kg, the base alteration occurs in at least 35% of whole liver cells in the mammalian subject as measured by next generation sequencing or Sanger sequencing.

[1229] 83. The composition of clause 82, wherein when the guide RNA and the mRNA is administered at a total amount of at least 1 mg/kg, the base alteration occurs in at least 40% of whole liver cells in the mammalian subject as measured by next generation sequencing or Sanger sequencing.

[1230] 84. The composition of clause 82, wherein when the guide RNA and the mRNA is administered at a total amount of at least 1.5 mg/kg, the base alteration occurs in at least 45% of whole liver cells in the mammalian subject as measured by next generation sequencing or Sanger sequencing.

[1231] 85. The composition of clause 82, wherein when the guide RNA and the mRNA is administered at a total amount of at least 2 mg/kg, the base alteration occurs in at least 50% of whole liver cells in the mammalian subject as measured by next generation sequencing or Sanger sequencing.

[1232] 86. The composition of clause 82, wherein when the guide RNA and the mRNA is administered at a total amount of at least 2.5 mg/kg, the base alteration occurs in at least 55% of whole liver cells in the mammalian subject as measured by next generation sequencing or Sanger sequencing.

[1233] 87. The composition of clause 82, wherein when the guide RNA and the mRNA is administered at a total amount of at least 3 mg/kg, the base alteration occurs in at least 60% of whole liver cells in the mammalian subject as measured by next generation sequencing or Sanger sequencing.

[1234] 88. A composition for editing an ANGPTL3 gene comprising:
[1235] (a) a mRNA encoding an adenine base editor protein having an editing window, and
[1236] (b) a guide RNA comprising a tracr sequence that serves as a binding scaffold for the base editor protein and a spacer sequence that serves to guide the base editor protein to a protospacer sequence on the ANGPTL3 gene,
[1237] wherein the spacer sequence is complimentary, at least in part, to a splice site or an exon region of the ANGPTL3 gene.

[1238] 89. The composition for editing the ANGPTL3 gene of clause 83, wherein when the base editor protein is operatively bound to the guide RNA and the guide RNA is hybridized with the complementary strand to the protospacer sequence on the ANGPTL3 gene, the editing window encompasses the splice site of the ANGPTL3 gene.

[1239] 90. The composition for editing the ANGPTL3 gene of clause 88, wherein when the base editor protein is operatively bound to the guide RNA and the guide RNA is hybridized with the complementary strand to the protospacer sequence on the ANGPTL3 gene, the editing window encompasses a region of an intron of the ANGPTL3 gene.

[1240] 91. The composition for editing the ANGPTL3 gene of clause 88, wherein when the base editor protein is operatively bound to the guide RNA and the guide RNA is hybridized with the complementary strand to the protospacer sequence on the ANGPTL3 gene, the editing window encompasses a region of intron 1, intron 3 or intron 4 of the ANGPTL3 gene.

[1241] 92. The composition for editing the ANGPTL3 gene of clause 88, wherein when the base editor protein is operatively bound to the guide RNA and the guide RNA is hybridized with the complementary strand to the protospacer sequence on the ANGPTL3 gene, the editing window encompasses a region of intron 1 of the ANGPTL3 gene.

[1242] 93. The composition for editing the ANGPTL3 gene of clause 88, wherein the spacer sequence has a 80-100% nucleotide sequence identity to a spacer sequence selected from the group of guide RNA sequences identified as GA067, GA100 and GA574.

[1243] 94. The composition for editing the ANGPTL3 gene of clause 88, wherein the tracr sequence has a 80-100% nucleotide sequence identity to a tracr sequence selected from the group of guide RNA sequences identified as GA067, GA091, GA098, GA099, GA100, GA101, GA102, GA103, GA347, GA441, GA442, GA472, GA473, GA474, GA475, GA476, GA517 and GA547.

[1244] 95. The composition for editing the ANGPTL3 gene of clause 88, wherein the mRNA has an 80-100% sequence identity to the mRNA sequences identified as MA002, MA004, MA040, MA0041, or MA045.

[1245] 96. The composition for editing the ANGPTL3 gene of clause 88, wherein the mRNA has one or more of the GC nucleotide region percentages set forth in the following table:

| Nucleotide region | Average GC Nucleotide Content |
|---|---|
| 27-213 | 67-73% |
| 389-661 | 67-71% |
| 735-829 | 63-74% |
| 4207-4286 | 67-70% |
| 4537-4569 | 65-73% |
| 4683-4741 | 62-67% |

[1246] 97. The composition for editing the ANGPTL3 gene of clause 88, wherein the mRNA has one or more of the GC nucleotide region percentages set forth in the following table:

| Nucleotide region | Average GC Nucleotide Content |
|---|---|
| 27-213 | At least 73% |
| 389-661 | At least 71% |
| 735-829 | At least 74% |
| 4207-4286 | At least 70% |
| 4537-4569 | At least 73% |
| 4683-4741 | At least 67% |

[1247] 98. The composition for editing the ANGPTL3 gene of clause 88, wherein the mRNA and gRNA are encapsulated within a lipid nanoparticle.

[1248] 99. The composition for editing the ANGPTL3 gene of clause 88, wherein the mRNA and gRNA are encapsulated within a lipid nanoparticle having the following:
[1249] LNP composition (mol %):
[1250] 40-65% iLipid
[1251] 2-20% DSPC
[1252] 1-5% PEG
[1253] Remaining mol % balance is cholesterol;
[1254] LNP Particle size: 55-120 nm Z average hydrodynamic diameter; and
[1255] Polydispersity index of <0.2 as determined by dynamic light scattering.

[1256] 100. The composition for editing the ANGPTL3 gene of clause 88, wherein the mRNA and gRNA are encapsulated within the lipid nanoparticle having an LNP particle size between 50-70 nm Z average hydrodynamic diameter.

[1257] 101. The composition for editing the ANGPTL3 gene of clause 88, wherein the composition when administered to a group of cynomolgus monkeys via intravenous infusion at a dose of approximately 0.5 mg of the guide RNA and mRNA combined total weight per kg of the cynomolgus monkey weight is capable of inducing adenine base editing at the ANGPTL3 target splice site in the liver of the cynomolgus monkeys with an average editing percentage of greater than 40 percent.

[1258] 102. The composition for editing the ANGPTL3 gene of clause 88, wherein the composition when administered to a group of cynomolgus monkeys via intravenous infusion at a dose of approximately 0.5 mg of the guide RNA and mRNA combined total weight per kg of the cynomolgus monkey weight is capable of inducing adenine base editing at the ANGPTL3 target splice site in the liver of the cynomolgus monkeys with an average editing percentage of greater than 50 percent.

[1259] 103. The composition for editing the ANGPTL3 gene of clause 88, wherein the composition when administered to a group of cynomolgus monkeys via intravenous infusion at a dose of approximately 0.5 mg of the guide RNA and mRNA combined total weight per kg of the cynomolgus monkey weight is capable of inducing adenine base editing at the ANGPTL3 target splice site in the liver of the cynomolgus monkeys with an average editing percentage of greater than 30 percent.

[1260] 104. The composition for editing the ANGPTL3 gene of clause 88, wherein the composition when administered to a group of cynomolgus monkeys via intravenous infusion at a dose of approximately 1 mg of the guide RNA and mRNA combined total weight per kg of the cynomolgus monkey weight is capable of inducing adenine base editing at the ANGPTL3 target splice site in the liver of the cynomolgus monkeys with an average editing percentage of greater than 40 percent.

[1261] 105. The composition for editing the ANGPTL3 gene of clause 88, wherein the composition when administered to a group of cynomolgus monkeys via intravenous infusion at a dose of approximately 1 mg of the guide RNA and mRNA combined total weight per kg of the cynomolgus monkey weight is capable of inducing adenine base editing at the ANGPTL3 target splice site in the liver of the cynomolgus monkeys with an average editing percentage of greater than 50 percent.

[1262] 106. The composition for editing the ANGPTL3 gene of clause 88, wherein the composition when administered to a group of cynomolgus monkeys via intravenous infusion at a dose of approximately 1 mg of the guide RNA and mRNA combined total weight per kg of the cynomolgus monkey weight is capable of inducing adenine base editing at the ANGPTL3 target splice site in the liver of the cynomolgus monkeys with an average editing percentage of greater than 60 percent.

[1263] 107. The composition for editing the ANGPTL3 gene of clause 88, wherein the composition when administered to a group of cynomolgus monkeys via intravenous infusion at a dose of approximately 1 mg of the guide RNA and mRNA combined total weight per kg of the cynomolgus monkey weight is capable of inducing adenine base editing at the ANGPTL3 target splice site in the liver of the cynomolgus monkeys with an average editing percentage of greater than 70 percent.

[1264] 108. The composition for editing the ANGPTL3 gene of clause 88, wherein the composition when administered to a group of cynomolgus monkeys via intravenous infusion at a dose of approximately 1.5 mg of the guide RNA and mRNA combined total weight per kg of the cynomolgus monkey weight is capable of inducing adenine base editing at the ANGPTL3 target splice site in the liver of the cynomolgus monkeys with an average editing percentage of greater than 40 percent.

[1265] 109. The composition for editing the ANGPTL3 gene of clause 88, wherein the composition when administered to a group of cynomolgus monkeys via intravenous infusion at a dose of approximately 1.5 mg of the guide RNA and mRNA combined total weight per kg of the cynomolgus monkey weight is capable of inducing adenine base editing at the ANGPTL3 target splice site in the liver of the cynomolgus monkeys with an average editing percentage of greater than 50 percent.

[1266] 110. The composition for editing the ANGPTL3 gene of clause 88, wherein the composition when administered to a group of cynomolgus monkeys via intravenous infusion at a dose of approximately 1.5 mg of the guide RNA and mRNA combined total weight per kg of the cynomolgus monkey weight is capable of inducing adenine base editing at the ANGPTL3 target splice site in the liver of the cynomolgus monkeys with an average editing percentage of greater than 60 percent.

[1267] 111. The composition for editing the ANGPTL3 gene of clause 88, wherein the composition when administered to a group of cynomolgus monkeys via intravenous infusion at a dose of approximately 1.5 mg of the guide RNA and mRNA combined total weight per kg of the cynomolgus monkey weight is capable of inducing adenine base editing at the ANGPTL3 target splice site in the liver of the cynomolgus monkeys with an average editing percentage of greater than 70 percent.

[1268] 112. The composition for editing the ANGPTL3 gene of clause 88, wherein the composition when at administered to a group of cynomolgus monkeys via intravenous infusion at a dose of approximately 1.5 mg of the guide RNA and mRNA combined total weight per kg of the cynomolgus monkey weight is capable of inducing adenine base editing at the ANGPTL3 target splice site in the liver of the cynomolgus monkeys with an average editing percentage of greater than 80 percent.

[1269] 113. The composition for editing the ANGPTL3 gene of clause 88, wherein the composition when administered to a group of cynomolgus monkeys via intravenous infusion at a dose of approximately 3 mg of the guide RNA and mRNA combined total weight per kg of the cynomolgus monkey weight is capable of inducing adenine base editing at the ANGPTL3 target splice site in the liver of the cynomolgus monkeys with an average editing percentage of greater than 40 percent.

[1270] 114. The composition for editing the ANGPTL3 gene of clause 88, wherein the composition when administered to a group of cynomolgus monkeys via intravenous infusion at a dose of approximately 3 mg of the guide RNA and mRNA combined total weight per kg of the cynomolgus monkey weight is capable of inducing adenine base editing at the ANGPTL3 target splice site in the liver of the cynomolgus monkeys with an average editing percentage of greater than 50 percent.

[1271] 115. The composition for editing the ANGPTL3 gene of clause 88, wherein the composition when administered to a group of cynomolgus monkeys via intravenous infusion at a dose of approximately 3 mg of the guide RNA and mRNA combined total weight per kg of the cynomolgus monkey weight is capable of inducing adenine base editing at the ANGPTL3 target splice site in the liver of the cynomolgus monkeys with an average editing percentage of greater than 60 percent.

[1272] 116. The composition for editing the ANGPTL3 gene of clause 88, wherein the composition when administered to a group of cynomolgus monkeys via intravenous infusion at a dose of approximately 3 mg of the guide RNA and mRNA combined total weight per kg of the cynomolgus monkey weight is capable of inducing adenine base editing at the ANGPTL3 target splice site in the liver of the cynomolgus monkeys with an average editing percentage of greater than 70 percent.

[1273] 117. The composition for editing the ANGPTL3 gene of clause 88, wherein the composition when administered to a group of cynomolgus monkeys via intravenous infusion at a dose of approximately 3 mg of the guide RNA and mRNA combined total weight per kg of the cynomolgus monkey weight is capable of inducing adenine base editing at the ANGPTL3 target splice site in the liver of the cynomolgus monkeys with an average editing percentage of greater than 80 percent.

[1274] 118. The compositions for editing the ANGPTL3 gene of clauses 87-117, wherein the percent editing is determined at 15 days after dosing through analysis of dosed cynomolgus monkey liver either via liver biopsy or necropsy of the monkey.

[1275] 119. The compositions for editing of the ANGPTL3 gene of clauses 87-117, wherein the percent editing is determined to be durably maintained by periodic liver biopsy testing of the dosed cynomolgus monkeys over a span of at least 168 days after dosing.

[1276] 120. The compositions for editing of the ANGPTL3 gene of clauses 87-117, wherein the percent editing is determined to be durably maintained by periodic liver biopsy testing of the dosed cynomolgus monkeys over a span of at least 300 days after dosing.

[1277] 121. The composition for editing the ANGPTL3 gene of clause 88, wherein the composition when administered to a group of cynomolgus monkeys via intravenous infusion at a dose of approximately 0.5 mg of the guide RNA and mRNA combined total weight per kg of cynomolgus monkey weight is capable of reducing ANGPTL3 protein in the plasma of the dosed cynomolgus monkeys on average of at least 35 percent as compared to baseline.

[1278] 122. The composition for editing the ANGPTL3 gene of clause 88, wherein the composition when administered to a group of cynomolgus monkeys via intravenous infusion at a dose of approximately 0.5 mg of the guide RNA and mRNA combined total weight per kg of cynomolgus monkey weight is capable of reducing ANGPTL3 protein in the plasma of the dosed cynomolgus monkeys on average of at least 40 percent as compared to baseline.

[1279] 123. The composition for editing the ANGPTL3 gene of clause 88, wherein the composition when administered to a group of cynomolgus monkeys via intravenous infusion at a dose of approximately 0.5 mg of the guide RNA and mRNA combined total weight per kg of monkey weight is capable of reducing ANGPTL3 protein in the plasma of the dosed cynomolgus monkeys on average of at least 50 percent as compared to baseline.

[1280] 124. The composition for editing the ANGPTL3 gene of clause 88, wherein the composition when administered to a group of cynomolgus monkeys via intravenous infusion at a dose of approximately 0.5 mg of the guide RNA and mRNA combined total weight per kg of cynomolgus monkey weight is capable of reducing ANGPTL3 protein in the plasma of the dosed monkeys on average of at least 60 percent as compared to baseline.

[1281] 125. The composition for editing the ANGPTL3 gene of clause 88, wherein the composition when administered to a group of cynomolgus monkeys via intravenous infusion at a dose of approximately 0.5 mg of the guide RNA and mRNA combined total weight per kg of cynomolgus monkey weight is capable of reducing ANGPTL3 protein in the plasma of the dosed cynomolgus monkeys on average of at least 70 percent as compared to baseline.

[1282] 126. The composition for editing the ANGPTL3 gene of clause 88, wherein the composition when administered to a group of cynomolgus monkeys via intravenous infusion at a dose of approximately 0.5 mg of the guide RNA and mRNA combined total weight per kg of cynomolgus monkey weight is capable of reducing ANGPTL3 protein in the plasma of the dosed cynomolgus monkeys on average of at least 80 percent as compared to baseline.

[1283] 127. The composition for editing the ANGPTL3 gene of clause 88, wherein the composition when administered to a group of cynomolgus monkeys via intravenous infusion at a dose of approximately 1 mg of the guide RNA and mRNA combined total weight per kg of cynomolgus monkey weight is capable of reducing ANGPTL3 protein in the plasma of the dosed cynomolgus monkeys on average of at least 35 percent as compared to baseline.

[1284] 128. The composition for editing the ANGPTL3 gene of clause 88, wherein the composition when administered to a group of cynomolgus monkeys via intravenous infusion at a dose of approximately 1 mg of the guide RNA and mRNA combined total weight per kg of cynomolgus monkey weight is capable of reducing ANGPTL3 protein in the plasma of the dosed cynomolgus monkeys on average of at least 40 percent as compared to baseline.

[1285] 129. The composition for editing the ANGPTL3 gene of clause 88, wherein the composition when administered to a group of cynomolgus monkeys via intravenous infusion at a dose of approximately 1 mg of the guide RNA and mRNA combined total weight per kg of monkey weight is capable of reducing ANGPTL3 protein in the plasma of the dosed cynomolgus monkeys on average of at least 50 percent as compared to baseline.

[1286] 130. The composition for editing the ANGPTL3 gene of clause 88, wherein the composition when administered to a group of cynomolgus monkeys via intravenous infusion at a dose of approximately 1 mg of the guide RNA and mRNA combined total weight per kg of cynomolgus monkey weight is capable of reducing ANGPTL3 protein in the plasma of the dosed cynomolgus monkeys on average of at least 60 percent as compared to baseline.

[1287] 131. The composition for editing the ANGPTL3 gene of clause 88, wherein the composition when administered to a group of cynomolgus monkeys via intravenous infusion at a dose of approximately 1 mg of the guide RNA and mRNA combined total weight per kg of cynomolgus monkey weight is capable of reducing ANGPTL3 protein in the plasma of the dosed cynomolgus monkeys on average of at least 70 percent as compared to baseline.

[1288] 132. The composition for editing the ANGPTL3 gene of clause 88, wherein the composition when administered to a group of cynomolgus monkeys via intravenous infusion at a dose of approximately 1 mg of the guide RNA and mRNA combined total weight per kg of cynomolgus monkey weight is capable of reducing ANGPTL3 protein in the plasma of the dosed cynomolgus monkeys on average of at least 80 percent as compared to baseline.

[1289] 133. The composition for editing the ANGPTL3 gene of clause 88, wherein the composition when administered to a group of cynomolgus monkeys via intravenous infusion at a dose of approximately 1.5 mg of the guide RNA and mRNA combined total weight per kg of cynomolgus monkey weight is capable of reducing ANGPTL3 protein in the plasma of the dosed cynomolgus monkeys on average of at least 35 percent as compared to baseline.

[1290] 134. The composition for editing the ANGPTL3 gene of clause 88, wherein the composition when administered to a group of cynomolgus monkeys via intravenous infusion at a dose of approximately 1.5 mg of the guide RNA and mRNA combined total weight per kg of cynomolgus monkey weight is capable of reducing ANGPTL3 protein in the plasma of the dosed cynomolgus monkeys on average of at least 40 percent as compared to baseline.

[1291] 135. The composition for editing the ANGPTL3 gene of clause 88, wherein the composition when administered to a group of cynomolgus monkeys via intravenous infusion at a dose of approximately 1.5 mg of the guide RNA and mRNA combined total weight per kg of cynomolgus monkey weight is capable of reducing ANGPTL3 protein in the plasma of the dosed cynomolgus monkeys on average of at least 50 percent as compared to baseline.

[1292] 136. The composition for editing the ANGPTL3 gene of clause 88, wherein the composition when administered to a group of cynomolgus monkeys via intravenous infusion at a dose of approximately 1.5 mg of the guide RNA and mRNA combined total weight per kg of cynomolgus monkey weight is capable of reducing ANGPTL3 protein in the plasma of the dosed cynomolgus monkeys on average of at least 60 percent as compared to baseline.

[1293] 137. The composition for editing the ANGPTL3 gene of clause 88, wherein the composition when administered to a group of cynomolgus monkeys via intravenous infusion at a dose of approximately 1.5 mg of the guide RNA and mRNA combined total weight per kg of cynomolgus monkey weight is capable of reducing ANGPTL3 protein in the plasma of the dosed cynomolgus monkeys on average of at least 70 percent as compared to baseline.

[1294] 138. The composition for editing the ANGPTL3 gene of clause 88, wherein the composition when administered to a group of cynomolgus monkeys via intravenous infusion at a dose of approximately 1.5 mg of the guide RNA and mRNA combined total weight per kg of cynomolgus monkey weight is capable of reducing ANGPTL3 protein in the plasma of the dosed cynomolgus monkeys on average of at least 80 percent as compared to baseline.

[1295] 139. The composition for editing the ANGPTL3 gene of clause 88, wherein the composition when administered to a group of cynomolgus monkeys via intravenous infusion at a dose of approximately 3 mg of the guide RNA and mRNA combined total weight per kg of cynomolgus monkey weight is capable of reducing ANGPTL3 protein in the plasma of the dosed cynomolgus monkeys on average of at least 35 percent as compared to baseline.

[1296] 140. The composition for editing the ANGPTL3 gene of clause 88, wherein the composition when administered to a group of cynomolgus monkeys via intravenous infusion at a dose of approximately 3 mg of the guide RNA and mRNA combined total weight per kg of cynomolgus monkey weight is capable of reducing ANGPTL3 protein in the plasma of the dosed cynomolgus monkeys on average of at least 40 percent as compared to baseline.

[1297] 141. The composition for editing the ANGPTL3 gene of clause 88, wherein the composition when administered to a group of cynomolgus monkeys via intravenous infusion at a dose of approximately 3 mg of the guide RNA and mRNA combined total weight per kg of cynomolgus monkey weight is capable of reducing ANGPTL3 protein in the plasma of the dosed cynomolgus monkeys on average of at least 50 percent as compared to baseline.

[1298] 142. The composition for editing the ANGPTL3 gene of clause 88, wherein the composition when administered to a group of cynomolgus monkeys via intravenous infusion at a dose of approximately 3 mg of the guide RNA and mRNA combined total weight per kg of cynomolgus monkey weight is capable of reducing ANGPTL3 protein in the plasma of the dosed cynomolgus monkeys on average of at least 60 percent as compared to baseline.

[1299] 143. The composition for editing the ANGPTL3 gene of clause 88, wherein the composition when administered to a group of cynomolgus monkeys via intravenous infusion at a dose of approximately 3 mg of the guide RNA and mRNA combined total weight per kg of cynomolgus monkey weight is capable of reducing ANGPTL3 protein in the plasma of the dosed cynomolgus monkeys on average of at least 70 percent as compared to baseline.

[1300] 144. The composition for editing the ANGPTL3 gene of clause 88, wherein the composition when administered to a group of cynomolgus monkeys via intravenous infusion at a dose of approximately 3 mg of the guide RNA and mRNA combined total weight per kg of cynomolgus monkey weight is capable of reducing ANGPTL3 protein in the plasma of the dosed cynomolgus monkeys on average of at least 80 percent as compared to baseline.

[1301] 145. The compositions for editing of the ANGPTL3 gene of clauses 121-144, wherein the reduction in plasma protein is determined at 15 days after dosing via blood sampling and analysis of the dosed cynomolgus monkey.

[1302] 146. The composition for editing the ANGPTL3 gene of clause 88, wherein the composition when administered to a group of cynomolgus monkeys via intravenous infusion at a dose of approximately 0.5 mg of the guide RNA and mRNA combined total weight per kg of monkey weight is capable of reducing triglyceride level in the plasma of the dosed monkeys on average of at least 20 percent as compared to baseline.

[1303] 147. The composition for editing the ANGPTL3 gene of clause 88, wherein the composition when administered to a group of cynomolgus monkeys via intravenous infusion at a dose of approximately 0.5 mg of the guide RNA and mRNA combined total weight per kg of cynomolgus monkey weight is capable of reducing triglyceride level in the plasma of the dosed cynomolgus monkeys on average of at least 25 percent as compared to baseline.

[1304] 148. The composition for editing the ANGPTL3 gene of clause 88, wherein the composition when administered to a group of cynomolgus monkeys via intravenous infusion at a dose of approximately 0.5 mg of the guide RNA and mRNA combined total weight per kg of cynomolgus monkey weight is capable of reducing triglyceride level in the plasma of the dosed cynomolgus monkeys on average of at least 30 percent as compared to baseline.

[1305] 149. The composition for editing the ANGPTL3 gene of clause 88, wherein the composition when administered to a group of cynomolgus monkeys via intravenous infusion at a dose of approximately 0.5 mg of the guide RNA and mRNA combined total weight per kg of cynomolgus monkey weight is capable of reducing triglyceride level in the plasma of the dosed cynomolgus monkeys on average of at least 35 percent as compared to baseline.

[1306] 150. The composition for editing the ANGPTL3 gene of clause 88, wherein the composition when administered to a group of cynomolgus monkeys via intravenous infusion at a dose of approximately 0.5 mg of the guide RNA and mRNA combined total weight per kg of cynomolgus monkey weight is capable of reducing triglyceride level in the plasma of the dosed cynomolgus monkeys on average of at least 40 percent as compared to baseline.

[1307] 151. The composition for editing the ANGPTL3 gene of clause 88, wherein the composition when administered to a group of cynomolgus monkeys via intravenous infusion at a dose of approximately 0.5 mg of the guide RNA and mRNA combined total weight per kg of cynomolgus monkey weight is capable of reducing triglyceride level in the plasma of the dosed cynomolgus monkeys on average of at least 45 percent as compared to baseline.

[1308] 152. The composition for editing the ANGPTL3 gene of clause 88, wherein the composition when administered to a group of cynomolgus monkeys via intravenous infusion at a dose of approximately 1 mg of the guide RNA and mRNA combined total weight per kg of cynomolgus monkey weight is capable of reducing triglyceride level in the plasma of the dosed cynomolgus monkeys on average of at least 20 percent as compared to baseline.

[1309] 153. The composition for editing the ANGPTL3 gene of clause 88, wherein the composition when administered to a group of cynomolgus monkeys via intravenous infusion at a dose of approximately 1 mg of the guide RNA and mRNA combined total weight per kg of cynomolgus monkey weight is capable of reducing triglyceride level in the plasma of the dosed cynomolgus monkeys on average of at least 25 percent as compared to baseline.

[1310] 154. The composition for editing the ANGPTL3 gene of clause 88, wherein the composition when administered to a group of cynomolgus monkeys via intravenous infusion at a dose of approximately 1 mg of the guide RNA and mRNA combined total weight per kg of cynomolgus monkey weight is capable of reducing triglyceride level in the plasma of the dosed cynomolgus monkeys on average of at least 30 percent as compared to baseline.

[1311] 155. The composition for editing the ANGPTL3 gene of clause 88, wherein the composition when administered to a group of cynomolgus monkeys via intravenous infusion at a dose of approximately 1 mg of the guide RNA and mRNA combined total weight per kg of cynomolgus monkey weight is capable of reducing triglyceride level in the plasma of the dosed cynomolgus monkeys on average of at least 35 percent as compared to baseline.

[1312] 156. The composition for editing the ANGPTL3 gene of clause 88, wherein the composition when administered to a group of cynomolgus monkeys via intravenous infusion at a dose of approximately 1 mg of the guide RNA and mRNA combined total weight per kg of cynomolgus monkey weight is capable of reducing triglyceride level in the plasma of the dosed cynomolgus monkeys on average of at least 40 percent as compared to baseline.

[1313] 157. The composition for editing the ANGPTL3 gene of clause 88, wherein the composition when administered to a group of cynomolgus monkeys via intravenous infusion at a dose of approximately 1 mg of the guide RNA and mRNA combined total weight per kg of cynomolgus monkey weight is capable of reducing triglyceride level in the plasma of the dosed cynomolgus monkeys on average of at least 45 percent as compared to baseline.

[1314] 158. The composition for editing the ANGPTL3 gene of clause 88, wherein the composition when administered to a group of cynomolgus monkeys via intravenous infusion at a dose of approximately 1 mg of the guide RNA and mRNA combined total weight per kg of cynomolgus monkey weight is capable of reducing triglyceride level in the plasma of the dosed cynomolgus monkeys on average of at least 50 percent as compared to baseline.

[1315] 159. The composition for editing the ANGPTL3 gene of clause 88, wherein the composition when administered to a group of cynomolgus monkeys via intravenous infusion at a dose of approximately 1 mg of the guide RNA and mRNA combined total weight per kg of cynomolgus monkey weight is capable of reducing triglyceride level in the plasma of the dosed cynomolgus monkeys on average of at least 55 percent as compared to baseline.

[1316] 160. The composition for editing the ANGPTL3 gene of clause 88, wherein the composition when administered to a group of cynomolgus monkeys via intravenous infusion at a dose of approximately 1 mg of the guide RNA and mRNA combined total weight per kg of cynomolgus monkey weight is capable of reducing triglyceride level in the plasma of the dosed cynomolgus monkeys on average of at least 60 percent as compared to baseline.

[1317] 161. The composition for editing the ANGPTL3 gene of clause 88, wherein the composition when administered to a group of cynomolgus monkeys via intravenous infusion at a dose of approximately 1.5 mg of the guide RNA and mRNA combined total weight per kg of cynomolgus monkey weight is capable of reducing triglyceride level in the plasma of the dosed cynomolgus monkeys on average of at least 20 percent as compared to baseline.

[1318] 162. The composition for editing the ANGPTL3 gene of clause 88, wherein the composition when administered to a group of cynomolgus monkeys via intravenous infusion at a dose of approximately 1.5 mg of the guide RNA and mRNA combined total weight per kg of cynomolgus monkey weight is capable of reducing triglyceride level in the plasma of the dosed cynomolgus monkeys on average of at least 25 percent as compared to baseline.

[1319] 163. The composition for editing the ANGPTL3 gene of clause 88, wherein the composition when administered to a group of cynomolgus monkeys via intravenous infusion at a dose of approximately 1.5 mg of the guide RNA and mRNA combined total weight per kg of cynomolgus monkey weight is capable of reducing triglyceride level in the plasma of the dosed cynomolgus monkeys on average of at least 30 percent as compared to baseline.

[1320] 164. The composition for editing the ANGPTL3 gene of clause 88, wherein the composition when administered to a group of cynomolgus monkeys via intravenous infusion at a dose of approximately 1.5 mg of the guide RNA and mRNA combined total weight per kg of cynomolgus monkey weight is capable of reducing triglyceride level in the plasma of the dosed cynomolgus monkeys on average of at least 35 percent as compared to baseline.

[1321] 165. The composition for editing the ANGPTL3 gene of clause 88, wherein the composition when administered to a group of cynomolgus monkeys via intravenous infusion at a dose of approximately 1.5 mg of the guide RNA and mRNA combined total weight per kg of cynomolgus monkey weight is capable of reducing triglyceride level in the plasma of the dosed cynomolgus monkeys on average of at least 40 percent as compared to baseline.

[1322] 166. The composition for editing the ANGPTL3 gene of clause 88, wherein the composition when administered to a group of cynomolgus monkeys via intravenous infusion at a dose of approximately 1.5 mg of the guide RNA and mRNA combined total weight per kg of cynomolgus monkey weight is capable of reducing triglyceride level in the plasma of the dosed cynomolgus monkeys on average of at least 45 percent as compared to baseline.

[1323] 167. The composition for editing the ANGPTL3 gene of clause 88, wherein the composition when administered to a group of cynomolgus monkeys via intravenous infusion at a dose of approximately 1.5 mg of the guide RNA and mRNA combined total weight per kg of cynomolgus monkey weight is capable of reducing triglyceride level in the plasma of the dosed cynomolgus monkeys on average of at least 50 percent as compared to baseline.

[1324] 168. The composition for editing the ANGPTL3 gene of clause 88, wherein the composition when administered to a group of cynomolgus monkeys via intravenous infusion at a dose of approximately 1.5 mg of the guide RNA and mRNA combined total weight per kg of cynomolgus monkey weight is capable of reducing triglyceride level in the plasma of the dosed cynomolgus monkeys on average of at least 55 percent as compared to baseline.

[1325] 169. The composition for editing the ANGPTL3 gene of clause 88, wherein the composition when administered to a group of cynomolgus monkeys via intravenous infusion at a dose of approximately 1.5 mg of the guide RNA and mRNA combined total weight per kg of cynomolgus monkey weight is capable of reducing triglyceride level in the plasma of the dosed cynomolgus monkeys on average of at least 60 percent as compared to baseline.

[1326] 170. The composition for editing the ANGPTL3 gene of clause 88, wherein the composition when administered to a group of cynomolgus monkeys via intravenous infusion at a dose of approximately 1.5 mg of the guide RNA and mRNA combined total weight per kg of cynomolgus monkey weight is capable of reducing triglyceride level in the plasma of the dosed cynomolgus monkeys on average of at least 65 percent as compared to baseline.

[1327] 171. The composition for editing the ANGPTL3 gene of clause 88, wherein the composition when administered to a group of cynomolgus monkeys via intravenous infusion at a dose of approximately 3 mg of the guide RNA and mRNA combined total weight per kg of cynomolgus monkey weight is capable of reducing triglyceride level in the plasma of the dosed cynomolgus monkeys on average of at least 20 percent as compared to baseline.

[1328] 172. The composition for editing the ANGPTL3 gene of clause 88, wherein the composition when administered to a group of cynomolgus monkeys via intravenous infusion at a dose of approximately 3 mg of the guide RNA and mRNA combined total weight per kg of cynomolgus monkey weight is capable of reducing triglyceride level in the plasma of the dosed cynomolgus monkeys on average of at least 25 percent as compared to baseline.

[1329] 173. The composition for editing the ANGPTL3 gene of clause 88, wherein the composition when administered to a group of cynomolgus monkeys via intravenous infusion at a dose of approximately 3 mg of the guide RNA and mRNA combined total weight per kg of cynomolgus monkey weight is capable of reducing triglyceride level in the plasma of the dosed cynomolgus monkeys on average of at least 30 percent as compared to baseline.

[1330] 174. The composition for editing the ANGPTL3 gene of clause 88, wherein the composition when administered to a group of cynomolgus monkeys via intravenous infusion at a dose of approximately 3 mg of the guide RNA and mRNA combined total weight per kg of cynomolgus monkey weight is capable of reducing triglyceride level in the plasma of the dosed cynomolgus monkeys on average of at least 35 percent as compared to baseline.

[1331] 175. The composition for editing the ANGPTL3 gene of clause 88, wherein the composition when administered to a group of cynomolgus monkeys via intravenous infusion at a dose of approximately 3 mg of the guide RNA and mRNA combined total weight per kg of cynomolgus monkey weight is capable of reducing triglyceride level in the plasma of the dosed cynomolgus monkeys on average of at least 40 percent as compared to baseline.

[1332] 176. The composition for editing the ANGPTL3 gene of clause 88, wherein the composition when administered to a group of cynomolgus monkeys via intravenous infusion at a dose of approximately 3 mg of the guide RNA and mRNA combined total weight per kg of cynomolgus monkey weight is capable of reducing triglyceride level in the plasma of the dosed cynomolgus monkeys on average of at least 45 percent as compared to baseline.

[1333] 177. The composition for editing the ANGPTL3 gene of clause 88, wherein the composition when administered to a group of cynomolgus monkeys via intravenous infusion at a dose of approximately 3 mg of the guide RNA and mRNA combined total weight per kg of cynomolgus monkey weight is capable of reducing triglyceride level in the plasma of the dosed cynomolgus monkeys on average of at least 50 percent as compared to baseline.

[1334] 178. The composition for editing the ANGPTL3 gene of clause 88, wherein the composition when administered to a group of cynomolgus monkeys via intravenous infusion at a dose of approximately 3 mg of the guide RNA and mRNA combined total weight per kg of cynomolgus monkey weight is capable of reducing triglyceride level in the plasma of the dosed cynomolgus monkeys on average of at least 55 percent as compared to baseline.

[1335] 179. The composition for editing the ANGPTL3 gene of clause 88, wherein the composition when administered to a group of cynomolgus monkeys via intravenous infusion at a dose of approximately 3 mg of the guide RNA and mRNA combined total weight per kg of cynomolgus monkey weight is capable of reducing triglyceride level in the plasma of the dosed cynomolgus monkeys on average of at least 60 percent as compared to baseline.

[1336] 180. The composition for editing the ANGPTL3 gene of clause 88, wherein the composition when administered to a group of cynomolgus monkeys via intravenous infusion at a dose of approximately 3 mg of the guide RNA and mRNA combined total weight per kg of cynomolgus monkey weight is capable of reducing triglyceride level in the plasma of the dosed cynomolgus monkeys on average of at least 65 percent as compared to baseline.

[1337] 181. The compositions for editing the ANGPTL3 gene of clauses 148-182, wherein the reduction in triglyceride level is determined at 15 days after dosing via blood sampling and analysis of the dosed cynomolgus monkey.

[1338] 182. The compositions for editing the ANGPTL3 gene of clauses 148-182, wherein the reduction in triglyceride level is determined to be durably maintained over a span of at least 168 days by periodic blood sampling and analysis of the dosed cynomolgus monkey.

[1339] 183. The compositions for editing the ANGPTL3 gene of clauses 148-182, wherein the reduction in triglyceride level is determined to be durably maintained over a span of at least 300 days by periodic blood sampling and analysis of the dosed cynomolgus monkey.

[1340] 184. The composition for editing the ANGPTL3 gene of clause 88, wherein the composition when administered to a group of cynomolgus monkeys via intravenous infusion at a dose of approximately 3 mg of the guide RNA and mRNA combined total weight per kg of cynomolgus monkey weight is capable of reducing lipoprotein(a) in the plasma of the dosed cynomolgus monkeys on average of at least 10 percent as compared to baseline.

[1341] 185. The composition for editing the ANGPTL3 gene of clause 88, wherein the composition when administered to a group of cynomolgus monkeys via intravenous infusion at a dose of approximately 3 mg of the guide RNA and mRNA combined total weight per kg of cynomolgus monkey weight is capable of reducing lipoprotein(a) level in the plasma of the dosed cynomolgus monkeys on average of at least 15 percent as compared to baseline.

[1342] 186. The composition for editing the ANGPTL3 gene of clause 88, wherein the composition when administered to a group of cynomolgus monkeys via intravenous infusion at a dose of approximately 3 mg of the guide RNA and mRNA combined total weight per kg of cynomolgus monkey weight is capable of reducing lipoprotein(a) level in the plasma of the dosed cynomolgus monkeys on average of at least 20 percent as compared to baseline.

[1343] 187. The composition for editing the ANGPTL3 gene of clause 88, wherein the composition when administered to a group of cynomolgus monkeys via intravenous infusion at a dose of approximately 3 mg of the guide RNA and mRNA combined total weight per kg of cynomolgus monkey weight is capable of reducing lipoprotein(a) level in the plasma of the dosed cynomolgus monkeys on average of at least 25 percent as compared to baseline.

[1344] 188. The composition for editing the ANGPTL3 gene of clause 88, wherein the composition when administered to a group of cynomolgus monkeys via intravenous infusion at a dose of approximately 3 mg of the guide RNA and mRNA combined total weight per kg of cynomolgus monkey weight is capable of reducing lipoprotein(a) level in the plasma of the dosed cynomolgus monkeys on average of at least 30 percent as compared to baseline.

[1345] 189. The composition for editing the ANGPTL3 gene of clause 88, wherein the composition when administered to a group of cynomolgus monkeys via intravenous infusion at a dose of approximately 3 mg of the guide RNA and mRNA combined total weight per kg of cynomolgus monkey weight is capable of reducing lipoprotein(a) level in the plasma of the dosed cynomolgus monkeys on average of approximately 35 percent as compared to baseline.

[1346] 190. The compositions for editing the ANGPTL3 gene of clauses 186-191, wherein the reduction in lipoprotein(a) is determined at 15 days after dosing via blood sampling and analysis of the dosed cynomolgus monkey.

[1347] 191. The compositions for editing the ANGPTL3 gene of clauses 186-191, wherein the reduction in lipoprotein(a) is determined to be durably maintained over a span of at least 224 days by periodic blood sampling and analysis of the dosed cynomolgus monkey.

[1348] 192. The compositions for editing the ANGPTL3 gene of clauses 186-191, wherein the reduction in lipoprotein(a) is determined to be durably maintained over a span of at least 300 days by periodic blood sampling and analysis of the dosed cynomolgus monkey.

[1349] 193. The compositions for editing the ANGPTL3 gene of clauses 101-194, wherein to the extent that the dosing of the cynomolgus monkeys results in elevation of AST, ALT, or Cytokines, the elevations resulting from the dosing of the composition are transient and resolved back to approximately baseline levels within 3-15 days after dosing.

[1350] 194. The composition for editing the ANGPTL3 gene of clauses 101-103, 121-126, 148-153, wherein the percent editing of ANGPTL3 is negligible outside of the liver, spleen and adrenal glands tissues as illustrated in FIG. 27.

[1351] 195. The compositions for editing the ANGPTL3 gene of clauses 101-107, 121-132, 148-162, wherein repeat dosing results is additive with respect to the editing percentage of ANGPTL3 editing percentage.

[1352] 196. The compositions for editing the ANGPTL3 gene of clause 195, wherein the repeat dosing does not elicit cytokine activation nor an immune response.

[1353] 197. The composition for editing the ANGPTL3 gene of clause 88, wherein the spacer sequence has at least 80% nucleotide correlation with the nucleotide sequence of a targeted protospacer on the ANGPTL3 gene, wherein an RNA nucleotide on the spacer sequence is in correlation with a DNA nucleotide of the protospacer if it has the same nucleotide as the DNA nucleotide in the same order and wherein uracil and thymine bases are considered the same nucleotide for purposes of determining correlation.

[1354] 198. The composition for editing the ANGPTL3 gene of clause 197, wherein the spacer sequence has at least 85% nucleotide correlation with the nucleotide sequence of a targeted protospacer on the ANGPTL3 gene.

[1355] 199. The composition for editing the ANGPTL3 gene of clause 197, wherein the spacer sequence has at least 90% nucleotide correlation with the nucleotide sequence of a targeted protospacer on the ANGPTL3 gene.

[1356] 200. The composition for editing the ANGPTL3 gene of clause 197, wherein the spacer sequence has at least 95% nucleotide correlation with the nucleotide sequence of a targeted protospacer on the ANGPTL3 gene.

[1357] 201. The composition for editing the ANGPTL3 gene of clause 197, wherein the spacer sequence has at least 99% nucleotide correlation with the nucleotide sequence of a targeted protospacer on the ANGPTL3 gene.

[1358] 202. The composition for editing the ANGPTL3 gene of clause 197, wherein the spacer sequence has at least 100% nucleotide correlation with the nucleotide sequence of a targeted protospacer on the ANGPTL3 gene.

[1359] 203. A method for treating or preventing an atherosclerotic cardiovascular disease in a subject in need thereof, the method comprising administering to the subject a therapeutically effective amount of
[1360] (a) a mRNA encoding an adenine base editor protein having an editing window,
[1361] (b) a first guide RNA comprising a tracr sequence that serves as a binding scaffold for the base editor protein and a spacer sequence that serves to guide the base editor protein to a protospacer sequence on a PCSK9 gene, wherein the spacer sequence is complimentary, at least in part, to a splice site or an exon region of the PCSK9 gene; and
[1362] (c) a second guide RNA comprising a tracr sequence that serves as a binding scaffold for the base editor protein and a spacer sequence that serves to guide the base editor protein to a protospacer sequence on a ANGPTL3 gene, wherein the spacer sequence is complimentary, at least in part, to a splice site or an exon region of the ANGPTL3 gene.

[1363] 204. The method of clause 203, further comprising a first LNP enclosing (a).

[1364] 205. The method of clause 204, wherein the first LNP encloses (b) and (c).

[1365] 206. The method of clause 204, wherein the first LNP was administered repeatedly.

[1366] 207. The method of clause 204, wherein the first LNP was administered repeatedly at an interval of one to sixty days.

[1367] 208. The method of clause 204, wherein the first LNP was administered repeatedly at an interval of seven days.

[1368] 209. The method of clause 204, wherein the first LNP further encloses (b).

[1369] 210. The method of clause 209, further comprising a second LNP enclosing (a) and (c).

[1370] 211. The method of clause 210, wherein the first LNP and the second LNP are administered sequentially.

[1371] 212. The method of clause 211, wherein the first LNP and the second LNP are administered sequentially at an interval of one day to 12 months.

[1372] 213. The method of clause 212, wherein the interval is one day.

[1373] 214. The method of clause 212, wherein the interval is five days.

[1374] 215. The method of clause 212, wherein the interval is ten days.

[1375] 216. The method of clause 212, wherein the interval is fifteen days.

[1376] 217. The method of clause 212, wherein the interval is twenty days.

[1377] 218. The method of clause 212, wherein the interval is twenty-five days.

[1378] 219. The method of clause 212, wherein the interval is one month.

[1379] 220. The method of clause 212, wherein the interval is two months.

[1380] 221. The method of clause 212, wherein the interval is three months.

[1381] 222. The method of clause 212, wherein the interval is five months.

[1382] 223. The method of clause 212, wherein the interval is eight months.

[1383] 224. The method of clause 212, wherein the interval is ten months.

[1384] 225. The method of clause 212, wherein the interval is twelve months.

[1385] It will also be appreciated from reviewing the present disclosure, that it is contemplated that the one or more aspects or features presented in one of or a group of related clauses may also be included in other clauses or in combination with the one or more aspects or features in other clauses.

LENGTHY TABLES
The patent application contains a lengthy table section. A copy of the table is available in electronic form from the USPTO web site (https://seqdata.uspto.gov/?pageRequest=docDetail&DocID=US20240390523A1). An electronic copy of the table will also be available from the USPTO upon request and payment of the fee set forth in 37 CFR 1.19(b)(3).

1.-225. (canceled)

226. A composition comprising:
(i) an mRNA encoding a protein comprising a programmable DNA binding domain and a deaminase; and
(ii) a guide polynucleotide, wherein the guide polynucleotide comprises a spacer sequence, wherein the spacer sequence comprises at least 13 nucleotide bases of a nucleotide base sequence of a protospacer, wherein the protospacer is on a gene that encodes proprotein convertase subtilisin-kexin type 9, and wherein uracil is considered the same as thymine.

227. A composition comprising:
(i) (a) a protein comprising a programmable DNA binding domain and an adenosine deaminase, or
(b) a nucleic acid encoding the protein; and
(ii) a guide polynucleotide, wherein the guide polynucleotide comprises a spacer sequence, wherein the spacer sequence comprises at least 13 nucleotide bases of a nucleotide base sequence of a protospacer, wherein the protospacer is on a gene that encodes proprotein convertase subtilisin-kexin type 9, and wherein uracil is considered the same as thymine.

228. A composition comprising:
(i) an mRNA encoding a protein comprising a programmable DNA binding domain; and
(ii) a guide polynucleotide, wherein the guide polynucleotide comprises a spacer sequence, wherein the spacer sequence comprises at least 13 nucleotide bases of a nucleotide base sequence of a protospacer, wherein the protospacer is on a gene that encodes proprotein convertase subtilisin-kexin type 9, wherein uracil is considered the same as thymine;
wherein the spacer sequence comprises a nucleotide base sequence, wherein the nucleotide base sequence has at least 80% sequence identity to
(a) CCCGCACCUUGGCGCAGCGG (nucleotides 1 to 20 of SEQ ID NO: 9 without any chemically modified nucleotides),
(b) GGUGCUAGCCUUGCGUUCCG (nucleotides 1 to 20 of SEQ ID NO: 2254 without any chemically modified nucleotides), or
(c) UUGGAAAGACGGAGGCAGCC (nucleotides 1 to 20 of SEQ ID NO: 261 without any chemically modified nucleotides),
and wherein the uppercase A, U, G, and C represent adenosine, uridine, guanosine, and cytidine, respectively.

229. A composition comprising:
(i) an mRNA encoding a protein comprising a programmable DNA binding domain; and
(ii) a guide polynucleotide, wherein the guide polynucleotide comprises a spacer sequence, wherein the spacer sequence comprises at least 13 nucleotide bases of a nucleotide base sequence of a protospacer, wherein the protospacer is on a gene that encodes proprotein convertase subtilisin-kexin type 9, wherein uracil is considered the same as thymine;
wherein the protospacer has at least 80% sequence identity to
(a) CCCGCACCTTGGCGCAGCGG (SEQ ID NO: 13),
(b) GGTGCTAGCCTTGCGTTCCG (SEQ ID NO: 66), or
(c) TTGGAAAGACGGAGGCAGCC (SEQ ID NO: 83), and
wherein the uppercase A, U, G, and C represent adenosine, uridine, guanosine, and cytidine, respectively.

230. A composition comprising:
(i) a protein comprising a programmable DNA binding domain and a deaminase, or a nucleic acid encoding the protein; and
(ii) a guide polynucleotide comprising a tracr sequence and a spacer sequence, wherein the spacer sequence comprises at least 13 nucleotide bases of a nucleotide base sequence of a protospacer, wherein the protospacer is on a gene that encodes proprotein convertase subtilisin-kexin type 9, wherein uracil is considered the same as thymine;
wherein the tracr sequence comprises a nucleotide base sequence, wherein the nucleotide base sequence has at least 80% sequence identity to a functional portion of a nucleotide base sequence of GUUUUAGAGCUAGAAAUAGCAAGUUAAAAUAAGGCUAGUCCGUUAUCAAC UUGAAAAAGUGGCACCGAGUCGGUGCUUUU (SEQ ID NO: 61), and
wherein the uppercase A, U, G, and C represent adenosine, uridine, guanosine, and cytidine, respectively.

231. A composition comprising:
(i) a protein comprising a programmable DNA binding domain, or a nucleic acid encoding the protein; and
(ii) a guide polynucleotide, wherein the guide polynucleotide comprises a spacer sequence, wherein the spacer sequence comprises at least 13 nucleotide bases of a nucleotide base sequence of a protospacer, wherein the protospacer is on a gene that encodes proprotein convertase subtilisin-kexin type 9, wherein uracil is considered the same as thymine;
wherein the protein effects a nucleobase pair alteration in the gene that encodes proprotein convertase subtilisin-kexin type 9 and wherein the nucleobase pair alteration is A•T to G•C.

232. A method comprising administering to a subject a therapeutically effective amount of a composition comprising:
(i) an mRNA encoding a protein comprising a programmable DNA binding domain and a deaminase; and
(ii) a guide polynucleotide, wherein the guide polynucleotide comprises a spacer sequence, wherein the spacer sequence comprises at least 13 nucleotide bases of a nucleotide base sequence of a protospacer, wherein the protospacer is on a gene that encodes proprotein convertase subtilisin-kexin type 9, and wherein uracil is considered the same as thymine.

233. A method comprising administering to a subject a therapeutically effective amount of a composition comprising:
(i) a fusion protein comprising a programmable DNA binding domain and an adenosine deaminase, or a nucleic acid encoding the fusion protein; and
(ii) a guide polynucleotide, wherein the guide polynucleotide comprises a spacer sequence, wherein the spacer sequence comprises at least 13 nucleotide bases of a nucleotide base sequence of a protospacer, wherein the protospacer is on a gene that encodes proprotein convertase subtilisin-kexin type 9, and wherein uracil is considered the same as thymine.

234. A method comprising administering to a subject a therapeutically effective amount of a composition comprising:
(i) an mRNA encoding a protein comprising a programmable DNA binding domain; and
(ii) a guide polynucleotide, wherein the guide polynucleotide comprises a spacer sequence, wherein the spacer sequence comprises at least 13 nucleotide bases of a nucleotide base sequence of a protospacer, wherein the protospacer is on a gene that encodes proprotein convertase subtilisin-kexin type 9, wherein uracil is considered the same as thymine, and
wherein the subject is an adult human.

235. A method comprising:
a) administering to a subject a therapeutically effective amount of a composition comprising:
(i) a protein comprising a programmable DNA binding domain, or a nucleic acid encoding the protein; and
(ii) a guide polynucleotide, wherein the guide polynucleotide comprises a spacer sequence, wherein the spacer sequence comprises at least 13 nucleotide bases of a nucleotide base sequence of a protospacer, wherein the protospacer is on a gene that encodes proprotein convertase subtilisin-kexin type 9, wherein uracil is considered the same as thymine;
b) altering a nucleobase pair from A•T to G•C.

236. A method of treating a subject, comprising administering to the subject a therapeutically effective amount of a composition comprising:
(i) a protein comprising a programmable DNA binding domain, or a nucleic acid encoding the protein; and
(ii) a guide polynucleotide, wherein the guide polynucleotide comprises a spacer sequence, wherein the spacer sequence comprises at least 13 nucleotide bases of a nucleotide base sequence of a protospacer, wherein the protospacer is on a gene that encodes proprotein convertase subtilisin-kexin type 9, wherein uracil is considered the same as thymine;
wherein the subject has heterozygous familial hypercholesterolemia.

237. The composition of claim 226, wherein the programmable DNA binding domain is selected from DNA binding domains found in the group consisting of Cas9, CasX, CasY, Cas12a (Cpf1), Cas12b, C2c1, C2c2, C2C3, zinc finger nuclease (ZFN), Transcription activator-like effector nucleases (TALEN), and Argonaute.

238. The composition of claim 226, wherein the programmable DNA binding domain is selected from DNA binding domains found in the group consisting of a nuclease inactive spCas9 domain and a spCas9 nickase.

239. The composition of claim 226, wherein the guide polynucleotide is a guide RNA.

240. The composition of claim 227, wherein the nucleic acid encoding the protein is an mRNA.

241. The composition of claim 226, wherein the ratio of the guide nucleotide and the mRNA is from about 1:10 to about 10:1 by weight.

242. The composition of claim 226, wherein the ratio of the guide nucleotide and the mRNA is from about 1:3 to about 3:1 by weight.

243. The composition of claim 226, wherein the ratio of the guide nucleotide and the mRNA is from about 1:2 to about 2:1 by weight.

244. The composition of claim 226, wherein the ratio of the guide nucleotide and the mRNA from about 1:1.5 to about 1.5:1 by weight.

245. The composition of claim 226, wherein the ratio of the guide nucleotide and the mRNA is about 1:1 by weight.

246. The composition of claim 230, wherein the tracr sequence has at least 80% identity to any of the following chemically modified sequences:
(a) gUUUUAGagcuaGaaauagcaaGUUaAaAuAaggCUaGUCcGUUAucAAcuuGa aaaaguGgcaccgAgUCggugcusususu (SEQ ID NO: 57),
(b) gUUUUAGagcuagaaauagcaaGUUaAaAuAaggcuaGUccGUUAucAAcuugaaa aagugGcaccgagucggugcusususu (SEQ ID NO: 2249), or
(c) gUUUUAGagcuaGaaauagcaaGUUaAaAuAaggcuaGUccGUUAucAAcuuGaa aaagugGcaccgagucggugcusususu (SEQ ID NO: 3164), and
wherein 1) the uppercase A, U, G, and C represent adenosine, uridine, guanosine, and cytidine, respectively; 2) the lowercase a, u, g, and c represent 2′-O-Methyl-modified adenosine, uridine, guanosine, and cytidine, respectively, and 3) the lowercase s represents phosphorothioate (PS) linkage.

247. The composition of claim 231, wherein the nucleobase pair alteration is at a splice donor site of the gene that encodes proprotein convertase subtilisin-kexin type 9.

248. The composition of claim 247, wherein the splice donor site is at 5′ end of intron 1 of the gene that encodes proprotein convertase subtilisin-kexin type 9 as referenced in SEQ ID NO: 5.

249. The composition of claim 231, wherein the nucleobase pair alteration is at nucleotide 571 of the gene that encodes proprotein convertase subtilisin-kexin type 9 as referenced in SEQ ID NO: 5.

250. The composition of claim 226, wherein the spacer sequence has at least 80% identity to any of the following chemically modified sequences:
(a) cscscsGCACCUUGGCGCAGCGG (nucleotides 1 to 20 of SEQ ID NO: 9)
(b) gsgsusGCUAGCCUUGCGUUCCG (nucleotides 1 to 20 of SEQ ID NO: 2254), or
(c) ususgsGAAAGACGGAGGCAGCC (nucleotides 1 to 20 of SEQ ID NO: 261), and
wherein 1) the uppercase A, U, G, and C represent adenosine, uridine, guanosine, and cytidine, respectively; 2) the lowercase a, u, g, and c represent 2′-O-Methyl-modified adenosine, uridine, guanosine, and cytidine, respectively, and 3) the lowercase s represents phosphorothioate (PS) linkage.

251. The composition of claim 226, wherein the protospacer has at least 80% sequence identity to
(a) CCCGCACCTTGGCGCAGCGG (SEQ ID NO: 13),
(b) GGTGCTAGCCTTGCGTTCCG (SEQ ID NO: 66), or
(c) TTGGAAAGACGGAGGCAGCC (SEQ ID NO: 83), and
wherein the uppercase A, U, G, and C represent adenosine, uridine, guanosine, and cytidine, respectively.

252. A composition comprising:
(i) an mRNA encoding a base editor protein comprising a DNA binding domain and a deaminase, wherein the mRNA comprises a sequence having at least 90% sequence identity to SEQ ID NO: 2148; and
(ii) a guide polynucleotide comprises a chemically modified sequence specified in SEQ ID NO: 2235.

253. A composition comprising:
(i) an mRNA encoding a base editor protein comprising a DNA binding domain and a deaminase, wherein the mRNA comprises a sequence having at least 90% sequence identity to SEQ ID NO: 2148; and
(ii) a guide polynucleotide comprises a chemically modified sequence specified in SEQ ID NO: 2254.

254. A composition comprising:
(i) an mRNA encoding a base editor protein comprising a DNA binding domain and a deaminase, wherein the mRNA comprises a sequence having at least 90% sequence identity to SEQ ID NO: 2148; and
(ii) a guide polynucleotide comprises a chemically modified sequence specified in SEQ ID NO: 261.

255. A composition comprising:
(i) an mRNA encoding a base editor protein comprising a DNA binding domain and a deaminase, wherein the mRNA comprises a sequence having at least 90% sequence identity to SEQ ID NO: 2153; and
(ii) a guide polynucleotide comprises a chemically modified sequence specified in SEQ ID NO: 2235.

256. A composition comprising:
(i) an mRNA encoding a base editor protein comprising a DNA binding domain and a deaminase, wherein the mRNA comprises a sequence having at least 90% sequence identity to SEQ ID NO: 2153; and
(ii) a guide polynucleotide comprises a chemically modified sequence specified in SEQ ID NO: 2254.

257. A composition comprising:
(i) an mRNA encoding a base editor protein comprising a DNA binding domain and a deaminase, wherein the mRNA comprises a sequence having at least 90% sequence identity to SEQ ID NO: 2153; and
(ii) a guide polynucleotide comprises a chemically modified sequence specified in SEQ ID NO: 261.

258. A composition comprising:
(i) an mRNA encoding a base editor protein comprising a DNA binding domain and a deaminase, wherein the mRNA comprises a sequence having at least 90% sequence identity to SEQ ID NO: 2192; and
(ii) a guide polynucleotide comprises a chemically modified sequence specified in SEQ ID NO: 2235.

259. A composition comprising:
(i) an mRNA encoding a base editor protein comprising a DNA binding domain and a deaminase, wherein the mRNA comprises a sequence having at least 90% sequence identity to SEQ ID NO: 2192; and
(ii) a guide polynucleotide comprises a chemically modified sequence specified in SEQ ID NO: 2254.

260. A composition comprising:
(i) an mRNA encoding a base editor protein comprising a DNA binding domain and a deaminase, wherein the mRNA comprises a sequence having at least 90% sequence identity to SEQ ID NO: 2192; and
(ii) a guide polynucleotide comprises a chemically modified sequence specified in SEQ ID NO: 261.

261. A composition comprising:
(i) an mRNA comprises
a) a 5′ untranslated region,
b) a first region encoding a deaminase, wherein the deaminase comprises a protein selected from the group consisting of an adenosine deaminase and a cytidine deaminase,
c) a second region encoding a programmable DNA binding domain, wherein the programmable DNA binding domain is selected from DNA binding domains found in the group consisting of Cas9, CasX, CasY, Cas12a (Cpf1), Cas12b, C2c1, C2c2, C2C3, zinc finger nuclease (ZFN), Transcription activator-like effector nucleases (TALEN), and Argonaute,
d) a third region encoding a nuclear localization sequence, wherein the nuclear localization sequence comprises a sequence selected from the group consisting of SEQ ID Nos: 27, 28 and 2146, or the third region comprises a sequence selected from the group consisting of SEQ ID Nos: 2145, 2167, 2173 and 2179, and
e) a 3′ untranslated region, and
(ii) a guide polynucleotide comprises a spacer sequence and a tracr sequence,
a) wherein the spacer sequence comprises a chemically modified sequence selected from the group consisting of:
a. cscscsGCACCUUGGCGCAGCGG (nucleotides 1 to 20 of SEQ ID NO: 9)
b. gsgsusGCUAGCCUUGCGUUCCG (nucleotides 1 to 20 of SEQ ID NO: 2254), and
c. ususgsGAAAGACGGAGGCAGCC (nucleotides 1 to 20 of SEQ ID NO: 261), and
b) wherein the tracr sequence comprises a chemically modified sequence selected from the group consisting of:
a. gUUUUAGagcuaGaaauagcaaGUUaAaAuAaggCUaGUCcGUUAucAAcu uGaaaaaguGgcaccgAgUCggugcusususu (SEQ ID NO: 57),
b. gUUUUAGagcuagaaauagcaaGUUaAaAuAaggcuaGUccGUUAucAAcuug aaaaagugGcaccgagucggugcusususu (SEQ ID NO: 2249), and
c. gUUUUAGagcuaGaaauagcaaGUUaAaAuAaggcuaGUccGUUAucAAcuu GaaaaagugGcaccgagucggugcusususu (SEQ ID NO: 3164), and
wherein 1) the uppercase A, U, G, and C represent adenosine, uridine, guanosine, and cytidine, respectively; 2) the lowercase a, u, g, and c represent 2′-O-Methyl-modified adenosine, uridine, guanosine, and cytidine, respectively, and 3) the lowercase s represents phosphorothioate (PS) linkage.

262. The composition of claim 261, wherein
a. the 5′ untranslated region comprises a sequence of SEQ ID NO: 2138;
b. the 3′ untranslated region comprises a sequence of SEQ ID NO: 2147;
c. (1) the deaminase comprises a sequence of SEQ ID NO: 2140, or
(2) the first region encoding the deaminase comprises a sequence selected from the group consisting of SEQ ID Nos: 2139, 2162, 2169 and 2175; or
d. (1) the programmable DNA binding domain comprises a sequence selected from the group consisting of SEQ ID NO: 40, 2152, 2156 and 2160, or
(2) the second region encoding the programmable DNA binding domain comprises a sequence selected from the group consisting of SEQ ID Nos: 2142, 2151, 2155, 2159, 2164, 2171 and 2177.

263. The composition of claim 226, wherein the spacer sequence comprises at least 19 nucleotide bases of the nucleotide base sequence of the protospacer.

264. The composition of claim 226, wherein the spacer sequence comprises at least 20 nucleotide bases of the nucleotide base sequence of the protospacer.

265. The composition of claim 226, wherein the spacer sequence comprises at least 21 nucleotide bases of the nucleotide base sequence of the protospacer.

The application's sequence listing, which the Patent Office published only in electronic form, follows.

SEQUENCE LISTING (3201 sequences)

SEQ ID NO: 1 - protein, 167 aa, Escherichia coli
MSEVEFSHEYWMRHALTLAKRAWDEREVPVGAVLVHNNRVIGEGWNRPIGRHDPTAHAEIMALRQGGLVMQNYRLIDATLYVTLEPCVMCAGAMIHSRIGRVVFGARDAKTGAAGSLMDVLHHPGMNHRVEITEGILADECAALLSDFFRMRRQEIKAQKKAQSSTD

SEQ ID NO: 2 - skipped

SEQ ID NO: 3 - protein, 1566 aa, synthetic construct
MSEVEFSHEYWMRHALTLAKRARDEREVPVGAVLVLNNRVIGEGWNRAIGLHDPTAHAEIMALRQGGLVMQNYRLIDATLYVTFEPCVMCAGAMIHSRIGRVVFGVRNAKTGAAGSLMDVLHHPGMNHRVEITEGILADECAALLCRFFRMPRRVFNAQKKAQSSTDSGGSSGGSSGSETPGTSESATPESSGGSSGGSDKKYSIGLAIGTNSVGWAVITDEYKVPSKKFKVLGNTDRHSIKKNLIGALLFDSGETAEATRLKRTARRRYTRRKNRICYLQEIFSNEMAKVDDSFFHRLEESFLVEEDKKHERHPIFGNIVDEVAYHEKYPTIYHLRKKLVDSTDKADLRLIYLALAHMIKFRGHFLIEGDLNPDNSDVDKLFIQLVQTYNQLFEENPINASGVDAKAILSARLSKSRRLENLIAQLPGEKKNGLFGNLIALSLGLTPNFKSNFDLAEDAKLQLSKDTYDDDLDNLLAQIGDQYADLFLAAKNLSDAILLSDILRVNTEITKAPLSASMIKRYDEHHQDLTLLKALVRQQLPEKYKEIFFDQSKNGYAGYIDGGASQEEFYKFIKPILEKMDGTEELLVKLNREDLLRKQRTFDNGSIPHQIHLGELHAILRRQEDFYPFLKDNREKIEKILTFRIPYYVGPLARGNSRFAWMTRKSEETITPWNFEEVVDKGASAQSFIERMTNFDKNLPNEKVLPKHSLLYEYFTVYNELTKVKYVTEGMRKPAFLSGEQKKAIVDLLFKTNRKVTVKQLKEDYFKKIECFDSVEISGVEDRFNASLGTYHDLLKIIKDKDFLDNEENEDILEDIVLTLTLFEDREMIEERLKTYAHLFDDKVMKQLKRRRYTGWGRLSRKLINGIRDKQSGKTILDFLKSDGFANRNFMQLIHDDSLTFKEDIQKAQVSGQGDSLHEHIANLAGSPAIKKGILQTVKVVDELVKVMGRHKPENIVIEMARENQTTQKGQKNSRERMKRIEEGIKELGSQILKEHPVENTQLQNEKLYLYYLQNGRDMYVDQELDINRLSDYDVDHIVPQSFLKDDSIDNKVLTRSDKNRGKSDNVPSEEVVKKMKNYWRQLLNAKLITQRKFDNLTKAERGGLSELDKAGFIKRQLVETRQITKHVAQILDSRMNTKYDENDKLIREVKVITLKSKLVSDFRKDFQFYKVREINNYHHAHDAYLNAVVGTALIKKYPKLESEFVYGDYKVYDVRKMIAKSEQEIGKATAKYFFYSNIMNFFKTEITLANGEIRKRPLIETNGETGEIVWDKGRDFATVRKVLSMPQVNIVKKTEVQTGGFSKESILPKRNSDKLIARKKDWDPKKYGGFDSPTVAYSVLVVAKVEKGKSKKLKSVKELLGITIMERSSFEKNPIDFLEAKGYKEVKKDLIIKLPKYSLFELENGRKRMLASAGELQKGNELALPSKYVNFLYLASHYEKLKGSPEDNEQKQLFVEQHKHYLDEIIEQISEFSKRVILADANLDKVLSAYNKHRDKPIREQAENIIHLFTLTNLGAPAAFKYFDTTIDRKRYTSTKEVLDATLIHQSITGLYETRIDLSQLGGD

SEQ ID NO: 4 - DNA, 4764 bp, synthetic construct
  source 1..4764: mol_type = other DNA
atgagcgaggtcgagttctctcacgaatattggatgagacacgctctcaccctggctaagagagccagggacgaaagagaggtgccagttggcgctgtcctggtgttgaacaatcgcgtcatcggagaaggatggaatcgcgccattggcctgcacgatccaaccgcacatgccgaaattatggctctgcggcaaggcggcctcgtgatgcaaaattacagactgatcgatgctaccctctacgtcaccttcgagccctgtgtcatgtgtgctggggcaatgattcactcccggattggccgcgtggtgtttggagtgcggaatgccaagactggcgccgctggatctctgatggacgtcctgcaccatcctgggatgaaccaccgggtcgagatcacagagggaattctggctgacgagtgcgctgccctgctgtgcaggttctttagaatgcctagaagggtgttcaacgcccagaaaaaagctcagagcagcaccgattccggcggaagcagcggaggatcttctggaagcgaaaccccaggcaccagcgagtctgccacaccagaatcatctggcggtagctccggcggcagcgacaagaagtattctatcggactggccatcggcaccaactctgttggatgggccgtgatcaccgacgagtacaaggtgcccagcaagaaattcaaggtgctgggcaacaccgacaggcacagcatcaagaagaacctgatcggcgcactgctgttcgactctggcgaaacagccgaggccaccagactgaagagaacagcccgcagacggtacaccagaagaaagaaccggatctgctacctccaagagatcttcagcaacgagatggccaaggtggacgacagcttcttccacagactggaagagtccttcctggtggaagaggacaagaagcacgagagacaccccatcttcggcaacatcgtggacgaggtggcctaccacgagaagtaccccaccatctaccacctgagaaagaaactggtggacagcaccgacaaggccgacctgagactgatctatctggccctggctcacatgatcaagttccggggccacttcctgatcgagggcgacctgaatcctgacaacagcgacgtggacaagctgttcatccagctggtgcagacctacaaccagctgttcgaggaaaaccccatcaacgccagcggagtggatgccaaggccatcctgtctgccagactgagcaagagcagacggctggaaaatctgatcgcccagctgcctggcgagaagaagaatggcctgttcggcaacctgattgccctgagcctgggcctgacacctaacttcaagagcaacttcgacctggccgaggacgccaaactgcagctgagcaaggacacctacgacgacgacctggacaatctgctggcccagatcggcgatcagtacgccgacttgtttctggccgccaagaatctgagcgacgccatcctgctgtccgacatcctgagagtgaacaccgagatcaccaaggcacctctgagcgcctctatgatcaagagatacgacgagcaccaccaggatctgaccctgctgaaggccctcgttagacagcagctgccagagaagtacaaagagattttcttcgaccagagcaagaacggctacgccggctacattgatggcggagccagccaagaggaattctacaagttcatcaagcccatcctcgagaagatggacggcaccgaggaactgctggtcaagctgaacagagaggacctgctgagaaagcagagaaccttcgacaacggcagcatccctcaccagatccacctgggagaactgcacgccattctgcggagacaagaggacttttacccattcctgaaggacaaccgggaaaagatcgagaaaatcctgaccttcaggatcccctactacgtgggaccactggccagaggcaatagcagattcgcctggatgaccagaaagagcgaggaaaccatcactccctggaacttcgaggaagtggtggacaagggcgccagcgctcagtccttcatcgagcggatgaccaacttcgataagaacctgcctaacgagaaggtgctgcccaagcacagcctgctgtacgagtacttcaccgtgtacaacgagctgaccaaagtgaaatacgtgaccgagggaatgagaaagcccgcctttctgagcggcgagcagaaaaaggccatcgtggatctgctgttcaagaccaaccggaaagtgaccgtgaagcagctgaaagaggactacttcaagaaaatcgagtgcttcgacagcgtcgagatctccggcgtggaagatcggttcaatgccagcctgggcacataccacgatctgctgaaaattatcaaggacaaggacttcctggacaacgaagagaacgaggacatccttgaggacatcgtgctgacactgaccctgtttgaggacagagagatgatcgaggaacggctgaaaacatacgcccacctgttcgacgacaaagtgatgaagcaactgaagcggcggagatacaccggctggggcagactgtctcggaagctgatcaacggcatccgggataagcagtccggcaagaccatcctggactttctgaagtccgacggcttcgccaacagaaacttcatgcagctgattcacgacgacagcctcaccttcaaagaggatatccagaaagcccaggtgtccggccagggcgattctctgcatgagcacattgccaacctggccggctctcccgccattaagaaaggcatcctgcagacagtgaaggtggtggacgagcttgtgaaagtgatgggcagacacaagcccgagaacatcgtgatcgaaatggccagagagaaccagaccacacagaagggacagaagaacagccgcgagagaatgaagcggatcgaagagggcatcaaagagctgggcagccagatcctgaaagaacaccccgtggaaaacacccagctgcagaacgagaagctgtacctgtactacctgcagaatggacgggatatgtacgtggaccaagagctggacatcaacagactgtccgactacgatgtggaccatatcgtgccccagtcttttctgaaggacgactccatcgacaacaaggtcctgaccagatccgacaagaatcggggcaagagcgacaacgtgccctccgaagaggtggtcaagaagatgaagaactactggcgacagctgctgaacgccaagctgattacccagcggaagttcgacaatctgaccaaggccgaaagaggcggcctgagcgaactggataaggccggcttcatcaagagacagctggtggaaacccggcagatcacaaagcacgtggcacagattctggactctcggatgaacactaagtacgacgagaacgacaaactgatccgcgaagtgaaagtcatcaccctgaagtccaagctggtgtccgatttccggaaggatttccagttctacaaagtgcgcgagatcaacaactaccatcacgcccacgacgcctacctgaatgccgttgttggaacagccctgatcaaaaagtaccctaagctggaaagcgagttcgtgtacggcgactacaaggtgtacgacgtgcggaagatgatcgccaagagcgagcaagagattggcaaggcaaccgccaagtacttcttctacagcaacatcatgaactttttcaagacagagatcaccctcgccaacggcgagatcagaaagcggcctctgatcgagacaaacggcgaaaccggcgagattgtgtgggataagggcagagactttgccacagtgcggaaagtgctgagcatgccccaagtgaatatcgtgaagaaaaccgaggtgcagacaggcggcttcagcaaagagtctatcctgcctaagcggaactccgacaagctgatcgccagaaagaaggactgggaccccaagaagtacggcggcttcgattctcctaccgtggcctatagcgtgctggtggtggccaaagtggaaaagggcaagtccaagaaactcaagagcgtgaaagagctgctggggatcaccatcatggaaagaagcagcttcgagaagaatccgatcgatttcctcgaggccaagggctacaaagaagtgaaaaaggacctgatcatcaagctccccaagtactccctgttcgagctggaaaacggccggaagagaatgctggcctctgctggcgaactgcagaagggaaacgaactggccctgcctagcaaatatgtgaacttcctgtacctggccagccactatgagaagctgaagggcagccccgaggacaatgagcaaaagcagctgtttgtggaacagcacaagcactacctggacgagatcatcgagcagatcagcgagtttagcaagagagtgattctggccgacgccaatctggacaaagtgctgtccgcctacaacaagcaccgggacaagcctatcagagagcaggccgagaatatcatccacctgtttaccctgaccaacctgggagcccctgccgccttcaagtactttgacaccaccatcgaccggaagcggtacacctccaccaaagaggtgctggacgccactctgatccaccagtctatcaccggcctgtacgagacacggatcgacctgtctcaactcggaggcgacgaaggcgccgataagagaaccgccgatggctctgagttcgagagccccaagaaaaagcgcaaagtg

SEQ ID NO: 5 - DNA, 25378 bp, Homo sapiens
  source 1..25378: mol_type = genomic DNA
gtccgatggggctctggtggcgtgatctgcgcgccccaggcgtcaagcacccacaccctagaaggtttccgcagcgacgtcgaggcgctcatggttgcaggcgggcgccgccgttcagttcagggtctgagcctggaggagtgagccaggcagtgagactggctcgggcgggccgggacgcgtcgttgcagcagcggctcccagctcccagccaggattccgcgcgccccttcacgcgccctgctcctgaacttcagctcctgcacagtcctccccaccgcaaggctcaaggcgccgccggcgtggaccgcgcacggcctctaggtctcctcgccaggacagcaacctctcccctggccctcatgggcaccgtcagctccaggcggtcctggtggccgctgccactgctgctgctgctgctgctgctcctgggtcccgcgggcgcccgtgcgcaggaggacgaggacggcgactacgaggagctggtgctagccttgcgttccgaggaggacggcctggccgaagcacccgagcacggaaccacagccaccttccaccgctgcgccaaggtgcgggtgtagggatgggaggccggggcgaacccgcagccgggacggtgcggtgctgtttcctctcgggcctcagtttccccccatgtaagagaggaagtggagtgcaggtcgccgagggctcttcgcttggcacgatcttggggactgcaggcaaggcggcgggggaggacgggtagtggggagcacggtggagagcggggacggccggctctttggggacttgctggggcgtgcggctgcgctattcagtgggaaggttcgcggggttgggagacccggaggccgaggaagggcgagcagagcactgccaggatatcctgcccagatttcccagtttctgcctcgccgcggcacaggtgggtgaaggagtgaatgcctggaacgtactgggaactgcaccaggcacagagaaagcgggcttgccattatagtgggttccgatttggtttggaaaacatgggcagcggagggtggagggcctggagagaaggccctacccgagacaggggcggggtgggaaggacggcagatgctgggagcacgaggcaatttctttatgacacagaactcatgctctagtattccatctgtttcagccgaagaaaagaaccagctgaaggggcaggggagaaggggcggaggtattctcgaggcccattggcgtcctttaggactcaggcagggaagggcccttggtgctctggagccggaggtggtgcgcctggtactgggaccccggagctgagcccggcgcctcagcccacctggctgtctgccgaccgtgtgcggggcgagtttgctcaacaactctgccagcttctggccctcaggctgtgggaagcttcttcccggggcgagaccactagctttttctaagtattaccagcccaggacttggctgaggttctgtgtcccccagcttggagtcagatgtggggttgaatcttggcttcctctcactagctgtggtgcttgacaagtcacttatccttgagcctccattgcctaatctttaaaagggaggtgacaatcgtccctacggctcagtggcagcagatggggagatgaagggaaagttctgttgaccatgagtgaacttacaatgcaagccccggggggatcacttgcagttttgtccctgtctgcagtgtgacctgttggtgacattgtctttgctccaaaccacagctcctggggcagaggggaaaattctgccactcacagctgcctgcccacgcttctgtctgagtgtgctgggtggcaggatggcaagtccttactcagctcagtatagccctcttccttgttccctgagcctttgactttctcgagggatgttgtggggttgtggccaggataagaaagggcatttcaagttaccactgctccaaaacaactgttctggaaatagtgagtaccccatcctgagaggtgagtaagcagaggctgtatgaccacctgaaccaagcccttgaggatgtttcttctctggtggaagtttggaacaggagcctcctcaagttcatttattcattcattcaatggttattttgtgggaatcgaatttagaatgaaaatattttttggcaagcagaaaataatttttagaccaatccttttcttttagtcatgagaaactgaggcccagagagaggaggtcaccccaggtgcattagaactgggtttccagaactgacactccactgcacagagtactctcccaattcattcaatttttatttagcggaaggcattttcagatgggtctttgaagcattagtaggagttcagcgatgatggtgtcatgagaattttattctaggattaggaggtaccatgaacaaagatacagagctgggaaaaccagaggtggaagataaggagcacatgtccacagttctttttcttttttttttgagatggagtttcgctcttgttgcccaggctggagtgcaatggtgcagtctcagctcactgcaacatctgtctcccgggttcaagtggttctcctgcctcagcctcccaagaagctgggattacaggtacctgccaccacgcccggctaatttttgtatttttagtagagaaggggtttcaccacgttggccaggctagtcgcaaactcctgacctcctcagtggatccgaggaggtgatcctcccgcctcagcctcccaaagtgctcgaattacaggtgtgagccaccacgcctggcctccacagttctttatccaccgtctgaaatgtaaaatgttacgaaaaccaaaagttttttttgtgatttatttgatggtagcacctgacgtgaactgacatgagattatttttaatttagttgtgtgaatatgcatattcatatattttgctgcatagattacagtatgcagctccagattcttccaagcagactctgattgcccattactgcctttctaaaatccaaacaagttctgaggttcaaaaccgttttggccctaaggctttgggtaaagggggtggactctgttctactctgactggagtccaagatgcatatatacagagatatgggtgatggggctgcaaggtaggttgaggtaggggccaaggaggagcatggagtttggacttgattcatgaggctgtggggagccagtgaaggttcttaagcaggtatgtctgcctgagagcagttggagcagacaagagctaaaaaccaaacaaatcaccatagatagtggctgctataatttgtttgtcccctccaaatctcatgtggaaatttggtcctcagtgttggaagtggggcctaatgggaggtgtttgggtcatgggggaggaacccctgtgaaaggcttggtgccgtccttgtgataatgagtaagttctcccgctatgatttcccttgaaggctgattattaaaaagagcttggcacctccctctcttctctcttgcttcttctcttgccatgtgattgatctctgcacatgtaggctccccttcaccttctgccatcagtgaaagcagcttaaggccctcaccagaagcagatgctggtgccatgcttcctggagagcttgcagaatcatgagctgaataaatcccttttccttgtaaattactcaccttcaggtattcctttatatagcaacacaaaaggactaagacagtggccttgacttttctctctctttaagaagtgttgcctttgctcacttagtcatcccttctgcctgcatttgtagagcatctggatgggagatttatataaccgtcactcttgactttcccagcaggcctatgtcataggtactgtggtctctacaatacagcagaggtatctgaggctccgagaggttgagtgacttgctcatggctgcacaaccagtaaatattggagctggaattcaggtccacggtttcctggctccaaagcccatgattttttccctcaatttattctgactggggcatgggggagggggtggcctttgggcagggccaccaggagcgaccaggcccgtagagagctgggtgcaggtacagaggaaaacctgttgtcgagtgtggcccgtagttcccatttttgcctgaatggcacatttgaaagtgttatataaccatgtgaataataatagttggcctatatgagttctttaatttgctttttggtccgcatttggtaacttctttatcatctactatactctgttgtgtctcttttgttgtaatttgtaagtaggggtgagataaagtacacctagggtttgctgggtttcttccatgtcatcatgttcctccttgcatggggccaggatccgtggaggttgcctggcacctacgtggtggtgctgaaggaggagacccacctctcgcagtcagagcgcactgcccgccgcctgcaggcccaggctgcccgccggggatacctcaccaagatcctgcatgtcttccatggccttcttcctggcttcctggtgaagatgagtggcgacctgctggagctggtgagccaccctttttgggaatggcacttcctgatagggctgggccactgcatatacactggggactgtgcttagtaggcccattgctgaaaatcagaaggggacagcaagtatgtattgagcacttatcgggtaccaagcacagtaactactggctttctgtatagaattccctttaagcctggccatgccccagtggtacgtctatcttcatttgaaagacgaggagactgaagttcagaggggaccacacagacagctaggggtagagcctggatcaaacccattggtctgcctgccagccattcttgtgccaatgcatctgctgcctacggaaacctgtagggacaaggccctgggatgttcagtggagcctgagtcattttataaaaaagcatgactctagggtccaaaattcctttgaagctgttgctatccagagtgaagtcccttctttaggacagggtggccctcctccctcctggatgtcacatcttcggtggaggggcagaaaggggactgggtattctcctcaccctggccctagtgcttcaaatcttaaaaaaacgtttttatttgtgcttctgcaccaccttctagcccacctcgtttcctggcctctaacttgatgagagcgtgtgtcattttcacactgattctccacatggcaggcggtgcttcttagcctcctgcagacagtgaggccccacggtcttgtccaaggtcacacagcgtgtaatgggcagggtcagagtctggagtctggacctgggtctcctagctgcactgcactgctgccccatgggttaatcagctcagcataccgtggctgaacagctacctcataccaaggcctgtggcgccatgacagggattgacagggtccctgccttggaaacccgtagtctaagtagaggagactgacaagtcaatgccttccatcagtctgctcaacacacgtttaccaagtgcctactgtgtgctgcagaggcgaagatgacacagctcaggcctttcccttgagcttacagttcaggaggagagactgaccagtgactgccagtacagttgactatgggacaatgtgctcagccttggggagagacgaagaaggtacccgtatagcaccagatgacaggcacgagccccacaggccagggcagctgctcagaggagagtaggccaagcagaaggcaaacagaaggctgcaggcatttgccatcgagagctggacttcaaactgggcatcataccagcctgggttcgagtcctgcccagccccttattggctgtctaaccctgagcaaatcccttcacctctctgagcctcattcctctatctgtaaaccagttataataattggaacattcatttaaggactaaatgaggtcgtgaagcattcagcagatgctaggtacggaaactcgctgaagtgggggcaggttaagaagcctctggggatacgaaggcatccagggactagttgtggcaggaggctgttaccacttaggtctgaagggtaaggagagggaatagctttccctctgcccagttggagccggtggcatggaggagaggctgcctgtggggaatcacccgagggttcaccgctgccatgcgcagggagtcaggaggtagggagggagtggggcagatgcacaccatttttttttttttttgagactctgttgcccagactggagtgcagtggtgccatatctgcacctctgcctcccgggttcaagctcactgcaacctctgcctcccgggttcaagcgattctcctgcctcagcctcccgagtagctgggactacaggtgtgtgccaccatgcctggctaatttttgtatttttaatagagatggggtttcaccatgttggccaggctggtctcgaactctcgacctcaggtgatcccccacctcggcctcccaaagtgctgggattacaggcgtgagtcaccgctcccagctgctgatgcactcttgtccttctaactcctgctagtgcctcccattggctgagcccaactggaagctttgcaagggagctggtgctgcagtttgcactgagcaggctggagaaggctggagaatagactaggggacaaaccgaattgccagtgctgttatgtcatgatttaggcatggagtccagggcctgagcttcactccatgtccatcctgcccagagccttggcacagcctggctcccagacaagatgtcaagttcagaatccttcctaaaaggaatcctctatgccagaccgtgttgcagggatatgggagtgctgggctcccagcctgatcaaggagcgagaaaactcaggctcctagtctgtcctccggggcactagcagggacaaggtgggaggctgctgggctgggatgtggggacaggtttgatcaggtaaggccaggctgtggctgtgtttgctgctgtccaaatggcttaagcagagtcccccggcctctctggcttctgcaggccttgaagttgccccatgtcgactacatcgaggaggactcctctgtctttgcccagagcatcccgtggaacctggagcggattacccctccacggtaccgggcggatgaataccagccccccggtaagacccccatctgtgccctgccccaccccatctgagctgaatccatttgctctgccctggcctggcctccctgctggtggtttccacttctcggggggctttgggactcagcacctccactgacccctttttttctgtcccatccccatcccctgcagcccccactgcctgccttcctgttgccccacaaatgcaaaagtcttgccttaaatgatcctcttttccttcttttctcttgttttccttttctcaccatttggaatggcccagcaggctgcacttaccttggaaggagggttcatctgatggtgactctacctagggcccccaggcctctataactcccagtgccctgcagactggaccagatcctttaatgggatagacacaaccctgtctgggatgcctctgcctaccttcctgttttgctgctccacctgcctccagctccgtttggcttcctggggctccctgcctgggccactttgtgtcttccctctaggcctttctttccactgttccctctgcctggtgtggcctggctatggaagggagggaggaggagcggccatggaaaacggtctgcattctagcagggacttgcaggtggcaattcagtcggggaagactctagatgcacctggcctgaggagagaatgaagggttctagttggactgtgttaagtttgaggtgcccatggtgtgaggtctggagctcagcgcagagatgatgcaatgtggtgggtccatgcaacatggtgccaggacgcagagcttggggtgaactcagctttcaccccttaccggttctcgtgggatcttgggaagccactttcttctatgagctttgtcgttcttgtctgtaaaatgggcacataaccctgtccctgtccttctcacaggttgctgtgagactccaatgagttgaaggatgtgcagatgcttttggaagtgaaaagttggggggctactgtgtgactttgcatacacccaaactgtgtgaccttgcatatgtctgagttgctgccattgcaacagatcagagctggtgggctgggtgtggagaaagggtttgtgtgggggacatcctctggcaagggtggcagcagcagaagtgaggggcctggtcggtcatgtgtgctgacccggcctgggcagcctgtggccagggagaggacagctcctctgtaggaagagcctgttcctttccaaccaggtgagacctcttcagtggagccctggagccccctgtactccacatcagtgcctcagggacctcccggagcaggctaatatcagagaccaagagggacactggcagaggatcacagagaccccagtccaggcagggactgagaagatcttgccccctaagttagtttcctagcactgctgtgacaaattaccaccccctcggttggaacaagttgattctctgcagtcctggaggccagaagcctgaatcagtgtcggcaggaccactttctcccggggggctccagggagaagcttctcttgcctcttccgtgtcccaacagcggcagcacaccaatcccagcctctgtcttcacacagccttctctgtgtctctctcctcttcattgtctcataaggacacttgtcattggatttagggcccactggatcctccaggatgatctcatgtggggaaccttaaccacatctgcaaggaccctttttccaaataaggtcacagccacaggttgtgggggttaggatgtgagtgtatctctttggcagccactgttccctcctctcccttgggccagaagcagacgtggggccctttcttccccataggatgcccatggattgccccccttcccgcttcccccgagtgtctgtgggaggtggcaggaatggcaggcaggggtgtggaaccccttctggagtcatatcaagggcttggctggaggaagtcctcctggagctgttgggctggcatggggcaggctggctgggcccagcagcagcttcttcattcatggggaggccacaagcatgggccctagagctggctgccgccctcaaacccagaccctgcactcttaactgtgtgaccttgcatacgtcactcaccctctctgatcttcaggttcctctgcaaaagggaggtaatgataaccctcactctggggggctgtttggagggttaaatcagttattgctgtagcatgcatttctctgtcaggtattgagtgaggtgctgtgattttagccctgcatttttcttttcttaccattcaataataacgttttgagcacccactgtgcgccaggcaccatattaggtgctggggatacaaatgtgaatgaaatgaatgtggtctcttcccccaacagtgtatccagaagattaatccattccttaaacaaatgctacttgacacagattagttctggataggctgagagctctgaaggagtgcaggcagctgcgagcctgtgtatccagcagaaggatcaggaaaggattcctggaggaagcgctgttctagccaagacctacgggggcattattaaccaggcaaaggggacggtgtccaagcagtggaatgaacgtggattgaagctgtgaggcaggagggagtgtggcctgtgcagaagggaccgaggctggtgagaccaggagggcctgggtggcctccaggtcagatgtgaaaggaagaacttggccacagtctgagcttctcaggcgtatggcagggctgcctggtgagagggaatgagctccctgctctggaggtatgcaagcaggactgggctctcacctgccagaggccacagagctttccagaggctggaagaggccactccaaggcctctttgcccctgagagtggtggctcttcttgaggccaccttgccacgctgtcacagggaactagcagcccctgcctcacccgggggtttggaagatagagggaggcctaggaagggccctgtgtctcatccgagctgggcccctttccagcctctcactggaaggaagcccaaggatgttcctgtgggggcttttaccaggcccacctgccctctgctggccatgcttgcagcctcctgaccctgtcccagcaggacagtgggctggtgtgagcgggcaggaaccgcctgcacttagaaggtgtggggctgcctccccgagcttccatctgccgctggggccacaccccaggcccagggatgggaccccacagtggtcacatcatcttgcagcagaacccaggtacagctcctggagcagatggtggtcccaagcacgggtgggaccagaaaggactctcacctgggctaactcagctgcagcctcagttccctcctcacacacgacgaggaacatggactggaagcctgcccagcaggccttctgctcgatgtgcgttgtgtggcttacgtccagggagggaagcagcctctgtgctgtcttctagataagcctgtattccccgggctgtctgccaatgtatccagttgtcccgtcagcctggaagctctgagggaaaaccttgggctgcttcctgagcacctgtatcccctgcagccagcccggggcctctgctaggagcagactgagcatggcttatgggcctggcaccatctggcctctgcccaccttgctggccttgtcttgtgtctgccccttcgacattccatagcccagctcaatatctagtggttcctctagggtggcgagcactgtttggtctccagatgtcttcaggtcggagctcacagcgctctcagccaccccttcccagtgtagcaccgggcacatggtagatgcctattgatgagtgaaagctcctaacacactcagagagcaaggactccgcctcatcccacagcctgggaggagaggcagactgccaaggacctgctcagcatgctacagaagaaaccaaagtgcccacgggactgatcagtggagcttcctgccgagactggaggccttagggcagggtagacagtgtgtgtgcaggctggggactcacagttcggactgtgcccagacctactagcatagtgggtgggtgggaggatgcgggactgggggccgaccttgcctgaaattcatgtgggatctcagagcagccactgaattgctctgtagggggctaaatagtggcccccacagatacacacacccagacagagcctgtgagccagaccttatttggagaaaaggtctttgtagatgtaattaagcatctcaagatggcatcatctggattatgcggtgggctgtaagtcctgtgatgtgtctttatgagagaaaggcagagggagatttgacacacacaggaggggccacgtggagacagaggtggagattggagaaatgtggccacaagccagggaacaccagcagccaccagaagccggaagacgtgaggcagggttcttcccagagccttcgctgctgagtctgggaatttgtgaccgaagccataagaagtgggtacacgccctgagcctcccacacttgctcacctgtcctgagatgagaatctctactctgcagcatatttggaggatcactgcgggggccacagaggtgctgttcagatggcacttcagaagactcaggagaccctggggcaggagcagtttgactgacagcccagagggctgccctctgattccacctgaggccctgcttttcctggctgcaggggttccagggccaggccatttccgctggcgcaggactctgctagcagcaacctgcctgaagtcttcctttggcctggctgagagtttctgagacctgcgctggagcggaggtgcttccttccttgcttcctttcttcctctctcccttctccatccagcaggctggacctgcctggcatctgtgagctctccctactttctcctataccctaacctttgtcctgcatgggcgactcccccagtgagtctcttgcagcttttaccccagtgcctgcttcttggagaatccaaactgatccagttagggatgataaagtgtagggtaggcgctcggtgactgttttctctgaggttgtgactcgtgtgaggcagaagcagtccccgtgagccctcctggtatcttgtggagtggagaacgcttggacctggagccaggaggcccagacatacatcctgtccgagctgcagcttcctgtctctaaaatgagccggccagcgcaggtggccagacatcactgttattctcctttgagtctttaaatcttgttgtctttcttgcagactcggtgagctgtgaaaggctataataggggctttattttacactttgatactattttttgaacattcatattattgttagatattgatattcatatgaaggagcaggatgacttgggtccttcttggcagtagcattgccagctgatggccttggacagttacctgccctctctaggcctccctttccttgtctatgaaatacattatagaataggatgtagtgtgtgaggattttttggaggttaaacgagtgaatatatttaaggcgctttcaccagtgcctgggatgtgctctgtagtttctgtgtgttaactataaggttgactttatgctcattccctcctctcccacaaatgtcgccttggaaagacggaggcagcctggtggaggtgtatctcctagacaccagcatacagagtgaccaccgggaaatcgagggcagggtcatggtcaccgacttcgagaatgtgcccgaggaggacgggacccgcttccacagacaggtaagcacggccgtctgatgggagggctgcctctgcccatatccccatcctggaggtgggtggggactgccaccccagagcgttgcagctgtactcctgggttgcaccccccccagctgtcactgtcccctccctgccatcagttgtgggaagggcgttcatccatccagccacctgctgatttgttatagggtggagggggggtctttctcatgtggtccttgtgttcgtcgagcaggccagcaagtgtgacagtcatggcacccacctggcaggggtggtcagcggccgggatgccggcgtggccaagggtgccagcatgcgcagcctgcgcgtgctcaactgccaagggaagggcacggttagcggcaccctcataggtaagtgatggccccagacgctggtctctctccatctggacctggcctgggaggtggcttgggctgggcccagggagagctaatgtctcctaaccaagaatgctgtggcagcctctgccgcagagccagagaaccagagtgccaaggctggcagggttcccagtggccacgagtgcagatgaagaaacccaggccccaagagggtcatgcaggtagcccagggagttcagccttgaccctgggtcaatgacctttccacagttccacactgctccccttttaaaatccggtgatgtctttatgtcttttgttatgttatcttcaatgtggagggactcgaggtgatctaagcaaactttttctatcttctgcttgcatacctctgagaccaggggactcactcacttgcatgactgggccctgcaggtcacactggccaggcagatgtggtggaggaactggcagaggactttttctagactgtgactacatttagtccacccagcggcccccctatgaagtccagttgagaactaggactctgggggccggtggacagagaagagggagggttctctcccttactgacttccttctgtggccagacattgagcaaggcctctgtacagcatgtcctggggctggccttgccgtagctgctaaatagttgacgaaaccagtccagagaggggaggtgactgccagggtcgcacagctcaagctggggaactcgctgggaaaactgtcagctctgggcagcagcttgacttccactgtaagccccagcccccagggtcaaacactggctctggtgctggcagaggcagcccactagcctgtttcaaaggctgagaaggcccaggagtctgccctgtgctccaccagttctgccctgagactttcctacagagtacaggttttgatgttcagttttaaaggcaagaatcaataaccttctgccccatcaggtgaccccttgtgcctgtcccacccctttattgactgacctcggctcagtcaggtcagttcctgaaggtcagtgtgtggaggggaggctgttctttcccagaaaggccttccccaggcctggtgctctggcctctggaggacttcctggagaagtcccttctttggggtcccagtcagtgtatgggaagcccttattgcatgacctggcacggggcaggggctcaacagtcactattgccttccttgccactgccatttcctcctctgtaagcaggtgattgtgtgtccagtctgagcacagagataagcacacagcaggtgcttaataactagcagctgtaggctgggcgcggtggctcatgcctgtaatcccagcactttgggaggccgaggtgggcagatcacctgaggtcaggagttcgagaccagcctgttcaacatggtgaaaccccgtctctactaaaaatacaaaaattagccaggcatggtggtgggtgtctgtatcccagctacttgggaggctaaggcaggagaatcgcttgaacccaggaggtggaggttgcagtgagctgagatcgtgccactgcaatccagcctgagtgatagagcgagattccatctcaaaaataaataagtaaataactagcagctgtaaatgtggctgttgttcttcacctccacactcagtgccactccactccctccctccgtggtgtgaggggcctcactagctgtctcctaggaggagcatggctgtgagattccagctccatccttggccacggctcctggagacatcttagaggccaggatccagaaggctcccacacctcatttgacaggggagaagctgtcagttccaggtccccttgcacatcagggccagagctgcgttaggcctccagtctccaggccactgggccagagctcacaggctggcagagggttagaactgttactggtggctgggtgcagtggctcacgcctgtaatcttagcactttgggagggcaaggcgggaggatcatgaggtcaggacatcgagaccatccttgctaacacggtgaagccccgtctctactaaaactacaaaaaattagccgggcgtggtggcaggcgcctgtagtcccagctactcaggaggctgaggcaggagaatggcgtgaacccgggaggcggagcttgcagtgagccgagattgcgccactgcactccagcctgggcaatagagcgagactccgtctggaaagaaaaaaaaaaaaaagagctgttactgttgacagtagcatgaggtagaccatggcctgcaccaaaatgggggagtggagtgccactgaggccagaaggaaccacaccctcaagggtggggagttatggtatggggggtcctaggcatggagtcttttaattctttagacaatcctgggagcaactgtccctgtttcacagagggcggggccacacagctggtgagtgggcagccaagactctgttcaagtttgtgtgggtccaacacttgcggccacggtggaggggcatctgagccaggcctcagagagtggcgggggaagttgggtggggaagtgtgcccttctcattcctctgaggctcatcctcttggtgcctctctttcatggaaagggataataaggttattgtgaggatcccctgagttcgtatattcagacgcttagacagagccaggcacagagaagggcccggggttggctagtttgattgctggtgtaattgctaatatcttccagtttgtattggtcaaggttctgcagagaagcagaaccagtaggatgtatatattaagagtttcaagctcatgtgaccgtgcgggctggcaagtctgaaatccgcagggcaggccaggcaggctggcaattcctgcagaatttgatgttgcaatactgagtcctaaggcagtcctggggcagaattccttcttccctgggaggcctcagtctgttctcttaaggccttcaactgattaaatgaggcctgcccaagttatagagagtaacctgccttactccgtcttctgatttaaatgttagtcacatctaaaaaatattttcgcagcagcatttccactggcttttgaccaaacatcaggccacaaagttgatccccaaaattaaccatcactctgtgcctgtaagggaggggctgggaaaggggagcaggtctccccaaggggtgaccttggctttgttcctcccaggcctggagtttattcggaaaagccagctggtccagcctgtggggccactggtggtgctgctgcccctggcgggtgggtacagccgcgtcctcaacgccgcctgccagcgcctggcgagggctggggtcgtgctggtcaccgctgccggcaacttccgggacgatgcctgcctctactccccagcctcagctcccgaggtaggtgctggggctgctgccccaaggcgcgggtagggggcggagggcggagggcggagggagggcgggcgggcaggcgggcttcttgtggcacgtgggcttcttgtggcacgttcctggaggccgaacccttctggctttggaaggagtcgtcagagacccccgccatgcgggaggctggggaggaaggggctcgaaacctccatcatcgcagagtctgaatagcagtggccccgccatgcgcccacgtagcggcgcctacgtagccacgcccccacaccccgtcctggccactctccctcctgaaggtcttctggtacccgccccctccccatctccatccccaggccctgcgtcctctgcccaatactctttgggcctccctgttgtccagctctctccgcggctccatgactgacaacttgagcaaggctaatgtgaatgggagcggttgagggctcagacctctcacccgaggaacatccacagagtgtgccgcatgcccggtgcagtgtggctgcggggacacagacacggagcctcggccctgaggagctggggggcagtgaccgtccctcctctgacccaccactcctccagtgtcaggacactgcgggtatctaggggaaggaatcttgttccacttcaagtctggaacttcaagtctgtgtgtgtgcgtgcgcgcgcgcgcgttgggggtgggggttgcagagcagatgcgtacctgacagcggtaacctaggtcccccctggcctatcaaggcttccctggcggccgaatttaaaggcatcaagcaaacaaagcccaacacatctctgccttgtcctctcagtttccccccgtggcacttagaaccacttgatacaccgaatagtttcctatctcccccactaggatgtaaactccacaggggcattgggaatgctgcctggctatggtagggacagaggggagcaccagggcggggcaggggtgccagagttctgcctgggcagtcagattttccttaggaggggacatttgagtgggacccaaacaggtgtatagcagttgtccagcccagctggcaaggcctgagtctgcctctgcaacccctctcttgggctcctttctctgccacccacctcctcacctttccaggtcatcacagttggggccaccaatgcccaagaccagccggtgaccctggggactttggggaccaactttggccgctgtgtggacctctttgccccaggggaggacatcattggtgcctccagcgactgcagcacctgctttgtgtcacagagtgggacatcacaggctgctgcccacgtggctggtaagtcaccaccccactgcctcggccaccgtgatgctaacagcccctttggcagtcagggtctgtgccgggacctccagtgccaggctctgtgcagggggaccagagatgaagtaggcctgatggtgccttcaaggacactcagtctgatgagggaggcgagtgcacagaggaaacacgaggtcagggctgtattagagggagcccagaggaggcacctgcccagcccgagggtcagagaaggcatcttggaggagggacatttgatcgggagcttgatggatgaataggagttcacctggccgataagacagcaactaccaaggcttagaggtgtgagaggaggctgtcttacctcactgagtaaggactgcaggcggcttaccttcgagaagagagcttagtgtctgtgtgcacgtgtgtttgtgtgtatgtgtgtgcgtgtgtgcactggcaggagtcccctgctggggcaggagggccgggccatcaccatctttcaccattcacccctgcaccaggcattgcagccatgatgctgtctgccgagccggagctcaccctggccgagttgaggcagagactgatccacttctctgccaaagatgtcatcaatgaggcctggttccctgaggaccagcgggtactgacccccaacctggtggccgccctgccccccagcacccatggggcaggtaagcaggatggcagggtgggcaagtccaggctggggcttgggaggtctgtgtgaccttgacagtctctcccttctcccttgtctgtgtaaggaggatgacgccaccttaaataggattaaatgagaatggggctctgaaagggctgtgcaatattttcataacgtgtttttatagagacagttgagtatgttctttaagccctcctctctcctaccatgaactaaagatttctgtggaggtcccctcactcccagcaccccctcctcatcccaggccctttttgcaggttggcagctgttttgcaggactgtatggtcagcacactcggggcctacacggatggccacagccgtcgcccgctgcgccccagatgaggagctgctgagctgctccagtttctccaggagtgggaagcggcggggcgagcgcatggaggtgactgtacccctccttcgtgtgtgtgtgtgtgtgtgtgtgtgtgtgtgtgtgtgtgtgtgtgtgtgtgtcagtgctgggccctcagggacccccagcaagcccctccatcctccagactccagctcttctgtaagcttacagggctggccagaccaggagtggggcactcctcacttcacgcggctgggggctgctggagagagccacagcgggaagggtttcctagaggctgcaggacagtgctggatggattttcaatgctcacctgggtgtgagcgtgcggcagggccgcgtgagggtcagcgatctgctactctggactcagccatctctaggcccctctcactcaggtgctccatggttctgggagctgagaaatctcaaaccagcaaaaaagtggaattgatgttgatgctacaggatagtgcacagatgccatctggttgcagcattttggtggaagggcagtgcccagctaggagagtgaggaggggcaggcatttctggcttgaggagatggggtcttaatgctcgtgtgagaggcagagtgggtggagtggagctggctggatccttgctttggcctcctggatttctctctatctccattttgaaaccactctgtgtttggaagaacttttgagtattcagagctgcccactggcagaacagtcttccttgggcaggagtgagctccttgtccccagaaggctgggtctggctggcccctggcagggacactgatgagggtgcttgagttgatcctgtctagtccctttctgtgttttcaaagcccattctaaagcagattcccatttccgtctttgactctaaggcccaagggggcaagctggtctgccgggcccacaacgcttttgggggtgagggtgtctacgccattgccaggtgctgcctgctaccccaggccaactgcagcgtccacacagctccaccagctgaggccagcatggggacccgtgtccactgccaccaacagggccacgtcctcacaggtaggaggctgggcttgccctggggtgaggaggggtctctttctccttatgcacccactgcccgcgaggcttggtcctcacaagtgtgatccatgagactcaagcctgacttgcagttccatactctggttctgccacttccatgccctttgagcctgggcaggtgaccttacttctcctcatctcagcttcctcctccataagagggaaaaaggtattacctgcctcattgtgttgcaaggagatgggcagcatctagggcactggcctggagtatcgcaggtgctttgcctaaggtggtgcagtccaggagaggcagctccagagagaggcccccggctggggctgaaaggagggcagacctcggtttgaatttcaccctgccgctctatagctgtgtgacttgggcaaattacttaacatctctgtatgaggaaatgatgagtgctaagcacttagcttagtgccgggacaatataaattctagctatcgttactattgttttcatcacccgttgctttaaaatccagcctctggtataggcaactattgacgggctaccctgtgtcgaaaacatgcccaggcaggtagcaggaagtcacagatggggacctcttggggcatcaagggatggtgccctgaggctgagctgttctggttgggtggagcatgagaggtctgggaagacagtgggactccagcctggaataagaggctcagagttgattctcgtctgagcacgtccaggggaaccactgagggtttgggaacaggagagtgagggtgagaacctggttctgggcacagcaggctggcatgtaggatggatgttcaggaaagatgagcatagtcaggtggctggtgcccttgtccaggggagaggctccgtcaggttcaggggtcctggcttggagggaagtccgccatgctctaatcacgctcccctttggaagtgctcagccgatgagctcacaggcacatgtcagtttgaagtcatggaatctgactccatgaagcgcacctcaaagagcaccattttgcagctaagggaactgcaggctggacatgctgagtggctgccccgagcccttgcagctaggacatagagaatgctagtaaccacaaccctaccatgttcagagcacatgccaggctccatgctggggcttcgcacgtgtcatcttcacagtgtccctgtgagtaggtgtggtttctctttccatcttacaaatgagtaaacagagcctcagtgtagctaagtaaccactattttaggtttcttagccaatgggtgtgtctgactcctaagcccatggagggcattctgaggtggttcagacagaccccggcttacccttgaacttctgcctgctggctgcatagggaggggctggggggagtttgagcatctcaggccatagagcccctgcctcactgtctccatctctgggtggaaagatggtgttttccctgagaaactaaggctcagagaggttgaatggctctcccaaggtcacacagctggtcagctgcagagttgagaacacaggagtcctggtgctcaggccagcatctctttttttctttgagttgtttctaggtttcctagctcttgcctcagaccttaaagagagagggtctgatggggatgggcactggagacggagcatcccagcatttcacatctgagctggctttcctctgccccaggctgcagctcccactgggaggtggaggaccttggcacccacaagccgcctgtgctgaggccacgaggtcagcccaaccagtgcgtgggccacagggaggccagcatccacgcttcctgctgccatgccccaggtctggaatgcaaagtcaaggagcatggaatcccggcccctcaggagcaggtgaagaggcccgtgaggccgggtgggtggggtgctgcgtgtctctcctgcacagcttttctgtgtcagtttgtgccaccaccataccgccatgcatcagggtggcggtttgccaggtagatgctgtgggcagcttccgccattgtgtggacagcatgtatatgtgtctctgtgtggctgggtctgtttttgcttttgtccagatcagtaaggtttgctacctgggtaccccactccacttggagtagaatgtgcataaatatggcataaagaaatgcaatatgcatgcatttattgattgatctatttttttctgagatggggtcttgctgtgttgcccaggctggtctcaaattcctgggctcaagcaatcctctggtctcagcctccccaagtgttgggattataggcatgagccgctgcacctggcctctctgatctatttaacaaacctgctgggagggtctcagggtcaggagcagcactgggctctgaggacacagagctcactcagccgtgacccagagggggtgcctgagctgcatgctgaaggttgttagcatgaccagcaaggcaagaaaaggccctgccgagattagcaaggcatgtgccaagccctggaatgtgacagccgggccttctagaaacctgagtgtataactctccttaaaagccagtaggagctcctcaaaaggcagccctaaggagtccactcttaaatgaactcagagtcagttttaaaatgcaagtctgtgttgattctggtctggatggtgcattcctcgagagcaaaagacagtcttggtcttggatccacttgccctgggtacactgagggctgctaggttccaggtgctcttcctggcactggggagggatacaggcccaagagacatgctgttctccctcctggagcatctattttagtggaggaagacagaaaacaaaccattaatatagagtactgaaaagatgcgatggagaaaactatagcaaggaagggaatggggtgggagagaggtcaggagaggtctcgctgacaaggtggacgaaacaggccatgaggcagagaacatgttccaggcaaagcaaaggcccccaggtggggatgtgcagggagtaccaggaaaccagagaggtgggaatagttatgagatggggggtgcctcagaggggacagggccaagtcaggtgagacctgagggtcacagtcagcagtgagctggggccatgcaggggtctggcctcagaggagtgtggtctggcctggatctgaacctctcactgtggcctagctgctgagctgagaagagatgacaaggaccttgggcagaagcagggagactggagggaggcggtggagggtccaggcgttggggcggggctcaggctggagtctgaagggagcctgcaggcctggtgggtggatgtgggtgggagagggggaggatggcaccaaggctcgggcccctggacagatggagttgccattaagtgggatggggcaggctatggggccatcagtttcagagggatgagtttggcactggcatggtaggcatctgtctatctccacggccctcaaaccaggcatgaagcaggagctcacgtgtttggtcagccatggtgcagaaccgcctgggtgggaggtgcggggtgggagatacacggttgtgtcccaaatgggctctgagccagcgagggccgtctgcactttggcctcacagaaggatgtcggagggagaaatgaagtgtgggtgggggtcccgggccacgctagacatgtgctttcttttcctcgggctctggcaggtgaccgtggcctgcgaggagggctggaccctgactggctgcagtgccctccctgggacctcccacgtcctgggggcctacgccgtagacaacacgtgtgtagtcaggagccgggacgtcagcactacaggcagcaccagcgaaggggccgtgacagccgttgccatctgctgccggagccggcacctggcgcaggcctcccaggagctccagtgacagccccatcccaggatgggtgtctggggagggtcaagggctggggctgagctttaaaatggttccgacttgtccctctctcagccctccatggcctggcacgaggggatggggatgcttccgcctttccggggctgctggcctggcccttgagtggggcagcctccttgcctggaactcactcactctgggtgcctcctccccaggtggaggtgccaggaagctccctccctcactgtggggcatttcaccattcaaacaggtcgagctgtgctcgggtgctgccagctgctcccaatgtgccgatgtccgtgggcagaatgacttttattgagctcttgttccgtgccaggcattcaatcctcaggtctccaccaaggaggcaggattcttcccatggataggggagggggcggtaggggctgcagggacaaacatcgttggggggtgagtgtgaaaggtgctgatggccctcatctccagctaactgtggagaagcccctgggggctccctgattaatggaggcttagctttctggatggcatctagccagaggctggagacaggtgcgcccctggtggtcacaggctgtgccttggtttcctgagccacctttactctgctctatgccaggctgtgctagcaacacccaaaggtggcctgcggggagccatcacctaggactgactcggcagtgtgcagtggtgcatgcactgtctcagccaacccgctccactacccggcagggtacacattcgcacccctacttcacagaggaagaaacctggaaccagagggggcgtgcctgccaagctcacacagcaggaactgagccagaaacgcagattgggctggctctgaagccaagcctcttcttacttcacccggctgggctcctcatttttacgggtaacagtgaggctgggaaggggaacacagaccaggaagctcggtgagtgatggcagaacgatgcctgcaggcatggaactttttccgttatcacccaggcctgattcactggcctggcggagatgcttctaaggcatggtcgggggagagggccaacaactgtccctccttgagcaccagccccacccaagcaagcagacatttatcttttgggtctgtcctctctgttgcctttttacagccaacttttctagacctgttttgcttttgtaacttgaagatatttattctgggttttgtagcatttttattaatatggtgactttttaaaataaaaacaaacaaacgttgtcctaac

SEQ ID NO: 6 - protein, 692 aa, Homo sapiens
MGTVSSRRSWWPLPLLLLLLLLLGPAGARAQEDEDGDYEELVLALRSEEDGLAEAPEHGTTATFHRCAKDPWRLPGTYVVVLKEETHLSQSERTARRLQAQAARRGYLTKILHVFHGLLPGFLVKMSGDLLELALKLPHVDYIEEDSSVFAQSIPWNLERITPPRYRADEYQPPDGGSLVEVYLLDTSIQSDHREIEGRVMVTDFENVPEEDGTRFHRQASKCDSHGTHLAGVVSGRDAGVAKGASMRSLRVLNCQGKGTVSGTLIGLEFIRKSQLVQPVGPLVVLLPLAGGYSRVLNAACQRLARAGVVLVTAAGNFRDDACLYSPASAPEVITVGATNAQDQPVTLGTLGTNFGRCVDLFAPGEDIIGASSDCSTCFVSQSGTSQAAAHVAGIAAMMLSAEPELTLAELRQRLIHFSAKDVINEAWFPEDQRVLTPNLVAALPPSTHGAGWQLFCRTVWSAHSGPTRMATAVARCAPDEELLSCSSFSRSGKRRGERMEAQGGKLVCRAHNAFGGEGVYAIARCCLLPQANCSVHTAPPAEASMGTRVHCHQQGHVLTGCSSHWEVEDLGTHKPPVLRPRGQPNQCVGHREASIHASCCHAPGLECKVKEHGIPAPQEQVTVACEEGWTLTGCSALPGTSHVLGAYAVDNTCVVRSRDVSTTGSTSEGAVTAVAICCRSRHLAQASQELQ

SEQ ID NO: 7 - DNA, 14994 bp, Homo sapiens
  source 1..14994: mol_type = genomic DNA
aatgacaaactgaaaaaatctattgtttgttatatatataacaaagaattagtatccacaatatgtaaataattcctaaaattagtcagaaagagacaaacttaaaaagagggtaacaaggaggggagcaaattatgtacataaccagatgattcgcaaagacggcaacagagatggccagcaaaacaaactagatatatacttgtctattagatttatcaacattttttgcctttttcattaaaagcatttgtaaaaggatataggaaaagaggaactctcatatactcctggcagggatgtaaattggtacaacccttttgaaggacaatctgacaaaagcaatcgtaagttacaagtcaacatctatgaatgtatatgaaaatatttatatacatacatcaccaccataaaagcattttctatacatactgtttataattagaaaattggaaacaaatgattaaaagggggctgattaaattaaggttcatctatataacaggattatgcagctattaaaaaggacgtggtaactctatagacattcataggaaaataaattttaaaatactaagatcctgaatgatatatatatcatgagctattatacataacaagatcccacttgtgttataaaaaattatgtttagtcattcaaagggtctggtatgatagacccaaaatgttaatagagtcgagatttttattttttataggtttttgaaatacctgaattttcacaataagtactttgcacattaaaaatcttagctgggcatggtggctcacgcttgtaatcccagcactctgggaggccaaggtaggcagatcacctgaggtcaggagttcgagaccagtctggccaacatggtgaaaccccgtctctactaaaaatacaaaaattagccaggcttggttgggggtgcctgtaattccagatactcgggaagctgagacaggagaatcgcttgaacccaggagggggaagttgcagtgagctgagatcacgacgctgcactccagcctgggcaacaaagagcaaaactccgtctcaaaaataaataaagaaaaaatctttacatgtccaaagatacggctgttcaactaaaaaatatatatgtataaaacttaacatgttaatagtgaacacacaaaacagtaagatagataaaattattccttcaaagctcacttaacctctggatctacactgtccaaaaagacggtctaatgagacaattgagcacttgataggtgagtggttctaactgagatatgttctcagtataaaacatacaataggatcttcctatacaacattaattaaaaaacaaactattgtagttaaaaaggaaaaaattagagatactatgtaaaaaagagccaaaataccttgtattttatttgaaagacatatctccataagattacacaacctcgtgtaggataaaggactttgctttgcttggaatttaaacaatttaggctcttaaatgtcctaaaattctctgtagctaagaaatttttatattggttcctaggaactaggaatccttaaattaggccctacatttgcttacaagtttattttccttggcataaaattttttagtttttacattactggttatatttgatcagggttctatttaaataggcacaagttcaagcaaagatcagattctgcttttagcagtgtgtactcagacaggaagtattaaaaggcaggcagaaaatcctttataaaattactactttcaatgcattttcccacgttgaaatgcttctgcagtttataattaggcaaattactttaattataatcaataatgctgttcaaattactataagaattatacagatatttataccaagagacaatatactagaaaccaagactacgtgaccattacctctactctgtcagtgttatttgtgagaaattgcacaaattttgcaaaaagtgttagtatcctactacagtaggatataatatagaaggaaataatttcataaagcctgtctttggtactagtgctcagttactttcattaactaaaaaaggggctactcttcaaattcccttctctaaaaagaatgtactatatcaaaagggggtaaacactactacgtatacattctgcacttagaaatccctatatgttgattttatcattctcttattcaataaatattgtttctacaatgtgtaaggcattactgtactaaagcattataaggaatataagttaaaaacacatacaaatcttgccaatcaacagcttatagtgtaataggggagagaagctggcccatctatattctccctcaactagcaagtggatgaaatatcagggtcaatagttataagccacaaaagctgacagcttaattaagagaagttttgaaatatgtatttcatgaccaataattacaactgtaacttttctatttaaagaaggagaaaatttgaatttcttctctagctcaacatacacttctataattccattacatgaaccagagtaaagggtaagatggaaatgaagaatattttcttacccttttgtggttctatattggacacttaaaaatcatacacaacctaatcaaaagatgtaattctttaaaaaggtacgagaccaaaattcagaaaatctagactataacaaaatttctcaatttacattatcttaatatgcaattaattttcaccagtaaaatactatagtatgggtacaaatgcattgattagttctaattacaaaaatggctaatatataatactgtgtagtgtttatgatacatcagataatgttctaagtgctctgaaaatataaacttttaatcttttatacgaccctataaaataggtgttattctcactggagagatgagaaaacaggggttcagagatgtgaagtaatttgaccaaaggtcacaaagctgaagaatatgaaatccgggattctgattcaggcagtcttattccagaatcatgctcttaaccactatggaatactgcctctactgtaactattatacccaaaacccttaatcctaagtcatcaaaaggaagagcctctattttacacaatgaagaggcatttctaagaatagaaatttagggacgagcacagtggcttactcctttaatatcagcactttgagaggctgatatgggaggttcacttgaagtcaggagttcaaggtcagcttgggcaacatagtgaaacacagtctctacaaaatatttaaaaattagctgggtgtggtggcatgcatctatagtctcagctacttgggagacagagggaggaggcttgctcgagcccaggagttcgtggctatagtgagctatgatcatgccactgcactccagcctggacaacagagcaagaccctgtctctaaaaaagaaaagaaatttggaaatggtttattttgtattaacaatttataatttacactgaaatttattatgataaaacttttccctgtgttaaaaagctattaactttatgaaaaatttcttttaggtaaggttgattatatatacccacacacatacacaggttaaaagttagtttcatgtgacataataactagcattttgagcactacctgtttgcccagcactgttctaagtgctctacatgtattattgttaaattatcataacactatgaattatgtactataattaccccagctttacagatgaggagactaatccatggggaggttaagtaacttgtccaaggccagacagctagagccggcttttggacccacaccacagtctgactccagcacccatattcttaacaatttcaccatattaatatgtcaagattaagcagttttaaaggatgctattttctcacaaatttcttaatatgaacactcaataagaataatcactaatataagcatttagtatttttttaacactaagttggaagcatagtggaacatttatttttagaaatattattaattggctgggctcacgcttgtaatcggctgggctcatgcctgtaaattttgggaggccaaggtaaaagaattgcttgagcccagtatttccagaccagcatgggcaatacattaagacatcatctttaaaaaaaaaatgttattaatctcctctttttgttaaatgtatattatcaaaattgttactaagctaacaaacttcagaaaaacttatgatgggcaagctgcttgtgacattgaaggtatttaagattcaattctagtttggtcctagatgaccacatatccattgttccttcaacgagcacatggtaaagagcctagaacacagagacacagaacacagtggagaaaagggagtgaaatgtctttaatgacacttactatatatgggattttgtgacaatatacaaggatggttaagacatataaggtgatgcaaaaaaacatattaacaattatagtgacaaaaaatgaggagcatataattatacattgatttatacagagtaccagaggaacacagcattgagagccgtaacaccacctgagggagtggagaaaggcttcagagagaaagtgttttttggaatggatcactgtttccaaaagaactaaagtacagtttgagaaatgcatacttaattcattacttttttcccctcaactttaataataaatttacccaacaaaaaagtttatttttgacttgtaaatctcttaaaatcataaaaaagtaaaattagcttttaaaaacaggtagtcaccatagcattgaatgtgtagtttataatacagcaaagttaaatacaatttcaaattacctattaagttagttgctcatttctttgatttcatttagcattgatctaactcaatgtggaagaaggttacattcgtgcaagttaacacggcttaatgattaactatgttcacctaccaaccttaccttttctgggcaaatattggtatatatagagttaagaagtctaggtctgcttccagaagaaaacagttccacgttgcttgaaattgaaaatcaagataaaaatgttcacaattaagctccttctttttattgttcctctagttatttcctccagaattgatcaagacaattcatcatttgattctctatctccagagccaaaatcaagatttgctatgttagacgatgtaaaaattttagccaatggcctccttcagttgggacatggtcttaaagactttgtccataagacgaagggccaaattaatgacatatttcaaaaactcaacatatttgatcagtctttttatgatctatcgctgcaaaccagtgaaatcaaagaagaagaaaaggaactgagaagaactacatataaactacaagtcaaaaatgaagaggtaaagaatatgtcacttgaactcaactcaaaacttgaaagcctcctagaagaaaaaattctacttcaacaaaaagtgaaatatttagaagagcaactaactaacttaattcaaaatcaacctgaaactccagaacacccagaagtaacttcacttaaagtaagtagaaaataaagagggttcatgtttatgttttcaatgtggatcttttaaaaaaaatatttctaaggcatgccatttgaaatactttgttgcattgttgaaatacttttttttccaagaaaaataatctccagaaaataaaatttcctattataatttcaagttagttttttgtttccctaatgttatatatgaaaacactgaaaatttgcattttatatgaaaattacaaatcggttaaattatacaatctagaacactatgtcattacactattgtaaattactgaaggtaagtaaaaagttaaaaaaaatttaaaactattctccagtgtttaaaacagattaaataatacagtaaatggaaaagatttattcatatgaaaatatgctgggctttttcttttaattgaagttcagaaaatcaaattttagagatagtacaatttaaataaaatgttaaggacaaaaatatgtgctatttgaaagaagcatacaaggggaaggaattgccaatattcatttttcaaatccattattagtttaaaaatttagattatgatagtgttacaggaaattaatagaaaagaaagaggaaagcaacttataaccaacctactctctatatccagacttttgtagaaaaacaagataatagcatcaaagaccttctccagaccgtggaagaccaatataaacaattaaaccaacagcatagtcaaataaaagaaatagaaaatcaggtaagtcagtattttaatggtatgtcccatctttcacacaggtctgtaaaaacactgaatcctaaaattatttacaagctttaactggatcatgagtaaaattatcacatcagcataactgttaaaattgcaggctctgaagctaataaactacctgcatttaaaccatggctctaaaactttgtgtgaccttgaataaattacttcacccctttatctctcagtttcctcacatatactacaaagataataacagaacttataggattattgtaagaaaaaaaattaattcatagcagccaatgtcatcttactaaaattcaaattagatcatgtttctctttgctcaaaaccacacaatagctttccatttcactcatattggctctttagaccaagattacccaacccttcgtcatctcactgacttcacctcctctactctagttattctgaccgctttaccagtattcaaacacatcaaacatactgccacctcaaagcctttgcccttgttgtttcctctaactggaacgctcttctgccctggtatctacgtggcccactctctgatttcccttagggtcgttatcaaacaaaaaattcccaatgaagacttacaaggtcacttaaccaaaaatcacaaccgcctggtcccatccctgaaaacttctacttccttagctacttttctcctgcacactcacctttatttaacataacataaattttagttatttatctcttctattcctgcactaaaatgtaagctctgtgaatacagggattttttccattatcttcatattttccattatttgtatatactccagaatatagaatactgtatggcacacagtaggcatttctgttgaattaataaatgtaatgtcatattcacacagaagcgtgtgctatgattattattacttggattactagaaatagtgtgcctcataattaaaggtcaacattcaacaatgtaattaatctacaatgtaaacatctggtgaagtgacagagggaagcacttgtttagaaaaaagctatgtcagaatccatgtattctaatatgcagtacaatagtttaaaaatattaataatactctcaaacagctattcaagaggattcaaaaaacataatataaactcagagaaactggtaaacaaaatcattttcaagagatataaaacaaatattattaccaatttccactaaacaaacataatgttagtagtgctgctaaaaggttttttatcaactacttttggtttccatactttccttcttatgatgttattattctaaattcttttcaattatatcttttactatgattaaatgaacctgctccccaaagcaaaatgttactatagtaatatacattgtgtctaaaaataaaaatgtgtgaagaaaccaaaacaatgaatttctgagttggaagaagagttagatcatttaactttctcatatttaaattaaaaaaacaaaactctaaaaatttaagtaactttaagatcacatagttacttagtagaaaagagtaatacccagcaagcaaactttacaatagatccttttaaataaggtcctaggaaatatcattcatgccagcatcaaaaaactaacactaataatgcaagatattatatattctgcttttcttactgtcaatgagaaaaactatcattcaataaattgcaaacccaacacacttaaataaaaataaaatgttactgctaaactaacgataaactactgaatatatagaaagtaagcaaacaaacttgccaacctgccaacatctacagatatgtttacaggtcaaaaattatcaaattatcaagaaagcctggttcaaattatgtattatgtctttatcacaggtctgaagatcagtaagacctaaaactgaaaattattaaacttaaaatctgaacagaatatcaaatatattttattcatataaataaaagaatacattacaatattctaagcaaagcagtctctacttttggccttgctctgttttccgaccaatgtctgcttttttgccttgctttatttttttatcttattaaataatgtccctgattaaatattttgagaacaggtaatctgtacaatctgaataacactgtttatctaaatatcaaacaccgttataacattatgaactgaaagacaaactgtacttctgacatccttactcagatttcccctaattgtatattcagtatcattttaaaaaacagatttatattcttttatcagctcagaaggactagtattcaagaacccacagaaatttctctatcttccaagccaagagcaccaagaactactccctttcttcagttgaatgaaataagaaatgtaaaacatgatggtaagacactttggtgggtttccttcttgaagctattattatcaaattccctattcttaggacttgttctagactaaaagatagttaagagatatccatcaaatacaatgtatcaacctaaactggatgctggggttctttttacaccctataaaagacatacctaagacaatcagagaaatacaaatatggacttgattattagataatatagaaggtttattaattttcttagatgtgatcatggtattgcagttttaaaggagaacaatctcctgtttaagagatacatgctgaaatatttacggagttaaaggtcactggactccagactggtgatagaacaagactctgtctctaaaaaataattaattttttaaaagaaaatagtttggtaagatgattcttacattcttaaataacacgccatctaagaaaaatgctttaacataaacattactgaaaaaatgctacatttgccacaacttcataaaatgtcaagtgaaatctcaagctccaaagatattattcctattactaaatctgatgtaataacattttattgattctaggcattcctgctgaatgtaccaccatttataacagaggtgaacatacaagtggcatgtatgccatcagacccagcaactctcaagtttttcatgtctactgtgatgttatatcaggtaaaacctgtctaaggagaatagacagtagttagttcaacttactcattacgtattaggaagattaacctggttatcattgttttatacatatatatatgaaatatatatgagtattcgtataaatataatacttttaccttgtttatgtatttactcaatattctccttttcctctaaaataatctgaagtgactattatcaataagtttactatgccaaaattcattaattgcctttcacttaacttttgggaccataataaataataaaatgtattgccataacattaataaactaccttacaaaaccaccaattaaaatcaaacaaacaaaaaagtgttatttacatctgtcaacataaatctactaaaaatacatgatttcattcattatattcaggtagtccatggacattaattcaacatcgaatagatggatcacaaaacttcaatgaaacgtgggagaactacaaatatggttttgggaggcttgatggtaaggggactacattcaatcattcattcacttgctaatctacaaatatttactgagaacctcttatggaccaggtattaggaaaagtagtaacgaacgagaagcagtctcagccttcatataatttattatcaaacaattacacatttgttagtaaattacacttattacaactgttattatttgaattatatttatcacaattacatgtctgttcttaaatatacttatcacaatttaattccacggcttacaatgatcataactataattattaaagacaattttgattaaatgttatgtcataagtagtaactgttacaaataagctgtgaaaagaaccactcctagcattagtcactctattctctcattaacgttttacatatcaattaattggaagttaaaaggaccaggaaactcagacatacagtatacattttaaaatttcaattatttaaatataatatatagaatgtatggcttataatgaattagttaactcaatgcaaattattctattttgattacaaatagtaaaataagcaagataaaataacagatgtttaaaatccaaaaagcacatacaaaaatccatgaatgatgtctaagtactcacttataaagtagaagacattcattattatatcaaatttttaaatgctcagtactatttgaccatttaaaaattttgtattcaaactaccagtgaaagccctacctagaaggtatactcagtgataagttttgtagctccaaatcttctaatagtgagtgtaaccccaaaataaaaggctgacaggtaagtcgagaatactcacttaattctggtaagaaagcaacccatttgtacttgtatttaccagcaatccttaaaatgaagcttcctactaactcaatagcaataagacaatagtgaatgtttaatgaaaacagtattttataaatactttaataaaaaggattgtgatgaagaacaatctatttatatttgttatttgtttttaattccaataaaaataatttttaaaattacagaaaaaagttattaagaaccatgcttttaaatttaaaatgattttttaaatttattcctgtctttttctacaaagaaagcatacattaagcaaataccaaaggccaggtttacatttgaagaaagtgacattattattactcaagtctctaggaatacttaacacatctcttgactgtatatggatgttaataaatagctgacagtaaagtttatccatataaagacttgcaaatattcctctaccaatgacgagactttaaaatatctataataatgtaacacatttcactggtgaaacatgtcttgtcatatgcattatagaaaggataatcagactttcagttatattaatatttttaacatttttgtgcacatagctatcttcaataaaattgttttaaaaggtattattttaagatacactaaaatgatcaagggattcaagactaaacaactcaattagttgcaccaataaaaaacacttaaaaaaactgtcagtgtccaacctgtacttaataactcacagatttttaaaacttttcttttcaggagaattttggttgggcctagagaagatatactccatagtgaagcaatctaattatgttttacgaattgagttggaagactggaaagacaacaaacattatattgaatattctttttacttgggaaatcacgaaaccaactatacgctacatctagttgcgattactggcaatgtccccaatgcaatcccggaaaacaaagatttggtgttttctacttgggatcacaaagcaaaaggacacttcaactgtccagagggttattcaggtatctttttctgataccaatactttattttcatatcttcaaagtatcttcccacattattagctattatctgcaatgacaacttttaaaaatccgaatcccaaataagcgttttctctctagacgaaaacctcttaactataatgaaagtgttcattctagttcaatcaggtattttacctctaatcttcctcagattttctattttttggtagtgtatagattatttatacagattatttaaaattgggacttatacagattatttaaaactgggatacatgcatctaaaacactgtaatatttataagaaaggaagataaacttacggggaaatacagtaacagtaactacatacgagtctgtacccattaaattgcatatctatctcctttaggaggctggtggtggcatgatgagtgtggagaaaacaacctaaatggtaaatataacaaaccaagagcaaaatctaagccagagaggagaagaggattatcttggaagtctcaaaatggaaggttatactctataaaatcaaccaaaatgttgatccatccaacagattcagaaagctttgaatgaactgaggcaaatttaaaaggcaataatttaaacattaacctcattccaagttaatgtggtctaataatctggtattaaatccttaagagaaagcttgagaaatagattttttttatcttaaagtcactgtctatttaagattaaacatacaatcacataaccttaaagaataccgtttacatttctcaatcaaaattcttataatactatttgttttaaattttgtgatgtgggaatcaattttagatggtcacaatctagattataatcaataggtgaacttattaaataacttttctaaataaaaaatttagagacttttattttaaaaggcatcatatgagctaatatcacaactttcccagtttaaaaaactagtactcttgttaaaactctaaacttgactaaatacagaggactggtaattgtacagttcttaaatgttgtagtattaatttcaaaactaaaaatcgtcagcacagagtatgtgtaaaaatctgtaatacaaatttttaaactgatgcttcattttgctacaaaataatttggagtaaatgtttgatatgatttatttatgaaacctaatgaagcagaattaaatactgtattaaaataagttcgctgtctttaaacaaatggagatgactactaagtcacattgactttaacatgaggtatcactataccttatttgttaaaatatatactgtatacattttatatattttaacacttaatactatgaaaacaaataattgtaaaggaatcttgtcagattacagtaagaatgaacatatttgtggcatcgagttaaagtttatatttcccctaaatatgctgtgattctaatacattcgtgtaggttttcaagtagaaataaacctcgtaacaagttactgaacgtttaaacagcctgacaagcatgtatatatgtttaaaattcaataaacaaagacccagtccctaaattatagaaatttaaattattcttgcatgtttatcgacatcacaacagatccctaaatccctaaatccctaaagattagatacaaattttttaccacagtatcacttgtcagaatttatttttaaatatgattttttaaaactgccagtaagaaattttaaattaaacccatttgttaaaggatatagtgcccaagttatatggtgacctacctttgtcaatacttagcattatgtatttcaaattatccaatatacatgtcatatatatttttatatgtcacatatataaaagatatgtatgatctatgtgaatcctaagtaaatattttgttccagaaaagtacaaaataataaaggtaaaaataatctataattttcaggaccacagactaagctgtcgaaattaacgctgatttttttagggccagaataccaaaatggctcctctcttcccccaaaattggacaatttcaaatgcaaaataattcattatttaatatatgagttgcttcctctatttggtttccttaaaaaaaaaaaaaactctcataggacatgtttcattttgttcctttcaggagtagtaaattagacgttttccccatataaagcttttttctaccagaaagatacttctggtagaagaagagaaaggagctctttatggttcacacgactgtctcctgtcctaactactttgcttaaagtgctcaaattccatcactactcacagttgtctaatctaagtctaatcccctttgatctctcagactaccttcccttttatctctctactacttaataataagaatatctttttttcaaacttgaccttcattttgctttcacaatactatactctccatggattatcccttatctgaatccatctttataaccctattcctttctcatatttagtactgtgggccaatggacaaccttcaatcatcttttctacactgaccctcagacattctatctgctctcacggactcctttatttaccatgaataaagttccaaaatctacatattcatcccaagtctctttccagttccccttcttacattgcctatttgccatttctcccttcaataccctatacttcactcaaattcaacataccaaaaataaaaggccaggcacggtggctcacacctgtaatcccaggactttgggaggctgaggcaggtggatcacctgaggtcaggagtctgaccagcctgaccaatatggtgaaaccccgtctctacctaaaatacaaaaattagccaggcgtggtggcatgtgcctacagtcccagctactcaagaggctgagacaggagaatcgcttgaacccaggaggcggaggttgcagtgagctgagatcacaccaatgcactgggtgacagaacaagactgactcaaaaaaaaataaataacaaattccccagccccttactgctactgctatccctttctacccacctttccctcctttatactctttcacaccatcttcctcacttctttatatccattaatatgaccagcatgttcccagtcacagaagcctggaacccggaagacatctctggcttttcactcaactttgtaaactacctcttttgtatcataagccaccaagttcaatacaatcttctcttgaaacgtctcttaatcttataagctttcttccccaaagactgtctttaacttcagtgctagattatataagt

SEQ ID NO: 8 - protein, 460 aa, Homo sapiens
MFTIKLLLFIVPLVISSRIDQDNSSFDSLSPEPKSRFAMLDDVKILANGLLQLGHGLKDFVHKTKGQINDIFQKLNIFDQSFYDLSLQTSEIKEEEKELRRTTYKLQVKNEEVKNMSLELNSKLESLLEEKILLQQKVKYLEEQLTNLIQNQPETPEHPEVTSLKTFVEKQDNSIKDLLQTVEDQYKQLNQQHSQIKEIENQLRRTSIQEPTEISLSSKPRAPRTTPFLQLNEIRNVKHDGIPAECTTIYNRGEHTSGMYAIRPSNSQVFHVYCDVISGSPWTLIQHRIDGSQNFNETWENYKYGFGRLDGEFWLGLEKIYSIVKQSNYVLRIELEDWKDNKHYIEYSFYLGNHETNYTLHLVAITGNVPNAIPENKDLVFSTWDHKAKGHFNCPEGYSGGWWWHDECGENNLNGKYNKPRAKSKPERRRGLSWKSQNGRLYSIKSTKMLIHPTDSESFE

SEQ ID NO: 9 - RNA, 100 nt, synthetic construct
  source 1..100: mol_type = other RNA
  modified_base 1: mod_base = OTHER; note = 2'-O-methyl ribonucleotide
  modified_base 2: mod_base = OTHER; note = 2'-O-methyl ribonucleotide
  modified_base 3: mod_base = OTHER; note = 2'-O-methyl ribonucleotide
  modified_base 21: mod_base = OTHER; note = 2'-O-methyl ribonucleotide
  modified_base 28: mod_base = OTHER; note = 2'-O-methyl ribonucleotide
  modified_base 29: mod_base = OTHER; note = 2'-O-methyl ribonucleotide
  modified_base 30: mod_base = OTHER; note = 2'-O-methyl ribonucleotide
  modified_base 31: mod_base = OTHER; note = 2'-O-methyl ribonucleotide
  modified_base 32: mod_base = OTHER; note = 2'-O-methyl ribonucleotide
  modified_base 34: mod_base = OTHER; note = 2'-O-methyl ribonucleotide
  modified_base 35: mod_base = OTHER; note = 2'-O-methyl ribonucleotide
  modified_base 36: mod_base = OTHER; note = 2'-O-methyl ribonucleotide
  modified_base 37: mod_base = OTHER; note = 2'-O-methyl ribonucleotide
  modified_base 38: mod_base = OTHER; note = 2'-O-methyl ribonucleotide
  modified_base 39: mod_base = OTHER; note = 2'-O-methyl ribonucleotide
  modified_base 40: mod_base = OTHER; note = 2'-O-methyl ribonucleotide
  modified_base 41: mod_base = OTHER; note = 2'-O-methyl ribonucleotide
  modified_base 42: mod_base = OTHER; note = 2'-O-methyl ribonucleotide
  modified_base 46: mod_base = OTHER; note = 2'-O-methyl ribonucleotide
  modified_base 48: mod_base = OTHER; note = 2'-O-methyl ribonucleotide
  modified_base 50: mod_base = OTHER; note = 2'-O-methyl ribonucleotide
  modified_base 52: mod_base = OTHER; note = 2'-O-methyl ribonucleotide
  modified_base 53: mod_base = OTHER; note = 2'-O-methyl ribonucleotide
  modified_base 54: mod_base = OTHER; note = 2'-O-methyl ribonucleotide
  modified_base 57: mod_base = OTHER; note = 2'-O-methyl ribonucleotide
  modified_base 61: mod_base = OTHER; note = 2'-O-methyl ribonucleotide
  modified_base 66: mod_base = OTHER; note = 2'-O-methyl ribonucleotide
  modified_base 67: mod_base = OTHER; note = 2'-O-methyl ribonucleotide
  modified_base 70: mod_base = OTHER; note = 2'-O-methyl ribonucleotide
  modified_base 71: mod_base = OTHER; note = 2'-O-methyl ribonucleotide
  modified_base 72: mod_base = OTHER; note = 2'-O-methyl ribonucleotide
  modified_base 74: mod_base = OTHER; note = 2'-O-methyl ribonucleotide
  modified_base 75: mod_base = OTHER; note = 2'-O-methyl ribonucleotide
  modified_base 76: mod_base = OTHER; note = 2'-O-methyl ribonucleotide
  modified_base 77: mod_base = OTHER; note = 2'-O-methyl ribonucleotide
  modified_base 78: mod_base = OTHER; note = 2'-O-methyl ribonucleotide
  modified_base 79: mod_base = OTHER; note = 2'-O-methyl ribonucleotide
  modified_base 80: mod_base = OTHER; note = 2'-O-methyl ribonucleotide
  modified_base 82: mod_base = OTHER; note = 2'-O-methyl ribonucleotide
  modified_base 83: mod_base = OTHER; note = 2'-O-methyl ribonucleotide
  modified_base 84: mod_base = OTHER; note = 2'-O-methyl ribonucleotide
  modified_base 85: mod_base = OTHER; note = 2'-O-methyl ribonucleotide
  modified_base 86: mod_base = OTHER; note = 2'-O-methyl ribonucleotide
  modified_base 87: mod_base = OTHER; note = 2'-O-methyl ribonucleotide
  modified_base 89: mod_base = OTHER; note = 2'-O-methyl ribonucleotide
  modified_base 92: mod_base = OTHER; note = 2'-O-methyl ribonucleotide
  modified_base 93: mod_base = OTHER; note = 2'-O-methyl ribonucleotide
  modified_base 94: mod_base = OTHER; note = 2'-O-methyl ribonucleotide
  modified_base 95: mod_base = OTHER; note = 2'-O-methyl ribonucleotide
  modified_base 96: mod_base = OTHER; note = 2'-O-methyl ribonucleotide
  modified_base 97: mod_base = OTHER; note = 2'-O-methyl ribonucleotide
  modified_base 98: mod_base = OTHER; note = 2'-O-methyl ribonucleotide
  modified_base 99: mod_base = OTHER; note = 2'-O-methyl ribonucleotide
  modified_base 100: mod_base = OTHER; note = 2'-O-methyl ribonucleotide
  modified_base 1..4: mod_base = OTHER; note = phosphorothioate linkage
  modified_base 97..100: mod_base = OTHER; note = phosphorothioate linkage
cccgcaccttggcgcagcgggttttagagctagaaatagcaagttaaaataaggctagtccgttatcaacttgaaaaagtggcaccgagtcggtgctttt

SEQ ID NO: 10 - RNA, 100 nt, synthetic construct
  source 1..100: mol_type = other RNA
  modified_base 1: mod_base = OTHER; note = 2'-O-methyl ribonucleotide
  modified_base 2: mod_base = OTHER; note = 2'-O-methyl ribonucleotide
  modified_base 3: mod_base = OTHER; note = 2'-O-methyl ribonucleotide
  modified_base 21: mod_base = OTHER; note = 2'-O-methyl ribonucleotide
  modified_base 28: mod_base = OTHER; note = 2'-O-methyl ribonucleotide
  modified_base 29: mod_base = OTHER; note = 2'-O-methyl ribonucleotide
  modified_base 30: mod_base = OTHER; note = 2'-O-methyl ribonucleotide
  modified_base 31: mod_base = OTHER; note = 2'-O-methyl ribonucleotide
  modified_base 32: mod_base = OTHER; note = 2'-O-methyl ribonucleotide
  modified_base 33: mod_base = OTHER; note = 2'-O-methyl ribonucleotide
  modified_base 34: mod_base = OTHER; note = 2'-O-methyl ribonucleotide
  modified_base 35: mod_base = OTHER; note = 2'-O-methyl ribonucleotide
  modified_base 36: mod_base = OTHER; note = 2'-O-methyl ribonucleotide
  modified_base 37: mod_base = OTHER; note = 2'-O-methyl ribonucleotide
  modified_base 38: mod_base = OTHER; note = 2'-O-methyl ribonucleotide
  modified_base 39: mod_base = OTHER; note = 2'-O-methyl ribonucleotide
  modified_base 40: mod_base = OTHER; note = 2'-O-methyl ribonucleotide
  modified_base 41: mod_base = OTHER; note = 2'-O-methyl ribonucleotide
  modified_base 42: mod_base = OTHER; note = 2'-O-methyl ribonucleotide
  modified_base 46: mod_base = OTHER; note = 2'-O-methyl ribonucleotide
  modified_base 48: mod_base = OTHER; note = 2'-O-methyl ribonucleotide
  modified_base 50: mod_base = OTHER; note = 2'-O-methyl ribonucleotide
  modified_base 52: mod_base = OTHER; note = 2'-O-methyl ribonucleotide
  modified_base 53: mod_base = OTHER; note = 2'-O-methyl ribonucleotide
  modified_base 54: mod_base = OTHER; note = 2'-O-methyl ribonucleotide
  modified_base 55: mod_base = OTHER; note = 2'-O-methyl ribonucleotide
  modified_base 56: mod_base = OTHER; note = 2'-O-methyl ribonucleotide
  modified_base 57: mod_base = OTHER; note = 2'-O-methyl ribonucleotide
  modified_base 60: mod_base = OTHER; note = 2'-O-methyl ribonucleotide
  modified_base 61: mod_base = OTHER; note = 2'-O-methyl ribonucleotide
  modified_base 66: mod_base = OTHER; note = 2'-O-methyl ribonucleotide
  modified_base 67: mod_base = OTHER; note = 2'-O-methyl ribonucleotide
  modified_base 70: mod_base = OTHER; note = 2'-O-methyl ribonucleotide
  modified_base 71: mod_base = OTHER; note = 2'-O-methyl ribonucleotide
  modified_base 72: mod_base = OTHER; note = 2'-O-methyl ribonucleotide
  modified_base 73: mod_base = OTHER; note = 2'-O-methyl ribonucleotide
  modified_base 74: mod_base = OTHER; note = 2'-O-methyl ribonucleotide
  modified_base 75: mod_base = OTHER; note = 2'-O-methyl ribonucleotide
  modified_base 76: mod_base = OTHER; note = 2'-O-methyl ribonucleotide
  modified_base 77: mod_base = OTHER; note = 2'-O-methyl ribonucleotide
  modified_base 78: mod_base = OTHER; note = 2'-O-methyl ribonucleotide
  modified_base 79: mod_base = OTHER; note = 2'-O-methyl ribonucleotide
  modified_base 80: mod_base = OTHER; note = 2'-O-methyl ribonucleotide
  modified_base 81: mod_base = OTHER; note = 2'-O-methyl ribonucleotide
  modified_base 83: mod_base = OTHER; note = 2'-O-methyl ribonucleotide
  modified_base 84: mod_base = OTHER; note = 2'-O-methyl ribonucleotide
  modified_base 85: mod_base = OTHER; note = 2'-O-methyl ribonucleotide
  modified_base 86: mod_base = OTHER; note = 2'-O-methyl ribonucleotide
  modified_base 87: mod_base = OTHER; note = 2'-O-methyl ribonucleotide
  modified_base 88: mod_base = OTHER; note = 2'-O-methyl ribonucleotide
  modified_base 89: mod_base = OTHER; note = 2'-O-methyl ribonucleotide
  modified_base 90: mod_base = OTHER; note = 2'-O-methyl ribonucleotide
  modified_base 91: mod_base = OTHER; note = 2'-O-methyl ribonucleotide
  modified_base 92: mod_base = OTHER; note = 2'-O-methyl ribonucleotide
  modified_base 93: mod_base = OTHER; note = 2'-O-methyl ribonucleotide
  modified_base 94: mod_base = OTHER; note = 2'-O-methyl ribonucleotide
  modified_base 95: mod_base = OTHER; note = 2'-O-methyl ribonucleotide
  modified_base 96: mod_base = OTHER; note = 2'-O-methyl ribonucleotide
  modified_base 97: mod_base = OTHER; note = 2'-O-methyl ribonucleotide
  modified_base 98: mod_base = OTHER; note = 2'-O-methyl ribonucleotide
  modified_base 99: mod_base = OTHER; note = 2'-O-methyl ribonucleotide
  modified_base 100: mod_base = OTHER; note = 2'-O-methyl ribonucleotide
  modified_base 1..4: mod_base = OTHER; note = phosphorothioate linkage
  modified_base 97..100: mod_base = OTHER; note = phosphorothioate linkage
cccgcaccttggcgcagcgggttttagagctagaaatagcaagttaaaataaggctagtccgttaacaacttgaaaaagtggcaccgagtcggtgctttt

SEQ ID NO: 11 - RNA, 103 nt, synthetic construct
  source 1..103: mol_type = other RNA
  modified_base 1: mod_base = OTHER; note = 2'-O-methyl ribonucleotide
  modified_base 2: mod_base = OTHER; note = 2'-O-methyl ribonucleotide
  modified_base 3: mod_base = OTHER; note = 2'-O-methyl ribonucleotide
  modified_base 21: mod_base = OTHER; note = 2'-O-methyl ribonucleotide
  modified_base 28: mod_base = OTHER; note = 2'-O-methyl ribonucleotide
  modified_base 29: mod_base = OTHER; note = 2'-O-methyl ribonucleotide
  modified_base 30: mod_base = OTHER; note = 2'-O-methyl ribonucleotide
  modified_base 31: mod_base = OTHER; note = 2'-O-methyl ribonucleotide
  modified_base 32: mod_base = OTHER; note = 2'-O-methyl ribonucleotide
  modified_base 33: mod_base = OTHER; note = 2'-O-methyl ribonucleotide
  modified_base 34: mod_base = OTHER; note = 2'-O-methyl ribonucleotide
  modified_base 35: mod_base = OTHER; note = 2'-O-methyl ribonucleotide
  modified_base 36: mod_base = OTHER; note = 2'-O-methyl ribonucleotide
  modified_base 37: mod_base = OTHER; note = 2'-O-methyl ribonucleotide
  modified_base 38: mod_base = OTHER; note = 2'-O-methyl ribonucleotide
  modified_base 39: mod_base = OTHER; note = 2'-O-methyl ribonucleotide
  modified_base 40: mod_base = OTHER; note = 2'-O-methyl ribonucleotide
  modified_base 41: mod_base = OTHER; note = 2'-O-methyl ribonucleotide
  modified_base 42: mod_base = OTHER; note = 2'-O-methyl ribonucleotide
  modified_base 46: mod_base = OTHER; note = 2'-O-methyl ribonucleotide
  modified_base 48: mod_base = OTHER; note = 2'-O-methyl ribonucleotide
  modified_base 50: mod_base = OTHER; note = 2'-O-methyl ribonucleotide
  modified_base 52: mod_base = OTHER; note = 2'-O-methyl ribonucleotide
  modified_base 53: mod_base = OTHER; note = 2'-O-methyl ribonucleotide
  modified_base 54: mod_base = OTHER; note = 2'-O-methyl ribonucleotide
  modified_base 55: mod_base = OTHER; note = 2'-O-methyl ribonucleotide
  modified_base 56: mod_base = OTHER; note = 2'-O-methyl ribonucleotide
  modified_base 57: mod_base = OTHER; note = 2'-O-methyl ribonucleotide
  modified_base 60: mod_base = OTHER; note = 2'-O-methyl ribonucleotide
  modified_base 61: mod_base = OTHER; note = 2'-O-methyl ribonucleotide
  modified_base 66: mod_base = OTHER; note = 2'-O-methyl ribonucleotide
  modified_base 67: mod_base = OTHER; note = 2'-O-methyl ribonucleotide
  modified_base 70: mod_base = OTHER; note = 2'-O-methyl ribonucleotide
  modified_base 71: mod_base = OTHER; note = 2'-O-methyl ribonucleotide
  modified_base 72: mod_base = OTHER; note = 2'-O-methyl ribonucleotide
  modified_base 73: mod_base = OTHER; note = 2'-O-methyl ribonucleotide
  modified_base 74: mod_base = OTHER; note = 2'-O-methyl ribonucleotide
  modified_base 75: mod_base = OTHER; note = 2'-O-methyl ribonucleotide
  modified_base 76: mod_base = OTHER; note = 2'-O-methyl ribonucleotide
  modified_base 77: mod_base = OTHER; note = 2'-O-methyl ribonucleotide
  modified_base 78: mod_base = OTHER; note = 2'-O-methyl ribonucleotide
  modified_base 79: mod_base = OTHER; note = 2'-O-methyl ribonucleotide
  modified_base 80: mod_base = OTHER; note = 2'-O-methyl ribonucleotide
  modified_base 81: mod_base = OTHER; note = 2'-O-methyl ribonucleotide
  modified_base 83: mod_base = OTHER; note = 2'-O-methyl ribonucleotide
  modified_base 84: mod_base = OTHER; note = 2'-O-methyl ribonucleotide
  modified_base 85: mod_base = OTHER; note = 2'-O-methyl ribonucleotide
  modified_base 86: mod_base = OTHER; note = 2'-O-methyl ribonucleotide
  modified_base 87: mod_base = OTHER; note = 2'-O-methyl ribonucleotide
  modified_base 88: mod_base = OTHER; note = 2'-O-methyl ribonucleotide
  modified_base 89: mod_base = OTHER; note = 2'-O-methyl ribonucleotide
  modified_base 90: mod_base = OTHER; note = 2'-O-methyl ribonucleotide
  modified_base 91: mod_base = OTHER; note = 2'-O-methyl ribonucleotide
  modified_base 92: mod_base = OTHER; note = 2'-O-methyl ribonucleotide
  modified_base 93: mod_base = OTHER; note = 2'-O-methyl ribonucleotide
  modified_base 94: mod_base = OTHER; note = 2'-O-methyl ribonucleotide
  modified_base 95: mod_base = OTHER; note = 2'-O-methyl ribonucleotide
  modified_base 96: mod_base = OTHER; note = 2'-O-methyl ribonucleotide
  modified_base 97: mod_base = OTHER; note = 2'-O-methyl ribonucleotide
  modified_base 98: mod_base = OTHER; note = 2'-O-methyl ribonucleotide
  modified_base 99: mod_base = OTHER; note = 2'-O-methyl ribonucleotide
  modified_base 100: mod_base = OTHER; note = 2'-O-methyl ribonucleotide
  modified_base 101: mod_base = OTHER; note = 2'-O-methyl ribonucleotide
  modified_base 102: mod_base = OTHER; note = 2'-O-methyl ribonucleotide
  modified_base 103: mod_base = OTHER; note = 2'-O-methyl ribonucleotide
  modified_base 1..4: mod_base = OTHER; note = phosphorothioate linkage
  modified_base 97..100: mod_base = OTHER; note = phosphorothioate linkage
cccgcaccttggcgcagcgggttttagagctagaaatagcaagttaaaataaggctagtccgttatcaacttgaaaaagtggcaccgagtcggtgcttttttt

SEQ ID NO: 12 - RNA, 102 nt, synthetic construct
  source 1..102: mol_type = other RNA
  modified_base 1: mod_base = OTHER; note = 2'-O-methyl ribonucleotide
  modified_base 2: mod_base = OTHER; note = 2'-O-methyl ribonucleotide
  modified_base 3: mod_base = OTHER; note = 2'-O-methyl ribonucleotide
  modified_base 20: mod_base = OTHER; note = 2'-O-methyl ribonucleotide
  modified_base 27: mod_base = OTHER; note = 2'-O-methyl ribonucleotide
  modified_base 28: mod_base = OTHER; note = 2'-O-methyl ribonucleotide
  modified_base 29: mod_base = OTHER; note = 2'-O-methyl ribonucleotide
  modified_base 30: mod_base = OTHER; note = 2'-O-methyl ribonucleotide
  modified_base 31: mod_base = OTHER; note = 2'-O-methyl ribonucleotide
  modified_base 33: mod_base = OTHER; note = 2'-O-methyl ribonucleotide
  modified_base 34: mod_base = OTHER; note = 2'-O-methyl ribonucleotide
  modified_base 35: mod_base = OTHER; note = 2'-O-methyl ribonucleotide
  modified_base 36: mod_base = OTHER; note = 2'-O-methyl ribonucleotide
  modified_base 37: mod_base = OTHER; note = 2'-O-methyl ribonucleotide
  modified_base 38: mod_base = OTHER; note = 2'-O-methyl ribonucleotide
  modified_base 39: mod_base = OTHER; note = 2'-O-methyl ribonucleotide
  modified_base 40: mod_base = OTHER; note = 2'-O-methyl ribonucleotide
  modified_base 41: mod_base = OTHER; note = 2'-O-methyl ribonucleotide
  modified_base 45: mod_base = OTHER; note = 2'-O-methyl ribonucleotide
  modified_base 47: mod_base = OTHER; note = 2'-O-methyl ribonucleotide
  modified_base 49: mod_base = OTHER; note = 2'-O-methyl ribonucleotide
  modified_base 51: mod_base = OTHER; note = 2'-O-methyl ribonucleotide
  modified_base 52: mod_base = OTHER; note = 2'-O-methyl ribonucleotide
  modified_base 53: mod_base = OTHER; note = 2'-O-methyl ribonucleotide
  modified_base 54: mod_base = OTHER; note = 2'-O-methyl ribonucleotide
  modified_base 55: mod_base = OTHER; note = 2'-O-methyl ribonucleotide
  modified_base 56: mod_base = OTHER; note = 2'-O-methyl ribonucleotide
  modified_base 59: mod_base = OTHER; note = 2'-O-methyl ribonucleotide
  modified_base 60: mod_base = OTHER; note = 2'-O-methyl ribonucleotide
  modified_base 65: mod_base = OTHER; note = 2'-O-methyl ribonucleotide
  modified_base 66: mod_base = OTHER; note = 2'-O-methyl ribonucleotide
  modified_base 69: mod_base = OTHER; note = 2'-O-methyl ribonucleotide
  modified_base 70: mod_base = OTHER; note = 2'-O-methyl ribonucleotide
  modified_base 71: mod_base = OTHER; note = 2'-O-methyl ribonucleotide
  modified_base 73: mod_base = OTHER; note = 2'-O-methyl ribonucleotide
  modified_base 74: mod_base = OTHER; note = 2'-O-methyl ribonucleotide
  modified_base 75: mod_base = OTHER; note = 2'-O-methyl ribonucleotide
  modified_base 76: mod_base = OTHER; note = 2'-O-methyl ribonucleotide
  modified_base 77: mod_base = OTHER; note = 2'-O-methyl ribonucleotide
  modified_base 78: mod_base = OTHER; note = 2'-O-methyl ribonucleotide
  modified_base 79: mod_base = OTHER; note = 2'-O-methyl ribonucleotide
  modified_base 80: mod_base = OTHER; note = 2'-O-methyl ribonucleotide
  modified_base 82: mod_base = OTHER; note = 2'-O-methyl ribonucleotide
  modified_base 83: mod_base = OTHER; note = 2'-O-methyl ribonucleotide
  modified_base 84: mod_base = OTHER; note = 2'-O-methyl ribonucleotide
  modified_base 85: mod_base = OTHER; note = 2'-O-methyl ribonucleotide
  modified_base 86: mod_base = OTHER; note = 2'-O-methyl ribonucleotide
  modified_base 87: mod_base = OTHER; note = 2'-O-methyl ribonucleotide
  modified_base 88: mod_base = OTHER; note = 2'-O-methyl ribonucleotide
  modified_base 89: mod_base = OTHER; note = 2'-O-methyl ribonucleotide
  modified_base 90: mod_base = OTHER; note = 2'-O-methyl ribonucleotide
  modified_base 91: mod_base = OTHER; note = 2'-O-methyl ribonucleotide
  modified_base 92: mod_base = OTHER; note = 2'-O-methyl ribonucleotide
  modified_base 93: mod_base = OTHER; note = 2'-O-methyl ribonucleotide
  modified_base 94: mod_base = OTHER; note = 2'-O-methyl ribonucleotide
  modified_base 95: mod_base = OTHER; note = 2'-O-methyl ribonucleotide
  modified_base 96: mod_base = OTHER; note = 2'-O-methyl ribonucleotide
  modified_base 97: mod_base = OTHER; note = 2'-O-methyl ribonucleotide
  modified_base 98: mod_base = OTHER; note = 2'-O-methyl ribonucleotide
  modified_base 99: mod_base = OTHER; note = 2'-O-methyl ribonucleotide
  modified_base 100: mod_base = OTHER; note = 2'-O-methyl ribonucleotide
  modified_base 101: mod_base = OTHER; note = 2'-O-methyl ribonucleotide
  modified_base 102: mod_base = OTHER; note = 2'-O-methyl ribonucleotide
  modified_base 1..4: mod_base = OTHER; note = phosphorothioate linkage
  modified_base 97..99: mod_base = OTHER; note = phosphorothioate linkage
cccgcaccttggcgcagcggttttagagctagaaatagcaagttaaaataaggctagtccgttatcaacttgaaaaagtggcaccgagtcggtgcttttttt

SEQ ID NO: 13 - DNA, 20 bp, unidentified
  source 1..20: mol_type = unassigned DNA; note = protospacer sequence
cccgcaccttggcgcagcgg

SEQ ID NO: 14 - DNA, 20 bp, unidentified
  source 1..20: mol_type = unassigned DNA; note = protospacer sequence
aagatacctgaataactctc

SEQ ID NO: 15 - DNA, 20 bp, unidentified
  source 1..20: mol_type = unassigned DNA; note = protospacer sequence
aagatacctgaataaccctc

SEQ ID NO: 16 - protein, 84 aa, synthetic construct
MTNLSDIIEKETGKQLVIQESILMLPEEVEEVIGNKPESDILVHTAYDESTDENVMLLTSDAPEYKPWALVIQDSNGENKIKML

SEQ ID NO: 17 - protein, 16 aa, synthetic construct
SGSETPGTSESATPES

SEQ ID NO: 18 - protein, 4 aa, synthetic construct
SGGS

SEQ ID NO: 19 - protein, 24 aa, synthetic construct
SGGSSGSETPGTSESATPESSGGS

SEQ ID NO: 20 - protein, 32 aa, synthetic construct
SGGSSGGSSGSETPGTSESATPESSGGSSGGS

SEQ ID NO: 21 - protein, 104 aa, synthetic construct
GGSGGSPGSPAGSPTSTEEGTSESATPESGPGTSTEPSEGSAPGSPAGSPTSTEEGTSTEPSEGSAPGTSTEPSEGSAPGTSESATPESGPGSEPATSGGSGGS

SEQ ID NO: 22 - protein, 5 aa, synthetic construct
GGGGS

SEQ ID NO: 23 - protein, 24 aa, synthetic construct
SGGSSGGSSGSETPGTSESATPES

SEQ ID NO: 24 - protein, 40 aa, synthetic construct
SGGSSGGSSGSETPGTSESATPESSGGSSGGSSGGSSGGS

SEQ ID NO: 25 - protein, 64 aa, synthetic construct
SGGSSGGSSGSETPGTSESATPESSGGSSGGSSGGSSGGSSGSETPGTSESATPESSGGSSGGS

SEQ ID NO: 26 - protein, 92 aa, synthetic construct
PGSPAGSPTSTEEGTSESATPESGPGTSTEPSEGSAPGSPAGSPTSTEEGTSTEPSEGSAPGTSTEPSEGSAPGTSESATPESGPGSEPATS

SEQ ID NO: 27 - protein, 7 aa, synthetic construct
PKKKRKV

SEQ ID NO: 28 - protein, 30 aa, synthetic construct
MDSLLMNRRKFLYQFKNVRWAKGRRETYLC

SEQ ID NO: 29 - protein, 36 aa, unidentified
  source 1..36: note = Zn -coordinating motif sequence
  VARIANT 2: note = Any amino acid
  VARIANT 4: note = Any amino acid
  VARIANT 5: note = Any amino acid
  VARIANT 6: note = Any amino acid
  VARIANT 7: note = Any amino acid
  VARIANT 8: note = Any amino acid
  VARIANT 9: note = Any amino acid
  VARIANT 10: note = Any amino acid
  VARIANT 11: note = Any amino acid
  VARIANT 12: note = Any amino acid
  VARIANT 13: note = Any amino acid
  VARIANT 14: note = Any amino acid
  VARIANT 15: note = Any amino acid
  VARIANT 16: note = Any amino acid
  VARIANT 17: note = Any amino acid
  VARIANT 18: note = Any amino acid
  VARIANT 19: note = Any amino acid
  VARIANT 20: note = Any amino acid
  VARIANT 21: note = Any amino acid
  VARIANT 22: note = Any amino acid
  VARIANT 23: note = Any amino acid
  VARIANT 24: note = Any amino acid
  VARIANT 25: note = Any amino acid
  VARIANT 26: note = Any amino acid
  VARIANT 27: note = Any amino acid
  VARIANT 28: note = Any amino acid
  VARIANT 29: note = Any amino acid
  VARIANT 32: note = Any amino acid
  VARIANT 33: note = Any amino acid
  VARIANT 34: note = Any amino acid
  VARIANT 35: note = Any amino acid
  VARIANT 27..29: note = Residues may be deleted
  VARIANT 34..35: note = Residues may be deleted
HXEXXXXXXXXXXXXXXXXXXXXXXXXXXPCXXXXC

SEQ ID NO: 30 - protein, 160 aa, Staphylococcus aureus
MGSHMTNDIYFMTLAIEEAKKAAQLGEVPIGAIITKDDEVIARAHNLRETLQQPTAHAEHIAIERAAKVLGSWRLEGCTLYVTLEPCVMCAGTIVMSRIPRVVYGADDPKGGCSGSLMNLLQQSNFNHRAIVDKGVLKEACSTLLTTFFKNLRANKKSTN

SEQ ID NO: 31 - protein, 161 aa, Bacillus subtilis
MTQDELYMKEAIKEAKKAEEKGEVPIGAVLVINGEIIARAHNLRETEQRSIAHAEMLVIDEACKALGTWRLEGATLYVTLEPCPMCAGAVVLSRVEKVVFGAFDPKGGCSGTLMNLLQEERFNHQAEVVSGVLEEECGGMLSAFFRELRKKKKAARKNLSE

SEQ ID NO: 32 - protein, 183 aa, Salmonella sp.
MPPAFITGVTSLSDVELDHEYWMRHALTLAKRAWDEREVPVGAVLVHNHRVIGEGWNRPIGRHDPTAHAEIMALRQGGLVLQNYRLLDTTLYVTLEPCVMCAGAMVHSRIGRVVFGARDAKTGAAGSLIDVLHHPGMNHRVEIIEGVLRDECATLLSDFFRMRRQEIKALKKADRAEGAGPAV

SEQ ID NO: 33 - protein, 164 aa, Shewanella putrefaciens
MDEYWMQVAMQMAEKAEAAGEVPVGAVLVKDGQQIATGYNLSISQHDPTAHAEILCLRSAGKKLENYRLLDATLYITLEPCAMCAGAMVHSRIARVVYGARDEKTGAAGTVVNLLQHPAFNHQVEVTSGVLAEACSAQLSRFFKRRRDEKKALKLAQRAQQGIE

SEQ ID NO: 34 - protein, 171 aa, Haemophilus influenzae
MDAAKVRSEFDEKMMRYALELADKAEALGEIPVGAVLVDDARNIIGEGWNLSIVQSDPTAEIIALRNGAKNIQNYRLLNSTLYVTLEPCTMCAGAILHSRIKRLVFGASDYKTGAIGSRFHFFDDYKMNHTLEITSGVLAEECSQKLSTFFQKRREEKKIEKALLKSLSDK

SEQ ID NO: 35 - protein, 161 aa, Caulobacter crescentus
MRTDESEDQDHRMMRLALDAARAAAEAGETPVGAVILDPSTGEVIATAGNGPIAAHDPTAHAEIAAMRAAAAKLGNYRLTDLTLVVTLEPCAMCAGAISHARIGRVVFGADDPKGGAVVHGPKFFAQPTCHWRPEVTGGVLADESADLLRGFFRARRKAKI

SEQ ID NO: 36 - protein, 179 aa, Geobacter sulfurreducens
MSSLKKTPIRDDAYWMGKAIREAAKAAARDEVPIGAVIVRDGAVIGRGHNLREGSNDPSAHAEMIAIRQAARRSANWRLTGATLYVTLEPCLMCMGAIILARLERVVFGCYDPKGGAAGSLYDLSADPRLNHQVRLSPGVCQEECGTMLSDFFRDLRRRKKAKATPALFIDERKVPPEP

SEQ ID NO: 37 - DNA, 4107 bp, Streptococcus pyogenes
  source 1..4107: mol_type = genomic DNA
atggataagaaatactcaataggcttagatatcggcacaaatagcgtcggatgggcggtgatcactgatgaatataaggttccgtctaaaaagttcaaggttctgggaaatacagaccgccacagtatcaaaaaaaatcttataggggctcttttatttgacagtggagagacagcggaagcgactcgtctcaaacggacagctcgtagaaggtatacacgtcggaagaatcgtatttgttatctacaggagattttttcaaatgagatggcgaaagtagatgatagtttctttcatcgacttgaagagtcttttttggtggaagaagacaagaagcatgaacgtcatcctatttttggaaatatagtagatgaagttgcttatcatgagaaatatccaactatctatcatctgcgaaaaaaattggtagattctactgataaagcggatttgcgcttaatctatttggccttagcgcatatgattaagtttcgtggtcattttttgattgagggagatttaaatcctgataatagtgatgtggacaaactatttatccagttggtacaaacctacaatcaattatttgaagaaaaccctattaacgcaagtggagtagatgctaaagcgattctttctgcacgattgagtaaatcaagacgattagaaaatctcattgctcagctccccggtgagaagaaaaatggcttatttgggaatctcattgctttgtcattgggtttgacccctaattttaaatcaaattttgatttggcagaagatgctaaattacagctttcaaaagatacttacgatgatgatttagataatttattggcgcaaattggagatcaatatgctgatttgtttttggcagctaagaatttatcagatgctattttactttcagatatcctaagagtaaatactgaaataactaaggctcccctatcagcttcaatgattaaacgctacgatgaacatcatcaagacttgactcttttaaaagctttagttcgacaacaacttccagaaaagtataaagaaatcttttttgatcaatcaaaaaacggatatgcaggttatattgatgggggagctagccaagaagaattttataaatttatcaaaccaattttagaaaaaatggatggtactgaggaattattggtgaaactaaatcgtgaagatttgctgcgcaagcaacggacctttgacaacggctctattccccatcaaattcacttgggtgagctgcatgctattttgagaagacaagaagacttttatccatttttaaaagacaatcgtgagaagattgaaaaaatcttgacttttcgaattccttattatgttggtccattggcgcgtggcaatagtcgttttgcatggatgactcggaagtctgaagaaacaattaccccatggaattttgaagaagttgtcgataaaggtgcttcagctcaatcatttattgaacgcatgacaaactttgataaaaatcttccaaatgaaaaagtactaccaaaacatagtttgctttatgagtattttacggtttataacgaattgacaaaggtcaaatatgttactgaaggaatgcgaaaaccagcatttctttcaggtgaacagaagaaagccattgttgatttactcttcaaaacaaatcgaaaagtaaccgttaagcaattaaaagaagattatttcaaaaaaatagaatgttttgatagtgttgaaatttcaggagttgaagatagatttaatgcttcattaggtacctaccatgatttgctaaaaattattaaagataaagattttttggataatgaagaaaatgaagatatcttagaggatattgttttaacattgaccttatttgaagatagggagatgattgaggaaagacttaaaacatatgctcacctctttgatgataaggtgatgaaacagcttaaacgtcgccgttatactggttggggacgtttgtctcgaaaattgattaatggtattagggataagcaatctggcaaaacaatattagattttttgaaatcagatggttttgccaatcgcaattttatgcagctgatccatgatgatagtttgacatttaaagaagacattcaaaaagcacaagtgtctggacaaggcgatagtttacatgaacatattgcaaatttagctggtagccctgctattaaaaaaggtattttacagactgtaaaagttgttgatgaattggtcaaagtaatggggcggcataagccagaaaatatcgttattgaaatggcacgtgaaaatcagacaactcaaaagggccagaaaaattcgcgagagcgtatgaaacgaatcgaagaaggtatcaaagaattaggaagtcagattcttaaagagcatcctgttgaaaatactcaattgcaaaatgaaaagctctatctctattatctccaaaatggaagagacatgtatgtggaccaagaattagatattaatcgtttaagtgattatgatgtcgatcacattgttccacaaagtttccttaaagacgattcaatagacaataaggtcttaacgcgttctgataaaaatcgtggtaaatcggataacgttccaagtgaagaagtagtcaaaaagatgaaaaactattggagacaacttctaaacgccaagttaatcactcaacgtaagtttgataatttaacgaaagctgaacgtggaggtttgagtgaacttgataaagctggttttatcaaacgccaattggttgaaactcgccaaatcactaagcatgtggcacaaattttggatagtcgcatgaatactaaatacgatgaaaatgataaacttattcgagaggttaaagtgattaccttaaaatctaaattagtttctgacttccgaaaagatttccaattctataaagtacgtgagattaacaattaccatcatgcccatgatgcgtatctaaatgccgtcgttggaactgctttgattaagaaatatccaaaacttgaatcggagtttgtctatggtgattataaagtttatgatgttcgtaaaatgattgctaagtctgagcaagaaataggcaaagcaaccgcaaaatatttcttttactctaatatcatgaacttcttcaaaacagaaattacacttgcaaatggagagattcgcaaacgccctctaatcgaaactaatggggaaactggagaaattgtctgggataaagggcgagattttgccacagtgcgcaaagtattgtccatgccccaagtcaatattgtcaagaaaacagaagtacagacaggcggattctccaaggagtcaattttaccaaaaagaaattcggacaagcttattgctcgtaaaaaagactgggatccaaaaaaatatggtggttttgatagtccaacggtagcttattcagtcctagtggttgctaaggtggaaaaagggaaatcgaagaagttaaaatccgttaaagagttactagggatcacaattatggaaagaagttcctttgaaaaaaatccgattgactttttagaagctaaaggatataaggaagttaaaaaagacttaatcattaaactacctaaatatagtctttttgagttagaaaacggtcgtaaacggatgctggctagtgccggagaattacaaaaaggaaatgagctggctctgccaagcaaatatgtgaattttttatatttagctagtcattatgaaaagttgaagggtagtccagaagataacgaacaaaaacaattgtttgtggagcagcataagcattatttagatgagattattgagcaaatcagtgaattttctaagcgtgttattttagcagatgccaatttagataaagttcttagtgcatataacaaacatagagacaaaccaatacgtgaacaagcagaaaatattattcatttatttacgttgacgaatcttggagctcccgctgcttttaaatattttgatacaacaattgatcgtaaacgatatacgtctacaaaagaagttttagatgccactcttatccatcaatccatcactggtctttatgaaacacgcattgatttgagtcagctaggaggtgactga

SEQ ID NO: 38 - protein, 1368 aa, Streptococcus pyogenes [sequence omitted]

SEQ ID NO: 39 - protein, 1368 aa, synthetic construct
MDKKYSIGLAIGTNSVGWAVITDEYKVPSKKFKVLGNTDRHSIKKNLIGALLFDSGETAEATRLKRTARRRYTRRKNRICYLQEIFSNEMAKVDDSFFHRLEESFLVEEDKKHERHPIFGNIVDEVAYHEKYPTIYHLRKKLVDSTDKADLRLIYLALAHMIKFRGHFLIEGDLNPDNSDVDKLFIQLVQTYNQLFEENPINASGVDAKAILSARLSKSRRLENLIAQLPGEKKNGLFGNLIALSLGLTPNFKSNFDLAEDAKLQLSKDTYDDDLDNLLAQIGDQYADLFLAAKNLSDAILLSDILRVNTEITKAPLSASMIKRYDEHHQDLTLLKALVRQQLPEKYKEIFFDQSKNGYAGYIDGGASQEEFYKFIKPILEKMDGTEELLVKLNREDLLRKQRTFDNGSIPHQIHLGELHAILRRQEDFYPFLKDNREKIEKILTFRIPYYVGPLARGNSRFAWMTRKSEETITPWNFEEVVDKGASAQSFIERMTNFDKNLPNEKVLPKHSLLYEYFTVYNELTKVKYVTEGMRKPAFLSGEQKKAIVDLLFKTNRKVTVKQLKEDYFKKIECFDSVEISGVEDRFNASLGTYHDLLKIIKDKDFLDNEENEDILEDIVLTLTLFEDREMIEERLKTYAHLFDDKVMKQLKRRRYTGWGRLSRKLINGIRDKQSGKTILDFLKSDGFANRNFMQLIHDDSLTFKEDIQKAQVSGQGDSLHEHIANLAGSPAIKKGILQTVKVVDELVKVMGRHKPENIVIEMARENQTTQKGQKNSRERMKRIEEGIKELGSQILKEHPVENTQLQNEKLYLYYLQNGRDMYVDQELDINRLSDYDVDAIVPQSFLKDDSIDNKVLTRSDKNRGKSDNVPSEEVVKKMKNYWRQLLNAKLITQRKFDNLTKAERGGLSELDKAGFIKRQLVETRQITKHVAQILDSRMNTKYDENDKLIREVKVITLKSKLVSDFRKDFQFYKVREINNYHHAHDAYLNAVVGTALIKKYPKLESEFVYGDYKVYDVRKMIAKSEQEIGKATAKYFFYSNIMNFFKTEITLANGEIRKRPLIETNGETGEIVWDKGRDFATVRKVLSMPQVNIVKKTEVQTGGFSKESILPKRNSDKLIARKKDWDPKKYGGFDSPTVAYSVLVVAKVEKGKSKKLKSVKELLGITIMERSSFEKNPIDFLEAKGYKEVKKDLIIKLPKYSLFELENGRKRMLASAGELQKGNELALPSKYVNFLYLASHYEKLKGSPEDNEQKQLFVEQHKHYLDEIIEQISEFSKRVILADANLDKVLSAYNKHRDKPIREQAENIIHLFTLTNLGAPAAFKYFDTTIDRKRYTSTKEVLDATLIHQSITGLYETRIDLSQLGGD

SEQ ID NO: 40 - protein, 1367 aa, synthetic construct
DKKYSIGLAIGTNSVGWAVITDEYKVPSKKFKVLGNTDRHSIKKNLIGALLFDSGETAEATRLKRTARRRYTRRKNRICYLQEIFSNEMAKVDDSFFHRLEESFLVEEDKKHERHPIFGNIVDEVAYHEKYPTIYHLRKKLVDSTDKADLRLIYLALAHMIKFRGHFLIEGDLNPDNSDVDKLFIQLVQTYNQLFEENPINASGVDAKAILSARLSKSRRLENLIAQLPGEKKNGLFGNLIALSLGLTPNFKSNFDLAEDAKLQLSKDTYDDDLDNLLAQIGDQYADLFLAAKNLSDAILLSDILRVNTEITKAPLSASMIKRYDEHHQDLTLLKALVRQQLPEKYKEIFFDQSKNGYAGYIDGGASQEEFYKFIKPILEKMDGTEELLVKLNREDLLRKQRTFDNGSIPHQIHLGELHAILRRQEDFYPFLKDNREKIEKILTFRIPYYVGPLARGNSRFAWMTRKSEETITPWNFEEVVDKGASAQSFIERMTNFDKNLPNEKVLPKHSLLYEYFTVYNELTKVKYVTEGMRKPAFLSGEQKKAIVDLLFKTNRKVTVKQLKEDYFKKIECFDSVEISGVEDRFNASLGTYHDLLKIIKDKDFLDNEENEDILEDIVLTLTLFEDREMIEERLKTYAHLFDDKVMKQLKRRRYTGWGRLSRKLINGIRDKQSGKTILDFLKSDGFANRNFMQLIHDDSLTFKEDIQKAQVSGQGDSLHEHIANLAGSPAIKKGILQTVKVVDELVKVMGRHKPENIVIEMARENQTTQKGQKNSRERMKRIEEGIKELGSQILKEHPVENTQLQNEKLYLYYLQNGRDMYVDQELDINRLSDYDVDHIVPQSFLKDDSIDNKVLTRSDKNRGKSDNVPSEEVVKKMKNYWRQLLNAKLITQRKFDNLTKAERGGLSELDKAGFIKRQLVETRQITKHVAQILDSRMNTKYDENDKLIREVKVITLKSKLVSDFRKDFQFYKVREINNYHHAHDAYLNAVVGTALIKKYPKLESEFVYGDYKVYDVRKMIAKSEQEIGKATAKYFFYSNIMNFFKTEITLANGEIRKRPLIETNGETGEIVWDKGRDFATVRKVLSMPQVNIVKKTEVQTGGFSKESILPKRNSDKLIARKKDWDPKKYGGFDSPTVAYSVLVVAKVEKGKSKKLKSVKELLGITIMERSSFEKNPIDFLEAKGYKEVKKDLIIKLPKYSLFELENGRKRMLASAGELQKGNELALPSKYVNFLYLASHYEKLKGSPEDNEQKQLFVEQHKHYLDEIIEQISEFSKRVILADANLDKVLSAYNKHRDKPIREQAENIIHLFTLTNLGAPAAFKYFDTTIDRKRYTSTKEVLDATLIHQSITGLYETRIDLSQLGGD

SEQ ID NO: 41 - protein, 120 aa, synthetic construct
  VARIANT 5..120: note = SGGS repeats may be deleted
SGGSSGGSSGGSSGGSSGGSSGGSSGGSSGGSSGGSSGGSSGGSSGGSSGGSSGGSSGGSSGGSSGGSSGGSSGGSSGGSSGGSSGGSSGGSSGGSSGGSSGGSSGGSSGGSSGGSSGGS

SEQ ID NO: 42 - protein, 120 aa, synthetic construct
  VARIANT 5..120: note = GGGS repeats may be deleted
GGGSGGGSGGGSGGGSGGGSGGGSGGGSGGGSGGGSGGGSGGGSGGGSGGGSGGGSGGGSGGGSGGGSGGGSGGGSGGGSGGGSGGGSGGGSGGGSGGGSGGGSGGGSGGGSGGGSGGGS

SEQ ID NO: 43 - protein, 150 aa, synthetic construct
  VARIANT 6..150: note = GGGGS repeats may be deleted
GGGGSGGGGSGGGGSGGGGSGGGGSGGGGSGGGGSGGGGSGGGGSGGGGSGGGGSGGGGSGGGGSGGGGSGGGGSGGGGSGGGGSGGGGSGGGGSGGGGSGGGGSGGGGSGGGGSGGGGSGGGGSGGGGSGGGGSGGGGSGGGGSGGGGS

SEQ ID NO: 44 - protein, 30 aa, synthetic construct
  VARIANT 2..30: note = Residues may be deleted
GGGGGGGGGGGGGGGGGGGGGGGGGGGGGG

SEQ ID NO: 45 - protein, 150 aa, synthetic construct
  VARIANT 6..150: note = EAAAK repeats may be deleted
EAAAKEAAAKEAAAKEAAAKEAAAKEAAAKEAAAKEAAAKEAAAKEAAAKEAAAKEAAAKEAAAKEAAAKEAAAKEAAAKEAAAKEAAAKEAAAKEAAAKEAAAKEAAAKEAAAKEAAAKEAAAKEAAAKEAAAKEAAAKEAAAKEAAAK

SEQ ID NO: 46 - protein, 90 aa, synthetic construct
  VARIANT 4..90: note = GGS repeats may be deleted
GGSGGSGGSGGSGGSGGSGGSGGSGGSGGSGGSGGSGGSGGSGGSGGSGGSGGSGGSGGSGGSGGSGGSGGSGGSGGSGGSGGSGGSGGS

SEQ ID NO: 47 - protein, 60 aa, synthetic construct
  VARIANT 3..60: note = XP repeats may be deleted and wherein X is any amino acid
XPXPXPXPXPXPXPXPXPXPXPXPXPXPXPXPXPXPXPXPXPXPXPXPXPXPXPXPXPXP

SEQ ID NO: 48 - protein, 5 aa, synthetic construct
EAAAK

SEQ ID NO: 49 - protein, 4 aa, synthetic construct
SGGS

SEQ ID NO: 50 - DNA, 20 bp, unidentified
  source 1..20: mol_type = unassigned DNA; note = protospacer sequence
gccaatggcctccttcagtt

SEQ ID NO: 51 - protein, 21 aa, synthetic construct
  VARIANT 4..21: note = 4 or 6 GGS repeats may be deleted
GGSGGSGGSGGSGGSGGSGGS

SEQ ID NO: 52 - protein, 1052 aa, Staphylococcus aureus
KRNYILGLDIGITSVGYGIIDYETRDVIDAGVRLFKEANVENNEGRRSKRGARRLKRRRRHRIQRVKKLLFDYNLLTDHSELSGINPYEARVKGLSQKLSEEEFSAALLHLAKRRGVHNVNEVEEDTGNELSTKEQISRNSKALEEKYVAELQLERLKKDGEVRGSINRFKTSDYVKEAKQLLKVQKAYHQLDQSFIDTYIDLLETRRTYYEGPGEGSPFGWKDIKEWYEMLMGHCTYFPEELRSVKYAYNADLYNALNDLNNLVITRDENEKLEYYEKFQIIENVFKQKKKPTLKQIAKEILVNEEDIKGYRVTSTGKPEFTNLKVYHDIKDITARKEIIENAELLDQIAKILTIYQSSEDIQEELTNLNSELTQEEIEQISNLKGYTGTHNLSLKAINLILDELWHTNDNQIAIFNRLKLVPKKVDLSQQKEIPTTLVDDFILSPVVKRSFIQSIKVINAIIKKYGLPNDIIIELAREKNSKDAQKMINEMQKRNRQTNERIEEIIRTTGKENAKYLIEKIKLHDMQEGKCLYSLEAIPLEDLLNNPFNYEVDHIIPRSVSFDNSFNNKVLVKQEENSKKGNRTPFQYLSSSDSKISYETFKKHILNLAKGKGRISKTKKEYLLEERDINRFSVQKDFINRNLVDTRYATRGLMNLLRSYFRVNNLDVKVKSINGGFTSFLRRKWKFKKERNKGYKHHAEDALIIANADFIFKEWKKLDKAKKVMENQMFEEKQAESMPEIETEQEYKEIFITPHQIKHIKDFKDYKYSHRVDKKPNRELINDTLYSTRKDDKGNTLIVNNLNGLYDKDNDKLKKLINKSPEKLLMYHHDPQTYQKLKLIMEQYGDEKNPLYKYYEETGNYLTKYSKKDNGPVIKKIKYYGNKLNAHLDITDDYPNSRNKVVKLSLKPYRFDVYLDNGVYKFVTVKNLDVIKKENYYEVNSKCYEEAKKLKKISNQAEFIASFYNNDLIKINGELYRVIGVNNDLLNRIEVNMIDITYREYLENMNDKRPPRIIKTIASKTQSIKKYSTDILGNLYEVKSKKHPQIIKKG

SEQ ID NO: 53 - protein, 1300 aa, Francisella sp.
MSIYQEFVNKYSLSKTLRFELIPQGKTLENIKARGLILDDEKRAKDYKKAKQIIDKYHQFFIEEILSSVCISEDLLQNYSDVYFKLKKSDDDNLQKDFKSAKDTIKKQISEYIKDSEKFKNLFNQNLIDAKKGQESDLILWLKQSKDNGIELFKANSDITDIDEALEIIKSFKGWTTYFKGFHENRKNVYSSNDIPTSIIYRIVDDNLPKFLENKAKYESLKDKAPEAINYEQIKKDLAEELTFDIDYKTSEVNQRVFSLDEVFEIANFNNYLNQSGITKFNTIIGGKFVNGENTKRKGINEYINLYSQQINDKTLKKYKMSVLFKQILSDTESKSFVIDKLEDDSDVVTTMQSFYEQIAAFKTVEEKSIKETLSLLFDDLKAQKLDLSKIYFKNDKSLTDLSQQVFDDYSVIGTAVLEYITQQIAPKNLDNPSKKEQELIAKKTEKAKYLSLETIKLALEEFNKHRDIDKQCRFEEILANFAAIPMIFDEIAQNKDNLAQISIKYQNQGKKDLLQASAEDDVKAIKDLLDQTNNLLHKLKIFHISQSEDKANILDKDEHFYLVFEECYFELANIVPLYNKIRNYITQKPYSDEKFKLNFENSTLANGWDKNKEPDNTAILFIKDDKYYLGVMNKKNNKIFDDKAIKENKGEGYKKIVYKLLPGANKMLPKVFFSAKSIKFYNPSEDILRIRNHSTHTKNGSPQKGYEKFEFNIEDCRKFIDFYKQSISKHPEWKDFGFRFSDTQRYNSIDEFYREVENQGYKLTFENISESYIDSVVNQGKLYLFQIYNKDFSAYSKGRPNLHTLYWKALFDERNLQDVVYKLNGEAELFYRKQSIPKKITHPAKEAIANKNKDNPKKESVFEYDLIKDKRFTEDKFFFHCPITINFKSSGANKFNDEINLLLKEKANDVHILSIDRGERHLAYYTLVDGKGNIIKQDTFNIIGNDRMKTNYHDKLAAIEKDRDSARKDWKKINNIKEMKEGYLSQVVHEIAKLVIEYNAIVVFEDLNFGFKRGRFKVEKQVYQKLEKMLIEKLNYLVFKDNEFDKTGGVLRAYQLTAPFETFKKMGKQTGIIYYVPAGFTSKICPVTGFVNQLYPKYESVSKSQEFFSKFDKICYNLDKGYFEFSFDYKNFGDKAAKGKWTIASFGSRLINFRNSDKNHNWDTREVYPTKELEKLLKDYSIEYGHGECIKAAICGESDKKFFAKLTSVLNTILQMRNSKTGTELDYLISPVADVNGNFFDSRQAPKNMPQDADANGAYHIGLKGLMLLGRIKNNQEGKKLNLVIKNEEYFEFVQNRNN

SEQ ID NO: 54 - protein, 1140 aa, Bacillus sp.
MAPKKKRKVGIHGVPAAATRSFILKIEPNEEVKKGLWKTHEVLNHGIAYYMNILKLIRQEAIYEHHEQDPKNPKKVSKAEIQAELWDFVLKMQKCNSFTHEVDKDEVFNILRELYEELVPSSVEKKGEANQLSNKFLYPLVDPNSQSGKGTASSGRKPRWYNLKIAGDPSWEEEKKKWEEDKKKDPLAKILGKLAEYGLIPLFIPYTDSNEPIVKEIKWMEKSRNQSVRRLDKDMFIQALERFLSWESWNLKVKEEYEKVEKEYKTLEERIKEDIQALKALEQYEKERQEQLLRDTLNTNEYRLSKRGLRGWREIIQKWLKMDENEPSEKYLEVFKDYQRKHPREAGDYSVYEFLSKKENHFIWRNHPEYPYLYATFCEIDKKKKDAKQQATFTLADPINHPLWVRFEERSGSNLNKYRILTEQLHTEKLKKKLTVQLDRLIYPTESGGWEEKGKVDIVLLPSRQFYNQIFLDIEEKGKHAFTYKDESIKFPLKGTLGGARVQFDRDHLRRYPHKVESGNVGRIYFNMTVNIEPTESPVSKSLKIHRDDFPKVVNFKPKELTEWIKDSKGKKLKSGIESLEIGLRVMSIDLGQRQAAAASIFEVVDQKPDIEGKLFFPIKGTELYAVHRASFNIKLPGETLVKSREVLRKAREDNLKLMNQKLNFLRNVLHFQQFEDITEREKRVTKWISRQENSDVPLVYQDELIQIRELMYKPYKDWVAFLKQLHKRLEVEIGKEVKHWRKSLSDGRKGLYGISLKNIDEIDRTRKFLLRWSLRPTEPGEVRRLEPGQRFAIDQLNHLNALKEDRLKKMANTIIMHALGYCYDVRKKKWQAKNPACQIILFEDLSNYNPYEERSRFENSKLMKWSRREIPRQVALQGEIYGLQVGEVGAQFSSRFHAKTGSPGIRCSVVTKEKLQDNRFFKNLQREGRLTLDKIAVLKEGDLYPDKGGEKFISLSKDRKCVTTHADINAAQNLQKRFWTRTHGFYKVYCKAYQVDGQTVYIPESKDQKQKIIEEFGEGYFILKDGVYEWVNAGKLKIKKGSSKQSSSELVDSDILKDSFDLASELKGEKLMLYRDPSGNVFPSDKWMAAGVFFGKLERILISKLTNQYSISTIEDDSSKQSMKRPAATKKAGQAKKKK

SEQ ID NO: 55 - RNA, 100 nt, synthetic construct
  source 1..100: mol_type = other RNA
  modified_base 1: mod_base = OTHER; note = 2'-O-methyl ribonucleotide
  modified_base 2: mod_base = OTHER; note = 2'-O-methyl ribonucleotide
  modified_base 3: mod_base = OTHER; note = 2'-O-methyl ribonucleotide
  modified_base 21: mod_base = OTHER; note = 2'-O-methyl ribonucleotide
  modified_base 28: mod_base = OTHER; note = 2'-O-methyl ribonucleotide
  modified_base 29: mod_base = OTHER; note = 2'-O-methyl ribonucleotide
  modified_base 30: mod_base = OTHER; note = 2'-O-methyl ribonucleotide
  modified_base 31: mod_base = OTHER; note = 2'-O-methyl ribonucleotide
  modified_base 32: mod_base = OTHER; note = 2'-O-methyl ribonucleotide
  modified_base 34: mod_base = OTHER; note = 2'-O-methyl ribonucleotide
  modified_base 35: mod_base = OTHER; note = 2'-O-methyl ribonucleotide
  modified_base 36: mod_base = OTHER; note = 2'-O-methyl ribonucleotide
  modified_base 37: mod_base = OTHER; note = 2'-O-methyl ribonucleotide
  modified_base 38: mod_base = OTHER; note = 2'-O-methyl ribonucleotide
  modified_base 39: mod_base = OTHER; note = 2'-O-methyl ribonucleotide
  modified_base 40: mod_base = OTHER; note = 2'-O-methyl ribonucleotide
  modified_base 41: mod_base = OTHER; note = 2'-O-methyl ribonucleotide
  modified_base 42: mod_base = OTHER; note = 2'-O-methyl ribonucleotide
  modified_base 46: mod_base = OTHER; note = 2'-O-methyl ribonucleotide
  modified_base 48: mod_base = OTHER; note = 2'-O-methyl ribonucleotide
  modified_base 50: mod_base = OTHER; note = 2'-O-methyl ribonucleotide
  modified_base 52: mod_base = OTHER; note = 2'-O-methyl ribonucleotide
  modified_base 53: mod_base = OTHER; note = 2'-O-methyl ribonucleotide
  modified_base 54: mod_base = OTHER; note = 2'-O-methyl ribonucleotide
  modified_base 57: mod_base = OTHER; note = 2'-O-methyl ribonucleotide
  modified_base 61: mod_base = OTHER; note = 2'-O-methyl ribonucleotide
  modified_base 66: mod_base = OTHER; note = 2'-O-methyl ribonucleotide
  modified_base 67: mod_base = OTHER; note = 2'-O-methyl ribonucleotide
  modified_base 70: mod_base = OTHER; note = 2'-O-methyl ribonucleotide
  modified_base 71: mod_base = OTHER; note = 2'-O-methyl ribonucleotide
  modified_base 72: mod_base = OTHER; note = 2'-O-methyl ribonucleotide
  modified_base 74: mod_base = OTHER; note = 2'-O-methyl ribonucleotide
  modified_base 75: mod_base = OTHER; note = 2'-O-methyl ribonucleotide
  modified_base 76: mod_base = OTHER; note = 2'-O-methyl ribonucleotide
  modified_base 77: mod_base = OTHER; note = 2'-O-methyl ribonucleotide
  modified_base 78: mod_base = OTHER; note = 2'-O-methyl ribonucleotide
  modified_base 79: mod_base = OTHER; note = 2'-O-methyl ribonucleotide
  modified_base 80: mod_base = OTHER; note = 2'-O-methyl ribonucleotide
  modified_base 82: mod_base = OTHER; note = 2'-O-methyl ribonucleotide
  modified_base 83: mod_base = OTHER; note = 2'-O-methyl ribonucleotide
  modified_base 84: mod_base = OTHER; note = 2'-O-methyl ribonucleotide
  modified_base 85: mod_base = OTHER; note = 2'-O-methyl ribonucleotide
  modified_base 86: mod_base = OTHER; note = 2'-O-methyl ribonucleotide
  modified_base 87: mod_base = OTHER; note = 2'-O-methyl ribonucleotide
  modified_base 89: mod_base = OTHER; note = 2'-O-methyl ribonucleotide
  modified_base 92: mod_base = OTHER; note = 2'-O-methyl ribonucleotide
  modified_base 93: mod_base = OTHER; note = 2'-O-methyl ribonucleotide
  modified_base 94: mod_base = OTHER; note = 2'-O-methyl ribonucleotide
  modified_base 95: mod_base = OTHER; note = 2'-O-methyl ribonucleotide
  modified_base 96: mod_base = OTHER; note = 2'-O-methyl ribonucleotide
  modified_base 97: mod_base = OTHER; note = 2'-O-methyl ribonucleotide
  modified_base 98: mod_base = OTHER; note = 2'-O-methyl ribonucleotide
  modified_base 99: mod_base = OTHER; note = 2'-O-methyl ribonucleotide
  modified_base 100: mod_base = OTHER; note = 2'-O-methyl ribonucleotide
  modified_base 1..4: mod_base = OTHER; note = phosphorothioate linkage
  modified_base 97..100: mod_base = OTHER; note = phosphorothioate linkage
caggttccatgggatgctctgttttagagctagaaatagcaagttaaaataaggctagtccgttatcaacttgaaaaagtggcaccgagtcggtgctttt

SEQ ID NO: 56 - RNA, 20 nt, synthetic construct
  source 1..20: mol_type = other RNA
  modified_base 1: mod_base = OTHER; note = 2'-O-methyl ribonucleotide
  modified_base 2: mod_base = OTHER; note = 2'-O-methyl ribonucleotide
  modified_base 3: mod_base = OTHER; note = 2'-O-methyl ribonucleotide
  modified_base 1..4: mod_base = OTHER; note = phosphorothioate linkage
caggttccatgggatgctct

SEQ ID NO: 57 - RNA, 80 nt, synthetic construct
  source 1..80: mol_type = other RNA
  modified_base 1: mod_base = OTHER; note = 2'-O-methyl ribonucleotide
  modified_base 8: mod_base = OTHER; note = 2'-O-methyl ribonucleotide
  modified_base 9: mod_base = OTHER; note = 2'-O-methyl ribonucleotide
  modified_base 10: mod_base = OTHER; note = 2'-O-methyl ribonucleotide
  modified_base 11: mod_base = OTHER; note = 2'-O-methyl ribonucleotide
  modified_base 12: mod_base = OTHER; note = 2'-O-methyl ribonucleotide
  modified_base 14: mod_base = OTHER; note = 2'-O-methyl ribonucleotide
  modified_base 15: mod_base = OTHER; note = 2'-O-methyl ribonucleotide
  modified_base 16: mod_base = OTHER; note = 2'-O-methyl ribonucleotide
  modified_base 17: mod_base = OTHER; note = 2'-O-methyl ribonucleotide
  modified_base 18: mod_base = OTHER; note = 2'-O-methyl ribonucleotide
  modified_base 19: mod_base = OTHER; note = 2'-O-methyl ribonucleotide
  modified_base 20: mod_base = OTHER; note = 2'-O-methyl ribonucleotide
  modified_base 21: mod_base = OTHER; note = 2'-O-methyl ribonucleotide
  modified_base 22: mod_base = OTHER; note = 2'-O-methyl ribonucleotide
  modified_base 26: mod_base = OTHER; note = 2'-O-methyl ribonucleotide
  modified_base 28: mod_base = OTHER; note = 2'-O-methyl ribonucleotide
  modified_base 30: mod_base = OTHER; note = 2'-O-methyl ribonucleotide
  modified_base 32: mod_base = OTHER; note = 2'-O-methyl ribonucleotide
  modified_base 33: mod_base = OTHER; note = 2'-O-methyl ribonucleotide
  modified_base 34: mod_base = OTHER; note = 2'-O-methyl ribonucleotide
  modified_base 37: mod_base = OTHER; note = 2'-O-methyl ribonucleotide
  modified_base 41: mod_base = OTHER; note = 2'-O-methyl ribonucleotide
  modified_base 46: mod_base = OTHER; note = 2'-O-methyl ribonucleotide
  modified_base 47: mod_base = OTHER; note = 2'-O-methyl ribonucleotide
  modified_base 50: mod_base = OTHER; note = 2'-O-methyl ribonucleotide
  modified_base 51: mod_base = OTHER; note = 2'-O-methyl ribonucleotide
  modified_base 52: mod_base = OTHER; note = 2'-O-methyl ribonucleotide
  modified_base 54: mod_base = OTHER; note = 2'-O-methyl ribonucleotide
  modified_base 55: mod_base = OTHER; note = 2'-O-methyl ribonucleotide
  modified_base 56: mod_base = OTHER; note = 2'-O-methyl ribonucleotide
  modified_base 57: mod_base = OTHER; note = 2'-O-methyl ribonucleotide
  modified_base 58: mod_base = OTHER; note = 2'-O-methyl ribonucleotide
  modified_base 59: mod_base = OTHER; note = 2'-O-methyl ribonucleotide
  modified_base 60: mod_base = OTHER; note = 2'-O-methyl ribonucleotide
  modified_base 62: mod_base = OTHER; note = 2'-O-methyl ribonucleotide
  modified_base 63: mod_base = OTHER; note = 2'-O-methyl ribonucleotide
  modified_base 64: mod_base = OTHER; note = 2'-O-methyl ribonucleotide
  modified_base 65: mod_base = OTHER; note = 2'-O-methyl ribonucleotide
  modified_base 66: mod_base = OTHER; note = 2'-O-methyl ribonucleotide
  modified_base 67: mod_base = OTHER; note = 2'-O-methyl ribonucleotide
  modified_base 69: mod_base = OTHER; note = 2'-O-methyl ribonucleotide
  modified_base 72: mod_base = OTHER; note = 2'-O-methyl ribonucleotide
  modified_base 73: mod_base = OTHER; note = 2'-O-methyl ribonucleotide
  modified_base 74: mod_base = OTHER; note = 2'-O-methyl ribonucleotide
  modified_base 75: mod_base = OTHER; note = 2'-O-methyl ribonucleotide
  modified_base 76: mod_base = OTHER; note = 2'-O-methyl ribonucleotide
  modified_base 77: mod_base = OTHER; note = 2'-O-methyl ribonucleotide
  modified_base 78: mod_base = OTHER; note = 2'-O-methyl ribonucleotide
  modified_base 79: mod_base = OTHER; note = 2'-O-methyl ribonucleotide
  modified_base 80: mod_base = OTHER; note = 2'-O-methyl ribonucleotide
  modified_base 77..80: mod_base = OTHER; note = phosphorothioate linkage
gttttagagctagaaatagcaagttaaaataaggctagtccgttatcaacttgaaaaagtggcaccgagtcggtgctttt

SEQ ID NO: 58 - DNA, 100 bp, synthetic construct
  source 1..100: mol_type = other DNA
  modified_base 1: mod_base = OTHER; note = 2'-O-methyl ribonucleotide
  modified_base 2: mod_base = OTHER; note = 2'-O-methyl ribonucleotide
  modified_base 3: mod_base = OTHER; note = 2'-O-methyl ribonucleotide
  modified_base 98: mod_base = OTHER; note = 2'-O-methyl ribonucleotide
  modified_base 99: mod_base = OTHER; note = 2'-O-methyl ribonucleotide
  modified_base 100: mod_base = OTHER; note = 2'-O-methyl ribonucleotide
  modified_base 1..4: mod_base = OTHER; note = phosphorothioate linkage
  modified_base 97..100: mod_base = OTHER; note = phosphorothioate linkage
  misc_feature 1: note = RNA
  misc_feature 2: note = RNA
  misc_feature 3: note = RNA
  misc_feature 4: note = RNA
  misc_feature 5: note = RNA
  misc_feature 6: note = RNA
  misc_feature 7: note = RNA
  misc_feature 8: note = RNA
  misc_feature 11: note = RNA
  misc_feature 12: note = RNA
  misc_feature 13: note = RNA
  misc_feature 14: note = RNA
  misc_feature 15: note = RNA
  misc_feature 16: note = RNA
  misc_feature 17: note = RNA
  misc_feature 18: note = RNA
  misc_feature 19: note = RNA
  misc_feature 20: note = RNA
  misc_feature 21: note = RNA
  misc_feature 22: note = RNA
  misc_feature 23: note = RNA
  misc_feature 24: note = RNA
  misc_feature 25: note = RNA
  misc_feature 26: note = RNA
  misc_feature 27: note = RNA
  misc_feature 28: note = RNA
  misc_feature 29: note = RNA
  misc_feature 30: note = RNA
  misc_feature 31: note = RNA
  misc_feature 32: note = RNA
  misc_feature 33: note = RNA
  misc_feature 34: note = RNA
  misc_feature 35: note = RNA
  misc_feature 36: note = RNA
  misc_feature 37: note = RNA
  misc_feature 38: note = RNA
  misc_feature 39: note = RNA
  misc_feature 40: note = RNA
  misc_feature 41: note = RNA
  misc_feature 42: note = RNA
  misc_feature 43: note = RNA
  misc_feature 44: note = RNA
  misc_feature 45: note = RNA
  misc_feature 46: note = RNA
  misc_feature 47: note = RNA
  misc_feature 48: note = RNA
  misc_feature 49: note = RNA
  misc_feature 50: note = RNA
  misc_feature 51: note = RNA
  misc_feature 52: note = RNA
  misc_feature 53: note = RNA
  misc_feature 54: note = RNA
  misc_feature 55: note = RNA
  misc_feature 56: note = RNA
  misc_feature 57: note = RNA
  misc_feature 58: note = RNA
  misc_feature 59: note = RNA
  misc_feature 60: note = RNA
  misc_feature 61: note = RNA
  misc_feature 62: note = RNA
  misc_feature 63: note = RNA
  misc_feature 64: note = RNA
  misc_feature 65: note = RNA
  misc_feature 66: note = RNA
  misc_feature 67: note = RNA
  misc_feature 68: note = RNA
  misc_feature 69: note = RNA
  misc_feature 70: note = RNA
  misc_feature 71: note = RNA
  misc_feature 72: note = RNA
  misc_feature 73: note = RNA
  misc_feature 74: note = RNA
  misc_feature 75: note = RNA
  misc_feature 76: note = RNA
  misc_feature 77: note = RNA
  misc_feature 78: note = RNA
  misc_feature 79: note = RNA
  misc_feature 80: note = RNA
  misc_feature 81: note = RNA
  misc_feature 82: note = RNA
  misc_feature 83: note = RNA
  misc_feature 84: note = RNA
  misc_feature 85: note = RNA
  misc_feature 86: note = RNA
  misc_feature 87: note = RNA
  misc_feature 88: note = RNA
  misc_feature 89: note = RNA
  misc_feature 90: note = RNA
  misc_feature 91: note = RNA
  misc_feature 92: note = RNA
  misc_feature 93: note = RNA
  misc_feature 94: note = RNA
  misc_feature 95: note = RNA
  misc_feature 96: note = RNA
  misc_feature 97: note = RNA
  misc_feature 98: note = RNA
  misc_feature 99: note = RNA
  misc_feature 100: note = RNA
  misc_feature 9: note = DNA
  misc_feature 10: note = DNA
cccgcaccttggcgcagcgggttttagagctagaaatagcaagttaaaataaggctagtccgttatcaacttgaaaaagtggcaccgagtcggtgctttt

SEQ ID NO: 59 - RNA, 100 nt, synthetic construct
  source 1..100: mol_type = other RNA
  modified_base 1: mod_base = OTHER; note = 2'-O-methyl ribonucleotide
  modified_base 2: mod_base = OTHER; note = 2'-O-methyl ribonucleotide
  modified_base 3: mod_base = OTHER; note = 2'-O-methyl ribonucleotide
  modified_base 98: mod_base = OTHER; note = 2'-O-methyl ribonucleotide
  modified_base 99: mod_base = OTHER; note = 2'-O-methyl ribonucleotide
  modified_base 100: mod_base = OTHER; note = 2'-O-methyl ribonucleotide
  modified_base 1..4: mod_base = OTHER; note = phosphorothioate linkage
  modified_base 97..100: mod_base = OTHER; note = phosphorothioate linkage
aagatacctgaataaccctcgttttagagctagaaatagcaagttaaaataaggctagtccgttatcaacttgaaaaagtggcaccgagtcggtgctttt

SEQ ID NO: 60 - RNA, 100 nt, synthetic construct; identical to SEQ ID NO: 59
  source 1..100: mol_type = other RNA
  modified_base 1: mod_base = OTHER; note = 2'-O-methyl ribonucleotide
  modified_base 2: mod_base = OTHER; note = 2'-O-methyl ribonucleotide
  modified_base 3: mod_base = OTHER; note = 2'-O-methyl ribonucleotide
  modified_base 29: mod_base = OTHER; note = 2'-O-methyl ribonucleotide
  modified_base 30: mod_base = OTHER; note = 2'-O-methyl ribonucleotide
  modified_base 31: mod_base = OTHER; note = 2'-O-methyl ribonucleotide
  modified_base 32: mod_base = OTHER; note = 2'-O-methyl ribonucleotide
  modified_base 33: mod_base = OTHER; note = 2'-O-methyl ribonucleotide
  modified_base 34: mod_base = OTHER; note = 2'-O-methyl ribonucleotide
  modified_base 35: mod_base = OTHER; note = 2'-O-methyl ribonucleotide
  modified_base 36: mod_base = OTHER; note = 2'-O-methyl ribonucleotide
  modified_base 37: mod_base = OTHER; note = 2'-O-methyl ribonucleotide
  modified_base 38: mod_base = OTHER; note = 2'-O-methyl ribonucleotide
  modified_base 39: mod_base = OTHER; note = 2'-O-methyl ribonucleotide
  modified_base 40: mod_base = OTHER; note = 2'-O-methyl ribonucleotide
  modified_base 69: mod_base = OTHER; note = 2'-O-methyl ribonucleotide
  modified_base 70: mod_base = OTHER; note = 2'-O-methyl ribonucleotide
  modified_base 71: mod_base = OTHER; note = 2'-O-methyl ribonucleotide
  modified_base 72: mod_base = OTHER; note = 2'-O-methyl ribonucleotide
  modified_base 73: mod_base = OTHER; note = 2'-O-methyl ribonucleotide
  modified_base 74: mod_base = OTHER; note = 2'-O-methyl ribonucleotide
  modified_base 75: mod_base = OTHER; note = 2'-O-methyl ribonucleotide
  modified_base 76: mod_base = OTHER; note = 2'-O-methyl ribonucleotide
  modified_base 77: mod_base = OTHER; note = 2'-O-methyl ribonucleotide
  modified_base 78: mod_base = OTHER; note = 2'-O-methyl ribonucleotide
  modified_base 79: mod_base = OTHER; note = 2'-O-methyl ribonucleotide
  modified_base 80: mod_base = OTHER; note = 2'-O-methyl ribonucleotide
  modified_base 81: mod_base = OTHER; note = 2'-O-methyl ribonucleotide
  modified_base 82: mod_base = OTHER; note = 2'-O-methyl ribonucleotide
  modified_base 83: mod_base = OTHER; note = 2'-O-methyl ribonucleotide
  modified_base 84: mod_base = OTHER; note = 2'-O-methyl ribonucleotide
  modified_base 85: mod_base = OTHER; note = 2'-O-methyl ribonucleotide
  modified_base 86: mod_base = OTHER; note = 2'-O-methyl ribonucleotide
  modified_base 87: mod_base = OTHER; note = 2'-O-methyl ribonucleotide
  modified_base 88: mod_base = OTHER; note = 2'-O-methyl ribonucleotide
  modified_base 89: mod_base = OTHER; note = 2'-O-methyl ribonucleotide
  modified_base 90: mod_base = OTHER; note = 2'-O-methyl ribonucleotide
  modified_base 91: mod_base = OTHER; note = 2'-O-methyl ribonucleotide
  modified_base 92: mod_base = OTHER; note = 2'-O-methyl ribonucleotide
  modified_base 93: mod_base = OTHER; note = 2'-O-methyl ribonucleotide
  modified_base 94: mod_base = OTHER; note = 2'-O-methyl ribonucleotide
  modified_base 95: mod_base = OTHER; note = 2'-O-methyl ribonucleotide
  modified_base 96: mod_base = OTHER; note = 2'-O-methyl ribonucleotide
  modified_base 97: mod_base = OTHER; note = 2'-O-methyl ribonucleotide
  modified_base 98: mod_base = OTHER; note = 2'-O-methyl ribonucleotide
  modified_base 99: mod_base = OTHER; note = 2'-O-methyl ribonucleotide
  modified_base 100: mod_base = OTHER; note = 2'-O-methyl ribonucleotide
  modified_base 1..4: mod_base = OTHER; note = phosphorothioate linkage
  modified_base 97..100: mod_base = OTHER; note = phosphorothioate linkage

SEQ ID NO: 61 - RNA, 80 nt, synthetic construct; identical to SEQ ID NO: 57
  source 1..80: mol_type = other RNA

SEQ ID NO: 62 - DNA, 3166 bp, Homo sapiens
  source 1..3166: mol_type = genomic DNA
ctgctcagttcatccctagaggcagctgctccaggtaatgccctctggggaggggaaagaggaggggaggaggatgaagaggggcaagaggagctccctgcccagcccagccagcaagcctggagaagcacttgctagagctaaggaagcctcggagctggacgggtgccccccacccctcatcataacctgaagaacatggaggcccgggaggggtgtcacttgcccaaagctacacagggggtggggctggaagtggctccaagtgcaggttcccccctcattcttcaggcttagggctggaggaagccttagacagcccagtcctaccccagacagggaaactgaggcctggagagggccagaaatcacccaaagacacacagcatgttggctggactggacggagatcagtccagaccgcaggtgccttgatgttcagtctggtgggttttctgctccatcccacccacctccctttgggcctcgatccctcgcccctcaccagtcccccttctgagagcccgtattagcagggagccggcccctactccttctggcagacccagctaaggttctaccttaggggccacgccacctccccagggaggggtccagaggcatggggacctggggtgcccctcacaggacacttccttgcaggaacagaggtgccatgcagccccgggtactccttgttgttgccctcctggcgctcctggcctctgcccgtaagcacttggtgggactgggctgggggcagggtggaggcaacttggggatcccagtcccaatgggtggtcaagcaggagcccagggctcgtccagaggccgatccaccccactcagccctgctctttcctcaggagcttcagaggccgaggatgcctcccttctcagcttcatgcagggttacatgaagcacgccaccaagaccgccaaggatgcactgagcagcgtgcaggagtcccaggtggcccagcaggccaggtacacccgctggcctccctccccatcccccctgccagctgcctccattcccacccgcccctgccctggtgagatcccaacaatggaatggaggtgctccagcctcccctgggcctgtgcctcttcagcctcctctttcctcacagggcctttgtcaggctgctgcgggagagatgacagagttgagactgcattcctcccaggtccctcctttctccccggagcagtcctagggcgtgccgttttagccctcatttccattttcctttcctttccctttctttctctttctatttctttctttctttctttctttctttctttctttctttctttctttctttctttctttctttctttcctttctttctttcctttctttctttcctttctttctttctttcctttctttctctttctttctttctttcctttttctttctttccctctcttcctttctctctttctttcttcttcttttttttttaatggagtctccctctgtcacctaggctggagtgcagtggtgccatctcggctcactgcaacctccgtctcccgggttcaacccattctcctgcctcagcctcccaagtagctgggattacaggcacgcgccaccacacccagctaatttttgtatttttagcagagatggggtttcaccatgttggccaggttggtcttgaattcctgacctcaggggatcctcctgcctcggcctcccaaagtgctgggattacaggcatgagccactgcgcctggccccattttccttttctgaaggtctggctagagcagtggtcctcagcctttttggcaccagggaccagttttgtggtggacaatttttccatgggccagcggggatggttttgggatgaagctgttccacctcagatcatcaggcattagattctcataaggagccctccacctagatccctggcatgtgcagttcacaatagggttcacactcctatgagaatgtaaggccacttgatctgacaggaggcggagctcaggcggtattgctcactcacccaccactcacttcgtgctgtgcagcccggctcctaacagtccatggaccagtacctatctatgacttgggggttggggacccctgggctaggggtttgccttgggaggccccacctgacccaattcaagcccgtgagtgcttctgctttgttctaagacctggggccagtgtgagcagaagtgtgtccttcctctcccatcctgcccctgcccatcagtactctcctctcccctactcccttctccacctcaccctgactggcattagctggcatagcagaggtgttcataaacattcttagtccccagaaccggctttggggtaggtgttattttctcactttgcagatgagaaaattgaggctcagagcgattaggtgacctgccccagatcacacaactaatcaatcctccaatgactttccaaatgagaggctgcctccctctgtcctaccctgctcagagccaccaggttgtgcaactccaggcggtgctgtttgcacagaaaacaatgacagccttgacctttcacatctccccaccctgtcactttgtgcctcaggcccaggggcataaacatctgaggtgacctggagatggcagggtttgacttgtgctggggttcctgcaaggatatctcttctcccagggtggcagctgtgggggattcctgcctgaggtctcagggctgtcgtccagtgaagttgagagggtggtgtggtcctgactggtgtcgtccagtggggacatgggtgtgggtcccatggttgcctacagaggagttctcatgccctgctctgttgcttcccctgactgatttaggggctgggtgaccgatggcttcagttccctgaaagactactggagcaccgttaaggacaagttctctgagttctgggatttggaccctgaggtcagaccaacttcagccgtggctgcctgagacctcaataccccaagtccacctgcctatccatcctgcgagctccttgggtcctgcaatctccagggctgcccctgtaggttgcttaaaagggacagtattctcagtgctctcctaccccacctcatgcctggcccccctccaggcatgctggcctcccaataaagctggacaagaagctgctatga

SEQ ID NO: 63 - protein, 99 aa, Homo sapiens
MQPRVLLVVALLALLASARASEAEDASLLSFMQGYMKHATKTAKDALSSVQESQVAQQARGWVTDGFSSLKDYWSTVKDKFSEFWDLDPEVRPTSAVAA

SEQ ID NO: 64 - protein, 4548 aa, Homo sapiens
MEHKEVVLLLLLFLKSAAPEQSHVVQDCYHGDGQSYRGTYSTTVTGRTCQAWSSMTPHQHNRTTENYPNAGLIMNYCRNPDAVAAPYCYTRDPGVRWEYCNLTQCSDAEGTAVAPPTVTPVPSLEAPSEQAPTEQRPGVQECYHGNGQSYRGTYSTTVTGRTCQAWSSMTPHSHSRTPEYYPNAGLIMNYCRNPDAVAAPYCYTRDPGVRWEYCNLTQCSDAEGTAVAPPTVTPVPSLEAPSEQAPTEQRPGVQECYHGNGQSYRGTYSTTVTGRTCQAWSSMTPHSHSRTPEYYPNAGLIMNYCRNPDAVAAPYCYTRDPGVRWEYCNLTQCSDAEGTAVAPPTVTPVPSLEAPSEQAPTEQRPGVQECYHGNGQSYRGTYSTTVTGRTCQAWSSMTPHSHSRTPEYYPNAGLIMNYCRNPDAVAAPYCYTRDPGVRWEYCNLTQCSDAEGTAVAPPTVTPVPSLEAPSEQAPTEQRPGVQECYHGNGQSYRGTYSTTVTGRTCQAWSSMTPHSHSRTPEYYPNAGLIMNYCRNPDAVAAPYCYTRDPGVRWEYCNLTQCSDAEGTAVAPPTVTPVPSLEAPSEQAPTEQRPGVQECYHGNGQSYRGTYSTTVTGRTCQAWSSMTPHSHSRTPEYYPNAGLIMNYCRNPDAVAAPYCYTRDPGVRWEYCNLTQCSDAEGTAVAPPTVTPVPSLEAPSEQAPTEQRPGVQECYHGNGQSYRGTYSTTVTGRTCQAWSSMTPHSHSRTPEYYPNAGLIMNYCRNPDAVAAPYCYTRDPGVRWEYCNLTQCSDAEGTAVAPPTVTPVPSLEAPSEQAPTEQRPGVQECYHGNGQSYRGTYSTTVTGRTCQAWSSMTPHSHSRTPEYYPNAGLIMNYCRNPDAVAAPYCYTRDPGVRWEYCNLTQCSDAEGTAVAPPTVTPVPSLEAPSEQAPTEQRPGVQECYHGNGQSYRGTYSTTVTGRTCQAWSSMTPHSHSRTPEYYPNAGLIMNYCRNPDAVAAPYCYTRDPGVRWEYCNLTQCSDAEGTAVAPPTVTPVPSLEAPSEQAPTEQRPGVQECYHGNGQSYRGTYSTTVTGRTCQAWSSMTPHSHSRTPEYYPNAGLIMNYCRNPDAVAAPYCYTRDPGVRWEYCNLTQCSDAEGTAVAPPTVTPVPSLEAPSEQAPTEQRPGVQECYHGNGQSYRGTYSTTVTGRTCQAWSSMTPHSHSRTPEYYPNAGLIMNYCRNPDAVAAPYCYTRDPGVRWEYCNLTQCSDAEGTAVAPPTVTPVPSLEAPSEQAPTEQRPGVQECYHGNGQSYRGTYSTTVTGRTCQAWSSMTPHSHSRTPEYYPNAGLIMNYCRNPDAVAAPYCYTRDPGVRWEYCNLTQCSDAEGTAVAPPTVTPVPSLEAPSEQAPTEQRPGVQECYHGNGQSYRGTYSTTVTGRTCQAWSSMTPHSHSRTPEYYPNAGLIMNYCRNPDAVAAPYCYTRDPGVRWEYCNLTQCSDAEGTAVAPPTVTPVPSLEAPSEQAPTEQRPGVQECYHGNGQSYRGTYSTTVTGRTCQAWSSMTPHSHSRTPEYYPNAGLIMNYCRNPDAVAAPYCYTRDPGVRWEYCNLTQCSDAEGTAVAPPTVTPVPSLEAPSEQAPTEQRPGVQECYHGNGQSYRGTYSTTVTGRTCQAWSSMTPHSHSRTPEYYPNAGLIMNYCRNPDAVAAPYCYTRDPGVRWEYCNLTQCSDAEGTAVAPPTVTPVPSLEAPSEQAPTEQRPGVQECYHGNGQSYRGTYSTTVTGRTCQAWSSMTPHSHSRTPEYYPNAGLIMNYCRNPDAVAAPYCYTRDPGVRWEYCNLTQCSDAEGTAVAPPTVTPVPSLEAPSEQAPTEQRPGVQECYHGNGQSYRGTYSTTVTGRTCQAWSSMTPHSHSRTPEYYPNAGLIMNYCRNPDAVAAPYCYTRDPGVRWEYCNLTQCSDAEGTAVAPPTVTPVPSLEAPSEQAPTEQRPGVQECYHGNGQSYRGTYSTTVTGRTCQAWSSMTPHSHSRTPEYYPNAGLIMNYCRNPDAVAAPYCYTRDPGVRWEYCNLTQCSDAEGTAVAPPTVTPVPSLEAPSEQAPTEQRPGVQECYHGNGQSYRGTYSTTVTGRTCQAWSSMTPHSHSRTPEYYPNAGLIMNYCRNPDAVAAPYCYTRDPGVRWEYCNLTQCSDAEGTAVAPPTVTPVPSLEAPSEQAPTEQRPGVQECYHGNGQSYRGTYSTTVTGRTCQAWSSMTPHSHSRTPEYYPNAGLIMNYCRNPDAVAAPYCYTRDPGVRWEYCNLTQCSDAEGTAVAPPTVTPVPSLEAPSEQAPTEQRPGVQECYHGNGQSYRGTYSTTVTGRTCQAWSSMTPHSHSRTPEYYPNAGLIMNYCRNPDAVAAPYCYTRDPGVRWEYCNLTQCSDAEGTAVAPPTVTPVPSLEAPSEQAPTEQRPGVQECYHGNGQSYRGTYSTTVTGRTCQAWSSMTPHSHSRTPEYYPNAGLIMNYCRNPDAVAAPYCYTRDPGVRWEYCNLTQCSDAEGTAVAPPTVTPVPSLEAPSEQAPTEQRPGVQECYHGNGQSYRGTYSTTVTGRTCQAWSSMTPHSHSRTPEYYPNAGLIMNYCRNPDAVAAPYCYTRDPGVRWEYCNLTQCSDAEGTAVAPPTVTPVPSLEAPSEQAPTEQRPGVQECYHGNGQSYRGTYSTTVTGRTCQAWSSMTPHSHSRTPEYYPNAGLIMNYCRNPDAVAAPYCYTRDPGVRWEYCNLTQCSDAEGTAVAPPTVTPVPSLEAPSEQAPTEQRPGVQECYHGNGQSYRGTYSTTVTGRTCQAWSSMTPHSHSRTPEYYPNAGLIMNYCRNPDAVAAPYCYTRDPGVRWEYCNLTQCSDAEGTAVAPPTVTPVPSLEAPSEQAPTEQRPGVQECYHGNGQSYRGTYSTTVTGRTCQAWSSMTPHSHSRTPEYYPNAGLIMNYCRNPDAVAAPYCYTRDPGVRWEYCNLTQCSDAEGTAVAPPTVTPVPSLEAPSEQAPTEQRPGVQECYHGNGQSYRGTYSTTVTGRTCQAWSSMTPHSHSRTPEYYPNAGLIMNYCRNPDAVAAPYCYTRDPGVRWEYCNLTQCSDAEGTAVAPPTVTPVPSLEAPSEQAPTEQRPGVQECYHGNGQSYRGTYSTTVTGRTCQAWSSMTPHSHSRTPEYYPNAGLIMNYCRNPDAVAAPYCYTRDPGVRWEYCNLTQCSDAEGTAVAPPTVTPVPSLEAPSEQAPTEQRPGVQECYHGNGQSYRGTYSTTVTGRTCQAWSSMTPHSHSRTPEYYPNAGLIMNYCRNPDAVAAPYCYTRDPGVRWEYCNLTQCSDAEGTAVAPPTVTPVPSLEAPSEQAPTEQRPGVQECYHGNGQSYRGTYSTTVTGRTCQAWSSMTPHSHSRTPEYYPNAGLIMNYCRNPDPVAAPYCYTRDPSVRWEYCNLTQCSDAEGTAVAPPTITPIPSLEAPSEQAPTEQRPGVQECYHGNGQSYQGTYFITVTGRTCQAWSSMTPHSHSRTPAYYPNAGLIKNYCRNPDPVAAPWCYTTDPSVRWEYCNLTRCSDAEWTAFVPPNVILAPSLEAFFEQALTEETPGVQDCYYHYGQSYRGTYSTTVTGRTCQAWSSMTPHQHSRTPENYPNAGLTRNYCRNPDAEIRPWCYTMDPSVRWEYCNLTQCLVTESSVLATLTVVPDPSTEASSEEAPTEQSPGVQDCYHGDGQSYRGSFSTTVTGRTCQSWSSMTPHWHQRTTEYYPNGGLTRNYCRNPDAEISPWCYTMDPNVRWEYCNLTQCPVTESSVLATSTAVSEQAPTEQSPTVQDCYHGDGQSYRGSFSTTVTGRTCQSWSSMTPHWHQRTTEYYPNGGLTRNYCRNPDAEIRPWCYTMDPSVRWEYCNLTQCPVMESTLLTTPTVVPVPSTELPSEEAPTENSTGVQDCYRGDGQSYRGTLSTTITGRTCQSWSSMTPHWHRRIPLYYPNAGLTRNYCRNPDAEIRPWCYTMDPSVRWEYCNLTRCPVTESSVLTTPTVAPVPSTEAPSEQAPPEKSPVVQDCYHGDGRSYRGISSTTVTGRTCQSWSSMIPHWHQRTPENYPNAGLTENYCRNPDSGKQPWCYTTDPCVRWEYCNLTQCSETESGVLETPTVVPVPSMEAHSEAAPTEQTPVVRQCYHGNGQSYRGTFSTTVTGRTCQSWSSMTPHRHQRTPENYPNDGLTMNYCRNPDADTGPWCFTMDPSIRWEYCNLTRCSDTEGTVVAPPTVIQVPSLGPPSEQDCMFGNGKGYRGKKATTVTGTPCQEWAAQEPHRHSTFIPGTNKWAGLEKNYCRNPDGDINGPWCYTMNPRKLFDYCDIPLCASSSFDCGKPQVEPKKCPGSIVGGCVAHPHSWPWQVSLRTRFGKHFCGGTLISPEWVLTAAHCLKKSSRPSSYKVILGAHQEVNLESHVQEIEVSRLFLEPTQADIALLKLSRPAVITDKVMPACLPSPDYMVTARTECYITGWGETQGTFGTGLLKEAQLLVIENEVCNHYKYICAEHLARGTDSCQGDSGGPLVCFEKDKYILQGVTSWGLGCARPNKPGVYARVSRFVTWIEGMMRNN

SEQ ID NO: 65 - RNA, 100 nt, synthetic construct; identical to SEQ ID NO: 10
  source 1..100: mol_type = other RNA
  modified_base 1: mod_base = OTHER; note = 2'-O-methyl ribonucleotide
  modified_base 2: mod_base = OTHER; note = 2'-O-methyl ribonucleotide
  modified_base 3: mod_base = OTHER; note = 2'-O-methyl ribonucleotide
  modified_base 21: mod_base = OTHER; note = 2'-O-methyl ribonucleotide
  modified_base 28: mod_base = OTHER; note = 2'-O-methyl ribonucleotide
  modified_base 29: mod_base = OTHER; note = 2'-O-methyl ribonucleotide
  modified_base 30: mod_base = OTHER; note = 2'-O-methyl ribonucleotide
  modified_base 31: mod_base = OTHER; note = 2'-O-methyl ribonucleotide
  modified_base 32: mod_base = OTHER; note = 2'-O-methyl ribonucleotide
  modified_base 33: mod_base = OTHER; note = 2'-O-methyl ribonucleotide
  modified_base 34: mod_base = OTHER; note = 2'-O-methyl ribonucleotide
  modified_base 35: mod_base = OTHER; note = 2'-O-methyl ribonucleotide
  modified_base 36: mod_base = OTHER; note = 2'-O-methyl ribonucleotide
  modified_base 37: mod_base = OTHER; note = 2'-O-methyl ribonucleotide
  modified_base 38: mod_base = OTHER; note = 2'-O-methyl ribonucleotide
  modified_base 39: mod_base = OTHER; note = 2'-O-methyl ribonucleotide
  modified_base 40: mod_base = OTHER; note = 2'-O-methyl ribonucleotide
  modified_base 41: mod_base = OTHER; note = 2'-O-methyl ribonucleotide
  modified_base 42: mod_base = OTHER; note = 2'-O-methyl ribonucleotide
  modified_base 46: mod_base = OTHER; note = 2'-O-methyl ribonucleotide
  modified_base 48: mod_base = OTHER; note = 2'-O-methyl ribonucleotide
  modified_base 50: mod_base = OTHER; note = 2'-O-methyl ribonucleotide
  modified_base 52: mod_base = OTHER; note = 2'-O-methyl ribonucleotide
  modified_base 53: mod_base = OTHER; note = 2'-O-methyl ribonucleotide
  modified_base 54: mod_base = OTHER; note = 2'-O-methyl ribonucleotide
  modified_base 55: mod_base = OTHER; note = 2'-O-methyl ribonucleotide
  modified_base 56: mod_base = OTHER; note = 2'-O-methyl ribonucleotide
  modified_base 57: mod_base = OTHER; note = 2'-O-methyl ribonucleotide
  modified_base 60: mod_base = OTHER; note = 2'-O-methyl ribonucleotide
  modified_base 61: mod_base = OTHER; note = 2'-O-methyl ribonucleotide
  modified_base 66: mod_base = OTHER; note = 2'-O-methyl ribonucleotide
  modified_base 67: mod_base = OTHER; note = 2'-O-methyl ribonucleotide
  modified_base 70: mod_base = OTHER; note = 2'-O-methyl ribonucleotide
  modified_base 71: mod_base = OTHER; note = 2'-O-methyl ribonucleotide
  modified_base 72: mod_base = OTHER; note = 2'-O-methyl ribonucleotide
  modified_base 73: mod_base = OTHER; note = 2'-O-methyl ribonucleotide
  modified_base 74: mod_base = OTHER; note = 2'-O-methyl ribonucleotide
  modified_base 75: mod_base = OTHER; note = 2'-O-methyl ribonucleotide
  modified_base 76: mod_base = OTHER; note = 2'-O-methyl ribonucleotide
  modified_base 77: mod_base = OTHER; note = 2'-O-methyl ribonucleotide
  modified_base 78: mod_base = OTHER; note = 2'-O-methyl ribonucleotide
  modified_base 79: mod_base = OTHER; note = 2'-O-methyl ribonucleotide
  modified_base 80: mod_base = OTHER; note = 2'-O-methyl ribonucleotide
  modified_base 81: mod_base = OTHER; note = 2'-O-methyl ribonucleotide
  modified_base 83: mod_base = OTHER; note = 2'-O-methyl ribonucleotide
  modified_base 84: mod_base = OTHER; note = 2'-O-methyl ribonucleotide
  modified_base 85: mod_base = OTHER; note = 2'-O-methyl ribonucleotide
  modified_base 86: mod_base = OTHER; note = 2'-O-methyl ribonucleotide
  modified_base 87: mod_base = OTHER; note = 2'-O-methyl ribonucleotide
  modified_base 88: mod_base = OTHER; note = 2'-O-methyl ribonucleotide
  modified_base 89: mod_base = OTHER; note = 2'-O-methyl ribonucleotide
  modified_base 90: mod_base = OTHER; note = 2'-O-methyl ribonucleotide
  modified_base 91: mod_base = OTHER; note = 2'-O-methyl ribonucleotide
  modified_base 92: mod_base = OTHER; note = 2'-O-methyl ribonucleotide
  modified_base 93: mod_base = OTHER; note = 2'-O-methyl ribonucleotide
  modified_base 94: mod_base = OTHER; note = 2'-O-methyl ribonucleotide
  modified_base 95: mod_base = OTHER; note = 2'-O-methyl ribonucleotide
  modified_base 96: mod_base = OTHER; note = 2'-O-methyl ribonucleotide
  modified_base 97: mod_base = OTHER; note = 2'-O-methyl ribonucleotide
  modified_base 98: mod_base = OTHER; note = 2'-O-methyl ribonucleotide
  modified_base 99: mod_base = OTHER; note = 2'-O-methyl ribonucleotide
  modified_base 100: mod_base = OTHER; note = 2'-O-methyl ribonucleotide
  modified_base 1..4: mod_base = OTHER; note = phosphorothioate linkage
  modified_base 97..100: mod_base = OTHER; note = phosphorothioate linkage

SEQ ID NO: 66 - DNA, 20 bp, unidentified
  source 1..20: mol_type = unassigned DNA; note = protospacer sequence
ggtgctagccttgcgttccg

SEQ ID NO: 67 - DNA, 20 bp, unidentified
  source 1..20: mol_type = unassigned DNA; note = protospacer sequence
gcttacctgtctgtggaagc

SEQ ID NO: 68 - DNA, 20 bp, unidentified
  source 1..20: mol_type = unassigned DNA; note = protospacer sequence
tgcttacctgtctgtggaag

SEQ ID NO: 69 - DNA, 20 bp, unidentified
  source 1..20: mol_type = unassigned DNA; note = protospacer sequence
cccataccttggagcaacgg

SEQ ID NO: 70 - DNA, 23 bp, unidentified
  source 1..23: mol_type = unassigned DNA; note = target sequence
ccagccaagcgcacctaatttcc

SEQ ID NO: 71 - RNA, 98 nt, synthetic construct
  source 1..98: mol_type = other RNA
ggaaattaggtgcgcttggcgttttagagctagaaatagcaagttaaaataaggctagtccgttatcaacttgaaaaagtggcaccgagtcggtgctt

SEQ ID NO: 72 - RNA, 100 nt, synthetic construct
  source 1..100: mol_type = other RNA
ggcgcataaagatgagacgcgttttagagctagaaatagcaagttaaaataaggctagtccgttatcaacttgaaaaagtgtcaccgagtcggtgcttcg

SEQ ID NO: 73 - RNA, 100 nt, synthetic construct; identical to SEQ ID NO: 55
  source 1..100: mol_type = other RNA

SEQ ID NO: 74 - RNA, 118 nt, synthetic construct
  source 1..118: mol_type = other RNA
ggcgcataaagatgagacgcgttttagagctatgctgttttgaaaaaaacagcatagcaagttaaaataaggctagtccgttatcaacttgaaaaagtggcaccgagtcggtgctttt

SEQ ID NO: 75 - DNA, 29 bp, synthetic construct
  source 1..29: mol_type = other DNA
gctgcgccaaggcgcgggtgtagggatgg

SEQ ID NO: 76 - DNA, 27 bp, synthetic construct
  source 1..27: mol_type = other DNA
  misc_difference 11: note = a, c, t, g, unknown or other
  misc_difference 13: note = a, c, t, g, unknown or other
ggttattcagncntctttttctgatac

SEQ ID NO: 77 - DNA, 33 bp, unidentified
  source 1..33: mol_type = unassigned DNA; note = untreated primary hepatocyte sequence
acacccgcaccttggcgcagcggtggaaggtgg

SEQ ID NO: 78 - DNA, 33 bp, synthetic construct
  source 1..33: mol_type = other DNA
acacccgcaccttggcgcaggggggaggggggg

SEQ ID NO: 79 - DNA, 33 bp, synthetic construct
  source 1..33: mol_type = other DNA
acacccgcgccttggcgcagcggtggaaggtgg

SEQ ID NO: 80 - DNA, 23 bp, unidentified
  source 1..23: mol_type = unassigned DNA; note = protospacer sequence
cccgcaccttggcgcagcggtgg

SEQ ID NO: 81 - DNA, 20 bp, unidentified
  source 1..20: mol_type = unassigned DNA; note = protospacer sequence
caggttccatgggatgctct

SEQ ID NO: 82 - DNA, 20 bp, unidentified
  source 1..20: mol_type = unassigned DNA; note = protospacer sequence
ggtggctcaccagctccagc

SEQ ID NO: 83 - DNA, 20 bp, unidentified
  source 1..20: mol_type = unassigned DNA; note = protospacer sequence
ttggaaagacggaggcagcc

SEQ ID NO: 84 - DNA, 20 bp, unidentified
  source 1..20: mol_type = unassigned DNA; note = protospacer sequence
gaaagacggaggcagcctgg

SEQ ID NO: 85 - DNA, 20 bp, unidentified
  source 1..20: mol_type = unassigned DNA; note = protospacer sequence
tcccaggcctggagtttatt

SEQ ID NO: 86 - DNA, 20 bp, unidentified
  source 1..20: mol_type = unassigned DNA; note = protospacer sequence
agcacctacctcgggagctg

SEQ ID NO: 87 - DNA, 20 bp, unidentified
  source 1..20: mol_type = unassigned DNA; note = protospacer sequence
ctttccaggtcatcacagtt

SEQ ID NO: 88 - DNA, 20 bp, unidentified
  source 1..20: mol_type = unassigned DNA; note = protospacer sequence
cctttccaggtcatcacagt

SEQ ID NO: 89 - DNA, 20 bp, unidentified
  source 1..20: mol_type = unassigned DNA; note = protospacer sequence
tttccaggtcatcacagttg

SEQ ID NO: 90 - DNA, 20 bp, unidentified
  source 1..20: mol_type = unassigned DNA; note = protospacer sequence
cttacctgccccatgggtgc

SEQ ID NO: 91 - DNA, 20 bp, unidentified
  source 1..20: mol_type = unassigned DNA; note = protospacer sequence
taaggcccaagggggcaagc

SEQ ID NO: 92 - DNA, 20 bp, unidentified
  source 1..20: mol_type = unassigned DNA; note = protospacer sequence
cctcttcacctgctcctgag

SEQ ID NO: 93 - DNA, 20 bp, unidentified
  source 1..20: mol_type = unassigned DNA; note = protospacer sequence
gcctcttcacctgctcctga

SEQ ID NO: 94 - DNA, 20 bp, unidentified
  source 1..20: mol_type = unassigned DNA; note = protospacer sequence
ttcacctgctcctgaggggc

SEQ ID NO: 95 - DNA, 20 bp, unidentified
  source 1..20: mol_type = unassigned DNA; note = protospacer sequence
tcacctgctcctgaggggcc

SEQ ID NO: 96 - DNA, 20 bp, unidentified
  source 1..20: mol_type = unassigned DNA; note = protospacer sequence
cccaggctgcagctcccact

SEQ ID NO: 97 - DNA, 20 bp, unidentified
  source 1..20: mol_type = unassigned DNA; note = protospacer sequence
ccccaggctgcagctcccac

SEQ ID NO: 98 - DNA, 20 bp, unidentified
  source 1..20: mol_type = unassigned DNA; note = protospacer sequence
gcaggtgaccgtggcctgcg

SEQ ID NO: 99 - DNA, 20 bp, unidentified
  source 1..20: mol_type = unassigned DNA; note = protospacer sequence
ctcctttaggaggctggtgg

SEQ ID NO: 100 - DNA, 20 bp, unidentified
  source 1..20: mol_type = unassigned DNA; note = protospacer sequence
ttttcaggagaattttggtt

SEQ ID NO: 101 - DNA, 20 bp, unidentified
  source 1..20: mol_type = unassigned DNA; note = protospacer sequence
cttttcaggagaattttggt

SEQ ID NO: 102 - DNA, 20 bp, unidentified
  source 1..20: mol_type = unassigned DNA; note = protospacer sequence
taatttggcccttcgtctta

SEQ ID NO: 103 - DNA, 20 bp, unidentified
  source 1..20: mol_type = unassigned DNA; note = protospacer sequence
agactttgtccataagacga

SEQ ID NO: 104 - DNA, 20 bp, unidentified
  source 1..20: mol_type = unassigned DNA; note = protospacer sequence
gactttgtccataagacgaa

SEQ ID NO: 105 - DNA, 20 bp, unidentified
  source 1..20: mol_type = unassigned DNA; note = protospacer sequence
agccaatggcctccttcagt

SEQ ID NO: 106 - DNA, 20 bp, unidentified
  source 1..20: mol_type = unassigned DNA; note = protospacer sequence
tcccaactgaaggaggccat

SEQ ID NO: 107 - DNA, 20 bp, unidentified
  source 1..20: mol_type = unassigned DNA; note = protospacer sequence
ggcctccttcagttgggaca

SEQ ID NO: 108 - DNA, 20 bp, unidentified
  source 1..20: mol_type = unassigned DNA; note = protospacer sequence
gaccatgtcccaactgaagg

SEQ ID NO: 109 - DNA, 20 bp, unidentified
  source 1..20: mol_type = unassigned DNA; note = protospacer sequence
gccaatggcctccttcagtt

SEQ ID NO: 110 - DNA, 20 bp, unidentified
  source 1..20: mol_type = unassigned DNA; note = protospacer sequence
attgtcttgatcaattctgg

SEQ ID NO: 111 - DNA, 20 bp, unidentified
  source 1..20: mol_type = unassigned DNA; note = protospacer sequence
attctggaggaaataactag

SEQ ID NO: 112 - DNA, 20 bp, unidentified
  source 1..20: mol_type = unassigned DNA; note = protospacer sequence
tctgggtgttctggagtttc

SEQ ID NO: 113 - DNA, 20 bp, unidentified
  source 1..20: mol_type = unassigned DNA; note = protospacer sequence
aacatagcaaatcttgattt

SEQ ID NO: 114 - DNA, 20 bp, unidentified
  source 1..20: mol_type = unassigned DNA; note = protospacer sequence
gtagaattttttcttctagg

SEQ ID NO: 115 - DNA, 20 bp, unidentified
  source 1..20: mol_type = unassigned DNA; note = protospacer sequence
actacaagtcaaaaatgaag

SEQ ID NO: 116 - DNA, 20 bp, unidentified
  source 1..20: mol_type = unassigned DNA; note = protospacer sequence
tatattggtcttccacggtc

SEQ ID NO: 117 - DNA, 20 bp, unidentified
  source 1..20: mol_type = unassigned DNA; note = protospacer sequence
caaagaccttctccagaccg

SEQ ID NO: 118 - DNA, 20 bp, unidentified
  source 1..20: mol_type = unassigned DNA; note = protospacer sequence
ggtcttccacggtctggaga

SEQ ID NO: 119 - DNA, 20 bp, unidentified
  source 1..20: mol_type = unassigned DNA; note = protospacer sequence
ttgtttatattggtcttcca

SEQ ID NO: 120 - DNA, 20 bp, unidentified
  source 1..20: mol_type = unassigned DNA; note = protospacer sequence
cttttatttgactatgctgt

SEQ ID NO: 121 - DNA, 20 bp, unidentified
  source 1..20: mol_type = unassigned DNA; note = protospacer sequence
aaagtctggatatagagagt

SEQ ID NO: 122 - DNA, 20 bp, unidentified
  source 1..20: mol_type = unassigned DNA; note = protospacer sequence
gttggtttaattgtttatat

SEQ ID NO: 123 - DNA, 20 bp, unidentified
  source 1..20: mol_type = unassigned DNA; note = protospacer sequence
tgatggtaagacactttggt

SEQ ID NO: 124 - DNA, 20 bp, unidentified
  source 1..20: mol_type = unassigned DNA; note = protospacer sequence
ggagtagttcttggtgctct

SEQ ID NO: 125 - DNA, 20 bp, unidentified
  source 1..20: mol_type = unassigned DNA; note = protospacer sequence
aacatgatggtaagacactt

SEQ ID NO: 126 - DNA, 20 bp, unidentified
  source 1..20: mol_type = unassigned DNA; note = protospacer sequence
tgaagaaagggagtagttct

SEQ ID NO: 127 - DNA, 20 bp, unidentified
  source 1..20: mol_type = unassigned DNA; note = protospacer sequence
agttcttggtgctcttggct

SEQ ID NO: 128 - DNA, 20 bp, unidentified
  source 1..20: mol_type = unassigned DNA; note = protospacer sequence
atgatggtaagacactttgg

SEQ ID NO: 129 - DNA, 20 bp, unidentified
  source 1..20: mol_type = unassigned DNA; note = protospacer sequence
gaagatagagaaatttctgt

SEQ ID NO: 130 - DNA, 20 bp, unidentified
  source 1..20: mol_type = unassigned DNA; note = protospacer sequence
ggaagatagagaaatttctg

SEQ ID NO: 131 - DNA, 20 bp, unidentified
  source 1..20: mol_type = unassigned DNA; note = protospacer sequence
tatttcattcaactgaagaa

SEQ ID NO: 132 - DNA, 20 bp, unidentified
  source 1..20: mol_type = unassigned DNA; note = protospacer sequence
atttcattcaactgaagaaa

SEQ ID NO: 133 - DNA, 20 bp, unidentified
  source 1..20: mol_type = unassigned DNA; note = protospacer sequence
gtctactgtgatgttatatc

SEQ ID NO: 134 - DNA, 20 bp, unidentified
  source 1..20: mol_type = unassigned DNA; note = protospacer sequence
taaatggtggtacattcagc

SEQ ID NO: 135 - DNA, 20 bp, unidentified
  source 1..20: mol_type = unassigned DNA; note = protospacer sequence
tatcaggtaaaacctgtcta

SEQ ID NO: 136 - DNA, 20 bp, unidentified
  source 1..20: mol_type = unassigned DNA; note = protospacer sequence
tgtaccaccatttataacag

SEQ ID NO: 137 - DNA, 20 bp, unidentified
  source 1..20: mol_type = unassigned DNA; note = protospacer sequence
ttcacctctgttataaatgg

SEQ ID NO: 138 - DNA, 20 bp, unidentified
  source 1..20: mol_type = unassigned DNA; note = protospacer sequence
aacagaggtgaacatacaag

SEQ ID NO: 139 - DNA, 20 bp, unidentified
  source 1..20: mol_type = unassigned DNA; note = protospacer sequence
ttgagagttgctgggtctga

SEQ ID NO: 140 - DNA, 20 bp, unidentified
  source 1..20: mol_type = unassigned DNA; note = protospacer sequence
tgaaaaacttgagagttgct

SEQ ID NO: 141 - DNA, 20 bp, unidentified
  source 1..20: mol_type = unassigned DNA; note = protospacer sequence
ttaattcaacatcgaataga

SEQ ID NO: 142 - DNA, 20 bp, unidentified
  source 1..20: mol_type = unassigned DNA; note = protospacer sequence
tttgggaggcttgatggtaa

SEQ ID NO: 143 - DNA, 20 bp, unidentified
  source 1..20: mol_type = unassigned DNA; note = protospacer sequence
cattatattcaggtagtcca

SEQ ID NO: 144 - DNA, 20 bp, unidentified
  source 1..20: mol_type = unassigned DNA; note = protospacer sequence
ttgggaggcttgatggtaag

SEQ ID NO: 145 - DNA, 20 bp, unidentified
  source 1..20: mol_type = unassigned DNA; note = protospacer sequence
ttttgggaggcttgatggta

SEQ ID NO: 146 - DNA, 20 bp, unidentified
  source 1..20: mol_type = unassigned DNA; note = protospacer sequence
acaaaacttcaatgaaacgt

SEQ ID NO: 147 - DNA, 20 bp, unidentified
  source 1..20: mol_type = unassigned DNA; note = protospacer sequence
tatggttttgggaggcttga

SEQ ID NO: 148 - DNA, 20 bp, unidentified
  source 1..20: mol_type = unassigned DNA; note = protospacer sequence
actacaaatatggttttggg

SEQ ID NO: 149 - DNA, 20 bp, unidentified
  source 1..20: mol_type = unassigned DNA; note = protospacer sequence
gagaactacaaatatggttt

SEQ ID NO: 150 - DNA, 20 bp, unidentified
  source 1..20: mol_type = unassigned DNA; note = protospacer sequence
aggacacttcaactgtccag

SEQ ID NO: 151 - DNA, 20 bp, unidentified
  source 1..20: mol_type = unassigned DNA; note = protospacer sequence
gccgtcctcctcggaacgca

SEQ ID NO: 152 - DNA, 20 bp, unidentified
  source 1..20: mol_type = unassigned DNA; note = protospacer sequence
gctagccttgcgttccgagg

SEQ ID NO: 153 - DNA, 20 bp, unidentified
  source 1..20: mol_type = unassigned DNA; note = protospacer sequence
gcgttccgaggaggacggcc

SEQ ID NO: 154 - DNA, 20 bp, unidentified
  source 1..20: mol_type = unassigned DNA; note = protospacer sequence
gccttgcgttccgaggagga

SEQ ID NO: 155 - DNA, 20 bp, unidentified
  source 1..20: mol_type = unassigned DNA; note = protospacer sequence
ggacgaggacggcgactacg

SEQ ID NO: 156 - DNA, 20 bp, unidentified
  source 1..20: mol_type = unassigned DNA; note = protospacer sequence
ggacggcgactacgaggagc

SEQ ID NO: 157 - DNA, 20 bp, unidentified
  source 1..20: mol_type = unassigned DNA; note = protospacer sequence
cgtcctcgtcctcctgcgca

SEQ ID NO: 158 - DNA, 20 bp, unidentified
  source 1..20: mol_type = unassigned DNA; note = protospacer sequence
gtcctcgtcctcctgcgcac

SEQ ID NO: 159 - DNA, 20 bp, unidentified
  source 1..20: mol_type = unassigned DNA; note = protospacer sequence
ccgtcagctccaggcggtcc

SEQ ID NO: 160 - DNA, 20 bp, unidentified
  source 1..20: mol_type = unassigned DNA; note = protospacer sequence
cgcccgtgcgcaggaggacg

SEQ ID NO: 161 - DNA, 20 bp, unidentified
  source 1..20: mol_type = unassigned DNA; note = protospacer sequence
tcagctccaggcggtcctgg

SEQ ID NO: 162 - DNA, 20 bp, unidentified
  source 1..20: mol_type = unassigned DNA; note = protospacer sequence
cttggcgcagcggtggaagg

SEQ ID NO: 163 - DNA, 20 bp, unidentified
  source 1..20: mol_type = unassigned DNA; note = protospacer sequence
cgtgcgcaggaggacgagga

SEQ ID NO: 164 - DNA, 20 bp, unidentified
  source 1..20: mol_type = unassigned DNA; note = protospacer sequence
ccaggaccgcctggagctga

SEQ ID NO: 165 - DNA, 20 bp, unidentified
  source 1..20: mol_type = unassigned DNA; note = protospacer sequence
tcttggtgaggtatccccgg

SEQ ID NO: 166 - DNA, 20 bp, unidentified
  source 1..20: mol_type = unassigned DNA; note = protospacer sequence
cagtgcgctctgactgcgag

SEQ ID NO: 167 - DNA, 20 bp, unidentified
  source 1..20: mol_type = unassigned DNA; note = protospacer sequence
cttggtgaggtatccccggc

SEQ ID NO: 168 - DNA, 20 bp, unidentified
  source 1..20: mol_type = unassigned DNA; note = protospacer sequence
ggatcttggtgaggtatccc

SEQ ID NO: 169 - DNA, 20 bp, unidentified
  source 1..20: mol_type = unassigned DNA; note = protospacer sequence
gaagatgagtggcgacctgc

SEQ ID NO: 170 - DNA, 20 bp, unidentified
  source 1..20: mol_type = unassigned DNA; note = protospacer sequence
agcaccaccacgtaggtgcc

SEQ ID NO: 171 - DNA, 20 bp, unidentified
  source 1..20: mol_type = unassigned DNA; note = protospacer sequence
ggtcgccactcatcttcacc

SEQ ID NO: 172 - DNA, 20 bp, unidentified
  source 1..20: mol_type = unassigned DNA; note = protospacer sequence
ctccttcagcaccaccacgt

SEQ ID NO: 173 - DNA, 20 bp, unidentified
  source 1..20: mol_type = unassigned DNA; note = protospacer sequence
gagtggcgacctgctggagc

SEQ ID NO: 174 - DNA, 20 bp, unidentified
  source 1..20: mol_type = unassigned DNA; note = protospacer sequence
gcgcactgcccgccgcctgc

SEQ ID NO: 175 - DNA, 20 bp, unidentified
  source 1..20: mol_type = unassigned DNA; note = protospacer sequence
ggcttcctggtgaagatgag

SEQ ID NO: 176 - DNA, 20 bp, unidentified
  source 1..20: mol_type = unassigned DNA; note = protospacer sequence
cacctacgtggtggtgctga

SEQ ID NO: 177 - DNA, 20 bp, unidentified
  source 1..20: mol_type = unassigned DNA; note = protospacer sequence
ctacgtggtggtgctgaagg

SEQ ID NO: 178 - DNA, 20 bp, unidentified
  source 1..20: mol_type = unassigned DNA; note = protospacer sequence
atggaagacatgcaggatct

SEQ ID NO: 179 - DNA, 20 bp, unidentified
  source 1..20: mol_type = unassigned DNA; note = protospacer sequence
agacatgcaggatcttggtg

SEQ ID NO: 180 - DNA, 20 bp, unidentified
  source 1..20: mol_type = unassigned DNA; note = protospacer sequence
ctcatcttcaccaggaagcc

SEQ ID NO: 181 - DNA, 20 bp, unidentified
  source 1..20: mol_type = unassigned DNA; note = protospacer sequence
ctcctcgatgtagtcgacat

SEQ ID NO: 182 - DNA, 20 bp, unidentified
  source 1..20: mol_type = unassigned DNA; note = protospacer sequence
tattcatccgcccggtaccg

SEQ ID NO: 183 - DNA, 20 bp, unidentified
  source 1..20: mol_type = unassigned DNA; note = protospacer sequence
tcctcgatgtagtcgacatg

SEQ ID NO: 184 - DNA, 20 bp, unidentified
  source 1..20: mol_type = unassigned DNA; note = protospacer sequence
cctcctcgatgtagtcgaca

SEQ ID NO: 185 - DNA, 20 bp, unidentified
  source 1..20: mol_type = unassigned DNA; note = protospacer sequence
gccccatgtcgactacatcg

SEQ ID NO: 186 - DNA, 20 bp, unidentified
  source 1..20: mol_type = unassigned DNA; note = protospacer sequence
ccatgtcgactacatcgagg

SEQ ID NO: 187 - DNA, 20 bp, unidentified
  source 1..20: mol_type = unassigned DNA; note = protospacer sequence
ggggctggtattcatccgcc

SEQ ID NO: 188 - DNA, 20 bp, unidentified
  source 1..20: mol_type = unassigned DNA; note = protospacer sequence
gtcgacatggggcaacttca

SEQ ID NO: 189 - DNA, 20 bp, unidentified
  source 1..20: mol_type = unassigned DNA; note = protospacer sequence
accaccgggaaatcgagggc

SEQ ID NO: 190 - DNA, 20 bp, unidentified
  source 1..20: mol_type = unassigned DNA; note = protospacer sequence
gagtgaccaccgggaaatcg

SEQ ID NO: 191 - DNA, 20 bp, unidentified
  source 1..20: mol_type = unassigned DNA; note = protospacer sequence
agtgaccaccgggaaatcga

SEQ ID NO: 192 - DNA, 20 bp, unidentified
  source 1..20: mol_type = unassigned DNA; note = protospacer sequence
ccaccgggaaatcgagggca

SEQ ID NO: 193 - DNA, 20 bp, unidentified
  source 1..20: mol_type = unassigned DNA; note = protospacer sequence
gaagcgggtcccgtcctcct

SEQ ID NO: 194 - DNA, 20 bp, unidentified
  source 1..20: mol_type = unassigned DNA; note = protospacer sequence
ctaggagatacacctccacc

SEQ ID NO: 195 - DNA, 20 bp, unidentified
  source 1..20: mol_type = unassigned DNA; note = protospacer sequence
cagcatacagagtgaccacc

SEQ ID NO: 196 - DNA, 20 bp, unidentified
  source 1..20: mol_type = unassigned DNA; note = protospacer sequence
aagcgggtcccgtcctcctc

SEQ ID NO: 197 - DNA, 20 bp, unidentified
  source 1..20: mol_type = unassigned DNA; note = protospacer sequence
tgaccctgccctcgatttcc

SEQ ID NO: 198 - DNA, 20 bp, unidentified
  source 1..20: mol_type = unassigned DNA; note = protospacer sequence
cactctgtatgctggtgtct

SEQ ID NO: 199 - DNA, 20 bp, unidentified
  source 1..20: mol_type = unassigned DNA; note = protospacer sequence
ccctgccctcgatttcccgg

SEQ ID NO: 200 - DNA, 20 bp, unidentified
  source 1..20: mol_type = unassigned DNA; note = protospacer sequence
ccggtggtcactctgtatgc

SEQ ID NO: 201 - DNA, 20 bp, unidentified
  source 1..20: mol_type = unassigned DNA; note = protospacer sequence
ggaaatcgagggcagggtca

SEQ ID NO: 202 - DNA, 20 bp, unidentified
  source 1..20: mol_type = unassigned DNA; note = protospacer sequence
ccagcatacagagtgaccac

SEQ ID NO: 203 - DNA, 20 bp, unidentified
  source 1..20: mol_type = unassigned DNA; note = protospacer sequence
cttggcagttgagcacgcgc

SEQ ID NO: 204 - DNA, 20 bp, unidentified
  source 1..20: mol_type = unassigned DNA; note = protospacer sequence
ctgcgcgtgctcaactgcca

SEQ ID NO: 205 - DNA, 20 bp, unidentified
  source 1..20: mol_type = unassigned DNA; note = protospacer sequence
tgcgcgtgctcaactgccaa

SEQ ID NO: 206 - DNA, 20 bp, unidentified
  source 1..20: mol_type = unassigned DNA; note = protospacer sequence
cgggatgccggcgtggccaa

SEQ ID NO: 207 - DNA, 20 bp, unidentified
  source 1..20: mol_type = unassigned DNA; note = protospacer sequence
cgtgctcaactgccaaggga

SEQ ID NO: 208 - DNA, 20 bp, unidentified
  source 1..20: mol_type = unassigned DNA; note = protospacer sequence
ccttggccacgccggcatcc

SEQ ID NO: 209 - DNA, 20 bp, unidentified
  source 1..20: mol_type = unassigned DNA; note = protospacer sequence
cagcggccgggatgccggcg

SEQ ID NO: 210 - DNA, 20 bp, unidentified
  source 1..20: mol_type = unassigned DNA; note = protospacer sequence
ccgggatgccggcgtggcca

SEQ ID NO: 211 - DNA, 20 bp, unidentified
  source 1..20: mol_type = unassigned DNA; note = protospacer sequence
gtggtcagcggccgggatgc

SEQ ID NO: 212 - DNA, 20 bp, unidentified
  source 1..20: mol_type = unassigned DNA; note = protospacer sequence
cgctgaccacccctgccagg

SEQ ID NO: 213 - DNA, 20 bp, unidentified
  source 1..20: mol_type = unassigned DNA; note = protospacer sequence
ggcaggggtggtcagcggcc

SEQ ID NO: 214 - DNA, 20 bp, unidentified
  source 1..20: mol_type = unassigned DNA; note = protospacer sequence
gtgctcaactgccaagggaa

SEQ ID NO: 215 - DNA, 20 bp, unidentified
  source 1..20: mol_type = unassigned DNA; note = protospacer sequence
tcatggcacccacctggcag

SEQ ID NO: 216 - DNA, 20 bp, unidentified
  source 1..20: mol_type = unassigned DNA; note = protospacer sequence
tggcaggggtggtcagcggc

SEQ ID NO: 217 - DNA, 20 bp, unidentified
  source 1..20: mol_type = unassigned DNA; note = protospacer sequence
gctgaccacccctgccaggt

SEQ ID NO: 218 - DNA, 20 bp, unidentified
  source 1..20: mol_type = unassigned DNA; note = protospacer sequence
ggccgctgaccacccctgcc

SEQ ID NO: 219 - DNA, 20 bp, unidentified
  source 1..20: mol_type = unassigned DNA; note = protospacer sequence
ggcatcgtcccggaagttgc

SEQ ID NO: 220 - DNA, 20 bp, unidentified
  source 1..20: mol_type = unassigned DNA; note = protospacer sequence
ggcttttccgaataaactcc

SEQ ID NO: 221 - DNA, 20 bp, unidentified
  source 1..20: mol_type = unassigned DNA; note = protospacer sequence
gtcccggaagttgccggcag

SEQ ID NO: 222 - DNA, 20 bp, unidentified
  source 1..20: mol_type = unassigned DNA; note = protospacer sequence
cggctgtacccacccgccag

SEQ ID NO: 223 - DNA, 20 bp, unidentified
  source 1..20: mol_type = unassigned DNA; note = protospacer sequence
gtcgtgctggtcaccgctgc

SEQ ID NO: 224 - DNA, 20 bp, unidentified
  source 1..20: mol_type = unassigned DNA; note = protospacer sequence
agtagaggcaggcatcgtcc

SEQ ID NO: 225 - DNA, 20 bp, unidentified
  source 1..20: mol_type = unassigned DNA; note = protospacer sequence
tccgaataaactccaggcct

SEQ ID NO: 226 - DNA, 20 bp, unidentified
  source 1..20: mol_type = unassigned DNA; note = protospacer sequence
gtttattcggaaaagccagc

SEQ ID NO: 227 - DNA, 20 bp, unidentified
  source 1..20: mol_type = unassigned DNA; note = protospacer sequence
gcggctgtacccacccgcca

SEQ ID NO: 228 - DNA, 20 bp, unidentified
  source 1..20: mol_type = unassigned DNA; note = protospacer sequence
caccgctgccggcaacttcc

SEQ ID NO: 229 - DNA, 20 bp, unidentified
  source 1..20: mol_type = unassigned DNA; note = protospacer sequence
agccctcgccaggcgctggc

SEQ ID NO: 230 - DNA, 20 bp, unidentified
  source 1..20: mol_type = unassigned DNA; note = protospacer sequence
caacgccgcctgccagcgcc

SEQ ID NO: 231 - DNA, 20 bp, unidentified
  source 1..20: mol_type = unassigned DNA; note = protospacer sequence
gcacgaccccagccctcgcc

SEQ ID NO: 232 - DNA, 20 bp, unidentified
  source 1..20: mol_type = unassigned DNA; note = protospacer sequence
ccgcctgccagcgcctggcg

SEQ ID NO: 233 - DNA, 20 bp, unidentified
  source 1..20: mol_type = unassigned DNA; note = protospacer sequence
tgccagcgcctggcgagggc

SEQ ID NO: 234 - DNA, 20 bp, unidentified
  source 1..20: mol_type = unassigned DNA; note = protospacer sequence
tgctgctgcccctggcgggt

SEQ ID NO: 235 - DNA, 20 bp, unidentified
  source 1..20: mol_type = unassigned DNA; note = protospacer sequence
tcaccgctgccggcaacttc

SEQ ID NO: 236 - DNA, 20 bp, unidentified
  source 1..20: mol_type = unassigned DNA; note = protospacer sequence
ggcgagggctggggtcgtgc

SEQ ID NO: 237 - DNA, 20 bp, unidentified
  source 1..20: mol_type = unassigned DNA; note = protospacer sequence
ttccgaataaactccaggcc

SEQ ID NO: 238 - DNA, 20 bp, unidentified
  source 1..20: mol_type = unassigned DNA; note = protospacer sequence
gtgctgctgcccctggcggg

SEQ ID NO: 239 - DNA, 20 bp, unidentified
  source 1..20: mol_type = unassigned DNA; note = protospacer sequence
gccagcgcctggcgagggct

SEQ ID NO: 240 - DNA, 20 bp, unidentified
  source 1..20: mol_type = unassigned DNA; note = protospacer sequence
cctcgccaggcgctggcagg

SEQ ID NO: 241 - DNA, 20 bp, unidentified
  source 1..20: mol_type = unassigned DNA; note = protospacer sequence
gagatacctgagtaactttc

SEQ ID NO: 242 - DNA, 20 bp, unidentified
  source 1..20: mol_type = unassigned DNA; note = protospacer sequence
acgtgggagaactacaaata

SEQ ID NO: 243 - DNA, 20 bp, unidentified
  source 1..20: mol_type = unassigned DNA; note = protospacer sequence
cgatgttgaattaatgtcca

SEQ ID NO: 244 - DNA, 20 bp, unidentified
  source 1..20: mol_type = unassigned DNA; note = protospacer sequence
cacaaaacttcaatgaaacg

SEQ ID NO: 245 - DNA, 20 bp, unidentified
  source 1..20: mol_type = unassigned DNA; note = protospacer sequence
tacgaattgagttggaagac

SEQ ID NO: 246 - DNA, 20 bp, unidentified
  source 1..20: mol_type = unassigned DNA; note = protospacer sequence
ctatggagtatatcttctct

SEQ ID NO: 247 - DNA, 19 bp, unidentified
  source 1..19: mol_type = unassigned DNA; note = protospacer sequence
ccgcaccttggcgcagcgg

SEQ ID NO: 248 - DNA, 19 bp, unidentified
  source 1..19: mol_type = unassigned DNA; note = protospacer sequence
agatacctgaataaccctc

SEQ ID NO: 249 - DNA, 18 bp, unidentified
  source 1..18: mol_type = unassigned DNA; note = protospacer sequence
gatacctgaataaccctc

SEQ ID NO: 250 - DNA, 17 bp, unidentified
  source 1..17: mol_type = unassigned DNA; note = protospacer sequence
atacctgaataaccctc

SEQ ID NO: 251 - DNA, 20 bp, unidentified
  source 1..20: mol_type = unassigned DNA; note = protospacer sequence
ggctgatgaggccgcacatg

SEQ ID NO: 252 - DNA, 20 bp, unidentified
  source 1..20: mol_type = unassigned DNA; note = protospacer sequence
cgcctgccagcgcctggcga

SEQ ID NO: 253 - RNA, 100 nt, synthetic construct
  source 1..100: mol_type = other RNA
  modified_base 29: mod_base = OTHER; note = 2'-O-methyl ribonucleotide
  modified_base 30: mod_base = OTHER; note = 2'-O-methyl ribonucleotide
  modified_base 31: mod_base = OTHER; note = 2'-O-methyl ribonucleotide
  modified_base 32: mod_base = OTHER; note = 2'-O-methyl ribonucleotide
  modified_base 33: mod_base = OTHER; note = 2'-O-methyl ribonucleotide
  modified_base 34: mod_base = OTHER; note = 2'-O-methyl ribonucleotide
  modified_base 35: mod_base = OTHER; note = 2'-O-methyl ribonucleotide
  modified_base 36: mod_base = OTHER; note = 2'-O-methyl ribonucleotide
  modified_base 37: mod_base = OTHER; note = 2'-O-methyl ribonucleotide
  modified_base 38: mod_base = OTHER; note = 2'-O-methyl ribonucleotide
  modified_base 39: mod_base = OTHER; note = 2'-O-methyl ribonucleotide
  modified_base 40: mod_base = OTHER; note = 2'-O-methyl ribonucleotide
  modified_base 69: mod_base = OTHER; note = 2'-O-methyl ribonucleotide
  modified_base 70: mod_base = OTHER; note = 2'-O-methyl ribonucleotide
  modified_base 71: mod_base = OTHER; note = 2'-O-methyl ribonucleotide
  modified_base 72: mod_base = OTHER; note = 2'-O-methyl ribonucleotide
  modified_base 73: mod_base = OTHER; note = 2'-O-methyl ribonucleotide
  modified_base 74: mod_base = OTHER; note = 2'-O-methyl ribonucleotide
  modified_base 75: mod_base = OTHER; note = 2'-O-methyl ribonucleotide
  modified_base 76: mod_base = OTHER; note = 2'-O-methyl ribonucleotide
  modified_base 77: mod_base = OTHER; note = 2'-O-methyl ribonucleotide
  modified_base 78: mod_base = OTHER; note = 2'-O-methyl ribonucleotide
  modified_base 79: mod_base = OTHER; note = 2'-O-methyl ribonucleotide
  modified_base 80: mod_base = OTHER; note = 2'-O-methyl ribonucleotide
  modified_base 81: mod_base = OTHER; note = 2'-O-methyl ribonucleotide
  modified_base 82: mod_base = OTHER; note = 2'-O-methyl ribonucleotide
  modified_base 83: mod_base = OTHER; note = 2'-O-methyl ribonucleotide
  modified_base 84: mod_base = OTHER; note = 2'-O-methyl ribonucleotide
  modified_base 85: mod_base = OTHER; note = 2'-O-methyl ribonucleotide
  modified_base 86: mod_base = OTHER; note = 2'-O-methyl ribonucleotide
  modified_base 87: mod_base = OTHER; note = 2'-O-methyl ribonucleotide
  modified_base 88: mod_base = OTHER; note = 2'-O-methyl ribonucleotide
  modified_base 89: mod_base = OTHER; note = 2'-O-methyl ribonucleotide
  modified_base 90: mod_base = OTHER; note = 2'-O-methyl ribonucleotide
  modified_base 91: mod_base = OTHER; note = 2'-O-methyl ribonucleotide
  modified_base 92: mod_base = OTHER; note = 2'-O-methyl ribonucleotide
  modified_base 93: mod_base = OTHER; note = 2'-O-methyl ribonucleotide
  modified_base 94: mod_base = OTHER; note = 2'-O-methyl ribonucleotide
  modified_base 95: mod_base = OTHER; note = 2'-O-methyl ribonucleotide
  modified_base 96: mod_base = OTHER; note = 2'-O-methyl ribonucleotide
  modified_base 97: mod_base = OTHER; note = 2'-O-methyl ribonucleotide
  modified_base 98: mod_base = OTHER; note = 2'-O-methyl ribonucleotide
  modified_base 99: mod_base = OTHER; note = 2'-O-methyl ribonucleotide
  modified_base 100: mod_base = OTHER; note = 2'-O-methyl ribonucleotide
  modified_base 1..4: mod_base = OTHER; note = phosphorothioate linkage
  modified_base 97..100: mod_base = OTHER; note = phosphorothioate linkage
ggtgctagccttgcgttccggttttagagctagaaatagcaagttaaaataaggctagtccgttatcaacttgaaaaagtggcaccgagtcggtgctttt

SEQ ID NO: 254 - RNA, 100 nt, synthetic construct; identical to SEQ ID NO: 253
  source 1..100: mol_type = other RNA
  modified_base 1: mod_base = OTHER; note = 2'-O-methyl ribonucleotide
  modified_base 2: mod_base = OTHER; note = 2'-O-methyl ribonucleotide
  modified_base 3: mod_base = OTHER; note = 2'-O-methyl ribonucleotide
  modified_base 29: mod_base = OTHER; note = 2'-O-methyl ribonucleotide
  modified_base 30: mod_base = OTHER; note = 2'-O-methyl ribonucleotide
  modified_base 31: mod_base = OTHER; note = 2'-O-methyl ribonucleotide
  modified_base 32: mod_base = OTHER; note = 2'-O-methyl ribonucleotide
  modified_base 33: mod_base = OTHER; note = 2'-O-methyl ribonucleotide
  modified_base 34: mod_base = OTHER; note = 2'-O-methyl ribonucleotide
  modified_base 35: mod_base = OTHER; note = 2'-O-methyl ribonucleotide
  modified_base 36: mod_base = OTHER; note = 2'-O-methyl ribonucleotide
  modified_base 37: mod_base = OTHER; note = 2'-O-methyl ribonucleotide
  modified_base 38: mod_base = OTHER; note = 2'-O-methyl ribonucleotide
  modified_base 39: mod_base = OTHER; note = 2'-O-methyl ribonucleotide
  modified_base 40: mod_base = OTHER; note = 2'-O-methyl ribonucleotide
  modified_base 69: mod_base = OTHER; note = 2'-O-methyl ribonucleotide
  modified_base 70: mod_base = OTHER; note = 2'-O-methyl ribonucleotide
  modified_base 71: mod_base = OTHER; note = 2'-O-methyl ribonucleotide
  modified_base 72: mod_base = OTHER; note = 2'-O-methyl ribonucleotide
  modified_base 73: mod_base = OTHER; note = 2'-O-methyl ribonucleotide
  modified_base 74: mod_base = OTHER; note = 2'-O-methyl ribonucleotide
  modified_base 75: mod_base = OTHER; note = 2'-O-methyl ribonucleotide
  modified_base 76: mod_base = OTHER; note = 2'-O-methyl ribonucleotide
  modified_base 77: mod_base = OTHER; note = 2'-O-methyl ribonucleotide
  modified_base 78: mod_base = OTHER; note = 2'-O-methyl ribonucleotide
  modified_base 79: mod_base = OTHER; note = 2'-O-methyl ribonucleotide
  modified_base 80: mod_base = OTHER; note = 2'-O-methyl ribonucleotide
  modified_base 81: mod_base = OTHER; note = 2'-O-methyl ribonucleotide
  modified_base 82: mod_base = OTHER; note = 2'-O-methyl ribonucleotide
  modified_base 83: mod_base = OTHER; note = 2'-O-methyl ribonucleotide
  modified_base 84: mod_base = OTHER; note = 2'-O-methyl ribonucleotide
  modified_base 85: mod_base = OTHER; note = 2'-O-methyl ribonucleotide
  modified_base 86: mod_base = OTHER; note = 2'-O-methyl ribonucleotide
  modified_base 87: mod_base = OTHER; note = 2'-O-methyl ribonucleotide
  modified_base 88: mod_base = OTHER; note = 2'-O-methyl ribonucleotide
  modified_base 89: mod_base = OTHER; note = 2'-O-methyl ribonucleotide
  modified_base 90: mod_base = OTHER; note = 2'-O-methyl ribonucleotide
  modified_base 91: mod_base = OTHER; note = 2'-O-methyl ribonucleotide
  modified_base 92: mod_base = OTHER; note = 2'-O-methyl ribonucleotide
  modified_base 93: mod_base = OTHER; note = 2'-O-methyl ribonucleotide
  modified_base 94: mod_base = OTHER; note = 2'-O-methyl ribonucleotide
  modified_base 95: mod_base = OTHER; note = 2'-O-methyl ribonucleotide
  modified_base 96: mod_base = OTHER; note = 2'-O-methyl ribonucleotide
  modified_base 97: mod_base = OTHER; note = 2'-O-methyl ribonucleotide
  modified_base 98: mod_base = OTHER; note = 2'-O-methyl ribonucleotide
  modified_base 99: mod_base = OTHER; note = 2'-O-methyl ribonucleotide
  modified_base 100: mod_base = OTHER; note = 2'-O-methyl ribonucleotide
  modified_base 1..4: mod_base = OTHER; note = phosphorothioate linkage
  modified_base 25..26: mod_base = OTHER; note = phosphorothioate linkage
  modified_base 45..46: mod_base = OTHER; note = phosphorothioate linkage
  modified_base 50..51: mod_base = OTHER; note = phosphorothioate linkage
  modified_base 56..57: mod_base = OTHER; note = phosphorothioate linkage
  modified_base 64..65: mod_base = OTHER; note = phosphorothioate linkage
  modified_base 67..68: mod_base = OTHER; note = phosphorothioate linkage
  modified_base 97..100: mod_base = OTHER; note = phosphorothioate linkage

SEQ ID NO: 255 - RNA, 101 nt, synthetic construct
  source 1..101: mol_type = other RNA
  modified_base 1: mod_base = OTHER; note = 2'-O-methyl ribonucleotide
  modified_base 2: mod_base = OTHER; note = 2'-O-methyl ribonucleotide
  modified_base 3: mod_base = OTHER; note = 2'-O-methyl ribonucleotide
  modified_base 21: mod_base = OTHER; note = 2'-O-methyl ribonucleotide
  modified_base 28: mod_base = OTHER; note = 2'-O-methyl ribonucleotide
  modified_base 29: mod_base = OTHER; note = 2'-O-methyl ribonucleotide
  modified_base 30: mod_base = OTHER; note = 2'-O-methyl ribonucleotide
  modified_base 31: mod_base = OTHER; note = 2'-O-methyl ribonucleotide
  modified_base 32: mod_base = OTHER; note = 2'-O-methyl ribonucleotide
  modified_base 33: mod_base = OTHER; note = 2'-O-methyl ribonucleotide
  modified_base 34: mod_base = OTHER; note = 2'-O-methyl ribonucleotide
  modified_base 35: mod_base = OTHER; note = 2'-O-methyl ribonucleotide
  modified_base 36: mod_base = OTHER; note = 2'-O-methyl ribonucleotide
  modified_base 37: mod_base = OTHER; note = 2'-O-methyl ribonucleotide
  modified_base 38: mod_base = OTHER; note = 2'-O-methyl ribonucleotide
  modified_base 39: mod_base = OTHER; note = 2'-O-methyl ribonucleotide
  modified_base 40: mod_base = OTHER; note = 2'-O-methyl ribonucleotide
  modified_base 41: mod_base = OTHER; note = 2'-O-methyl ribonucleotide
  modified_base 42: mod_base = OTHER; note = 2'-O-methyl ribonucleotide
  modified_base 46: mod_base = OTHER; note = 2'-O-methyl ribonucleotide
  modified_base 48: mod_base = OTHER; note = 2'-O-methyl ribonucleotide
  modified_base 50: mod_base = OTHER; note = 2'-O-methyl ribonucleotide
  modified_base 52: mod_base = OTHER; note = 2'-O-methyl ribonucleotide
  modified_base 53: mod_base = OTHER; note = 2'-O-methyl ribonucleotide
  modified_base 54: mod_base = OTHER; note = 2'-O-methyl ribonucleotide
  modified_base 55: mod_base = OTHER; note = 2'-O-methyl ribonucleotide
  modified_base 56: mod_base = OTHER; note = 2'-O-methyl ribonucleotide
  modified_base 57: mod_base = OTHER; note = 2'-O-methyl ribonucleotide
  modified_base 60: mod_base = OTHER; note = 2'-O-methyl ribonucleotide
  modified_base 61: mod_base = OTHER; note = 2'-O-methyl ribonucleotide
  modified_base 66: mod_base = OTHER; note = 2'-O-methyl ribonucleotide
  modified_base 67: mod_base = OTHER; note = 2'-O-methyl ribonucleotide
  modified_base 70: mod_base = OTHER; note = 2'-O-methyl ribonucleotide
  modified_base 71: mod_base = OTHER; note = 2'-O-methyl ribonucleotide
  modified_base 72: mod_base = OTHER; note = 2'-O-methyl ribonucleotide
  modified_base 73: mod_base = OTHER; note = 2'-O-methyl ribonucleotide
  modified_base 74: mod_base = OTHER; note = 2'-O-methyl ribonucleotide
  modified_base 75: mod_base = OTHER; note = 2'-O-methyl ribonucleotide
  modified_base 76: mod_base = OTHER; note = 2'-O-methyl ribonucleotide
  modified_base 77: mod_base = OTHER; note = 2'-O-methyl ribonucleotide
  modified_base 78: mod_base = OTHER; note = 2'-O-methyl ribonucleotide
  modified_base 79: mod_base = OTHER; note = 2'-O-methyl ribonucleotide
  modified_base 80: mod_base = OTHER; note = 2'-O-methyl ribonucleotide
  modified_base 81: mod_base = OTHER; note = 2'-O-methyl ribonucleotide
  modified_base 83: mod_base = OTHER; note = 2'-O-methyl ribonucleotide
  modified_base 84: mod_base = OTHER; note = 2'-O-methyl ribonucleotide
  modified_base 85: mod_base = OTHER; note = 2'-O-methyl ribonucleotide
  modified_base 86: mod_base = OTHER; note = 2'-O-methyl ribonucleotide
  modified_base 87: mod_base = OTHER; note = 2'-O-methyl ribonucleotide
  modified_base 88: mod_base = OTHER; note = 2'-O-methyl ribonucleotide
  modified_base 89: mod_base = OTHER; note = 2'-O-methyl ribonucleotide
  modified_base 90: mod_base = OTHER; note = 2'-O-methyl ribonucleotide
  modified_base 91: mod_base = OTHER; note = 2'-O-methyl ribonucleotide
  modified_base 92: mod_base = OTHER; note = 2'-O-methyl ribonucleotide
  modified_base 93: mod_base = OTHER; note = 2'-O-methyl ribonucleotide
  modified_base 94: mod_base = OTHER; note = 2'-O-methyl ribonucleotide
  modified_base 95: mod_base = OTHER; note = 2'-O-methyl ribonucleotide
  modified_base 96: mod_base = OTHER; note = 2'-O-methyl ribonucleotide
  modified_base 97: mod_base = OTHER; note = 2'-O-methyl ribonucleotide
  modified_base 98: mod_base = OTHER; note = 2'-O-methyl ribonucleotide
  modified_base 99: mod_base = OTHER; note = 2'-O-methyl ribonucleotide
  modified_base 100: mod_base = OTHER; note = 2'-O-methyl ribonucleotide
  modified_base 101: mod_base = OTHER; note = 2'-O-methyl ribonucleotide
  modified_base 1..4: mod_base = OTHER; note = phosphorothioate linkage
ggtgctagccttgcgttccggttttagagctagaaatagcaagttaaaataaggctagtccgttatcaacttgaaaaagtggcaccgagtcggtgcttttt

SEQ ID NO: 256 - RNA, 100 nt, synthetic construct; identical to SEQ ID NO: 253
  source 1..100: mol_type = other RNA
  modified_base 1: mod_base = OTHER; note = 2'-O-methyl ribonucleotide
  modified_base 2: mod_base = OTHER; note = 2'-O-methyl ribonucleotide
  modified_base 3: mod_base = OTHER; note = 2'-O-methyl ribonucleotide
  modified_base 21: mod_base = OTHER; note = 2'-O-methyl ribonucleotide
  modified_base 28: mod_base = OTHER; note = 2'-O-methyl ribonucleotide
  modified_base 29: mod_base = OTHER; note = 2'-O-methyl ribonucleotide
  modified_base 30: mod_base = OTHER; note = 2'-O-methyl ribonucleotide
  modified_base 31: mod_base = OTHER; note = 2'-O-methyl ribonucleotide
  modified_base 32: mod_base = OTHER; note = 2'-O-methyl ribonucleotide
  modified_base 33: mod_base = OTHER; note = 2'-O-methyl ribonucleotide
  modified_base 34: mod_base = OTHER; note = 2'-O-methyl ribonucleotide
  modified_base 35: mod_base = OTHER; note = 2'-O-methyl ribonucleotide
  modified_base 36: mod_base = OTHER; note = 2'-O-methyl ribonucleotide
  modified_base 37: mod_base = OTHER; note = 2'-O-methyl ribonucleotide
  modified_base 38: mod_base = OTHER; note = 2'-O-methyl ribonucleotide
  modified_base 39: mod_base = OTHER; note = 2'-O-methyl ribonucleotide
  modified_base 40: mod_base = OTHER; note = 2'-O-methyl ribonucleotide
  modified_base 41: mod_base = OTHER; note = 2'-O-methyl ribonucleotide
  modified_base 42: mod_base = OTHER; note = 2'-O-methyl ribonucleotide
  modified_base 46: mod_base = OTHER; note = 2'-O-methyl ribonucleotide
  modified_base 48: mod_base = OTHER; note = 2'-O-methyl ribonucleotide
  modified_base 50: mod_base = OTHER; note = 2'-O-methyl ribonucleotide
  modified_base 52: mod_base = OTHER; note = 2'-O-methyl ribonucleotide
  modified_base 53: mod_base = OTHER; note = 2'-O-methyl ribonucleotide
  modified_base 54: mod_base = OTHER; note = 2'-O-methyl ribonucleotide
  modified_base 55: mod_base = OTHER; note = 2'-O-methyl ribonucleotide
  modified_base 56: mod_base = OTHER; note = 2'-O-methyl ribonucleotide
  modified_base 57: mod_base = OTHER; note = 2'-O-methyl ribonucleotide
  modified_base 60: mod_base = OTHER; note = 2'-O-methyl ribonucleotide
  modified_base 61: mod_base = OTHER; note = 2'-O-methyl ribonucleotide
  modified_base 66: mod_base = OTHER; note = 2'-O-methyl ribonucleotide
  modified_base 67: mod_base = OTHER; note = 2'-O-methyl ribonucleotide
  modified_base 70: mod_base = OTHER; note = 2'-O-methyl ribonucleotide
  modified_base 71: mod_base = OTHER; note = 2'-O-methyl ribonucleotide
  modified_base 72: mod_base = OTHER; note = 2'-O-methyl ribonucleotide
  modified_base 73: mod_base = OTHER; note = 2'-O-methyl ribonucleotide
  modified_base 74: mod_base = OTHER; note = 2'-O-methyl ribonucleotide
  modified_base 75: mod_base = OTHER; note = 2'-O-methyl ribonucleotide
  modified_base 76: mod_base = OTHER; note = 2'-O-methyl ribonucleotide
  modified_base 77: mod_base = OTHER; note = 2'-O-methyl ribonucleotide
  modified_base 78: mod_base = OTHER; note = 2'-O-methyl ribonucleotide
  modified_base 79: mod_base = OTHER; note = 2'-O-methyl ribonucleotide
  modified_base 80: mod_base = OTHER; note = 2'-O-methyl ribonucleotide
  modified_base 81: mod_base = OTHER; note = 2'-O-methyl ribonucleotide
  modified_base 83: mod_base = OTHER; note = 2'-O-methyl ribonucleotide
  modified_base 84: mod_base = OTHER; note = 2'-O-methyl ribonucleotide
  modified_base 85: mod_base = OTHER; note = 2'-O-methyl ribonucleotide
  modified_base 86: mod_base = OTHER; note = 2'-O-methyl ribonucleotide
  modified_base 87: mod_base = OTHER; note = 2'-O-methyl ribonucleotide
  modified_base 88: mod_base = OTHER; note = 2'-O-methyl ribonucleotide
  modified_base 89: mod_base = OTHER; note = 2'-O-methyl ribonucleotide
  modified_base 90: mod_base = OTHER; note = 2'-O-methyl ribonucleotide
  modified_base 91: mod_base = OTHER; note = 2'-O-methyl ribonucleotide
  modified_base 92: mod_base = OTHER; note = 2'-O-methyl ribonucleotide
  modified_base 93: mod_base = OTHER; note = 2'-O-methyl ribonucleotide
  modified_base 94: mod_base = OTHER; note = 2'-O-methyl ribonucleotide
  modified_base 95: mod_base = OTHER; note = 2'-O-methyl ribonucleotide
  modified_base 96: mod_base = OTHER; note = 2'-O-methyl ribonucleotide
  modified_base 97: mod_base = OTHER; note = 2'-O-methyl ribonucleotide
  modified_base 98: mod_base = OTHER; note = 2'-O-methyl ribonucleotide
  modified_base 99: mod_base = OTHER; note = 2'-O-methyl ribonucleotide
  modified_base 100: mod_base = OTHER; note = 2'-O-methyl ribonucleotide
  modified_base 1..4: mod_base = OTHER; note = phosphorothioate linkage
  modified_base 45..46: mod_base = OTHER; note = phosphorothioate linkage
  modified_base 64..65: mod_base = OTHER; note = phosphorothioate linkage
  modified_base 97..100: mod_base = OTHER; note = phosphorothioate linkage

SEQ ID NO: 257 - RNA, 100 nt, synthetic construct
  source 1..100: mol_type = other RNA
  modified_base 1: mod_base = OTHER; note = 2'-O-methyl ribonucleotide
  modified_base 2: mod_base = OTHER; note = 2'-O-methyl ribonucleotide
  modified_base 3: mod_base = OTHER; note = 2'-O-methyl ribonucleotide
  modified_base 29: mod_base = OTHER; note = 2'-O-methyl ribonucleotide
  modified_base 30: mod_base = OTHER; note = 2'-O-methyl ribonucleotide
  modified_base 31: mod_base = OTHER; note = 2'-O-methyl ribonucleotide
  modified_base 32: mod_base = OTHER; note = 2'-O-methyl ribonucleotide
  modified_base 33: mod_base = OTHER; note = 2'-O-methyl ribonucleotide
  modified_base 34: mod_base = OTHER; note = 2'-O-methyl ribonucleotide
  modified_base 35: mod_base = OTHER; note = 2'-O-methyl ribonucleotide
  modified_base 36: mod_base = OTHER; note = 2'-O-methyl ribonucleotide
  modified_base 37: mod_base = OTHER; note = 2'-O-methyl ribonucleotide
  modified_base 38: mod_base = OTHER; note = 2'-O-methyl ribonucleotide
  modified_base 39: mod_base = OTHER; note = 2'-O-methyl ribonucleotide
  modified_base 40: mod_base = OTHER; note = 2'-O-methyl ribonucleotide
  modified_base 69: mod_base = OTHER; note = 2'-O-methyl ribonucleotide
  modified_base 70: mod_base = OTHER; note = 2'-O-methyl ribonucleotide
  modified_base 71: mod_base = OTHER; note = 2'-O-methyl ribonucleotide
  modified_base 72: mod_base = OTHER; note = 2'-O-methyl ribonucleotide
  modified_base 73: mod_base = OTHER; note = 2'-O-methyl ribonucleotide
  modified_base 74: mod_base = OTHER; note = 2'-O-methyl ribonucleotide
  modified_base 75: mod_base = OTHER; note = 2'-O-methyl ribonucleotide
  modified_base 76: mod_base = OTHER; note = 2'-O-methyl ribonucleotide
  modified_base 77: mod_base = OTHER; note = 2'-O-methyl ribonucleotide
  modified_base 78: mod_base = OTHER; note = 2'-O-methyl ribonucleotide
  modified_base 79: mod_base = OTHER; note = 2'-O-methyl ribonucleotide
  modified_base 80: mod_base = OTHER; note = 2'-O-methyl ribonucleotide
  modified_base 81: mod_base = OTHER; note = 2'-O-methyl ribonucleotide
  modified_base 82: mod_base = OTHER; note = 2'-O-methyl ribonucleotide
  modified_base 83: mod_base = OTHER; note = 2'-O-methyl ribonucleotide
  modified_base 84: mod_base = OTHER; note = 2'-O-methyl ribonucleotide
  modified_base 85: mod_base = OTHER; note = 2'-O-methyl ribonucleotide
  modified_base 86: mod_base = OTHER; note = 2'-O-methyl ribonucleotide
  modified_base 87: mod_base = OTHER; note = 2'-O-methyl ribonucleotide
  modified_base 88: mod_base = OTHER; note = 2'-O-methyl ribonucleotide
  modified_base 89: mod_base = OTHER; note = 2'-O-methyl ribonucleotide
  modified_base 90: mod_base = OTHER; note = 2'-O-methyl ribonucleotide
  modified_base 91: mod_base = OTHER; note = 2'-O-methyl ribonucleotide
  modified_base 92: mod_base = OTHER; note = 2'-O-methyl ribonucleotide
  modified_base 93: mod_base = OTHER; note = 2'-O-methyl ribonucleotide
  modified_base 94: mod_base = OTHER; note = 2'-O-methyl ribonucleotide
  modified_base 95: mod_base = OTHER; note = 2'-O-methyl ribonucleotide
  modified_base 96: mod_base = OTHER; note = 2'-O-methyl ribonucleotide
  modified_base 97: mod_base = OTHER; note = 2'-O-methyl ribonucleotide
  modified_base 98: mod_base = OTHER; note = 2'-O-methyl ribonucleotide
  modified_base 99: mod_base = OTHER; note = 2'-O-methyl ribonucleotide
  modified_base 100: mod_base = OTHER; note = 2'-O-methyl ribonucleotide
  modified_base 1..4: mod_base = OTHER; note = phosphorothioate linkage
  modified_base 97..100: mod_base = OTHER; note = phosphorothioate linkage
aagatacctgaataactctcgttttagagctagaaatagcaagttaaaataaggctagtccgttatcaacttgaaaaagtggcaccgagtcggtgctttt

SEQ ID NO: 258 - RNA, 100 nt, synthetic construct
  source 1..100: mol_type = other RNA
  modified_base 1: mod_base = OTHER; note = 2'-O-methyl ribonucleotide
  modified_base 2: mod_base = OTHER; note = 2'-O-methyl ribonucleotide
  modified_base 3: mod_base = OTHER; note = 2'-O-methyl ribonucleotide
  modified_base 98: mod_base = OTHER; note = 2'-O-methyl ribonucleotide
  modified_base 99: mod_base = OTHER; note = 2'-O-methyl ribonucleotide
  modified_base 100: mod_base = OTHER; note = 2'-O-methyl ribonucleotide
  modified_base 1..4: mod_base = OTHER; note = phosphorothioate linkage
  modified_base 97..100: mod_base = OTHER; note = phosphorothioate linkage
ggtggctcaccagctccagcgttttagagctagaaatagcaagttaaaataaggctagtccgttatcaacttgaaaaagtggcaccgagtcggtgctttt

SEQ ID NO: 259 - RNA, 100 nt, synthetic construct
  source 1..100: mol_type = other RNA
  modified_base 1: mod_base = OTHER; note = 2'-O-methyl ribonucleotide
  modified_base 2: mod_base = OTHER; note = 2'-O-methyl ribonucleotide
  modified_base 3: mod_base = OTHER; note = 2'-O-methyl ribonucleotide
  modified_base 98: mod_base = OTHER; note = 2'-O-methyl ribonucleotide
  modified_base 99: mod_base = OTHER; note = 2'-O-methyl ribonucleotide
  modified_base 100: mod_base = OTHER; note = 2'-O-methyl ribonucleotide
  modified_base 1..4: mod_base = OTHER; note = phosphorothioate linkage
  modified_base 97..100: mod_base = OTHER; note = phosphorothioate linkage
gcttacctgtctgtggaagcgttttagagctagaaatagcaagttaaaataaggctagtccgttatcaacttgaaaaagtggcaccgagtcggtgctttt

SEQ ID NO: 260 - RNA, 100 nt, synthetic construct
  source 1..100: mol_type = other RNA
  modified_base 1: mod_base = OTHER; note = 2'-O-methyl ribonucleotide
  modified_base 2: mod_base = OTHER; note = 2'-O-methyl ribonucleotide
  modified_base 3: mod_base = OTHER; note = 2'-O-methyl ribonucleotide
  modified_base 98: mod_base = OTHER; note = 2'-O-methyl ribonucleotide
  modified_base 99: mod_base = OTHER; note = 2'-O-methyl ribonucleotide
  modified_base 100: mod_base = OTHER; note = 2'-O-methyl ribonucleotide
  modified_base 1..4: mod_base = OTHER; note = phosphorothioate linkage
  modified_base 97..100: mod_base = OTHER; note = phosphorothioate linkage
tgcttacctgtctgtggaaggttttagagctagaaatagcaagttaaaataaggctagtccgttatcaacttgaaaaagtggcaccgagtcggtgctttt

SEQ ID NO: 261 - RNA, 100 nt, synthetic construct
  source 1..100: mol_type = other RNA
  modified_base 1: mod_base = OTHER; note = 2'-O-methyl ribonucleotide
  modified_base 2: mod_base = OTHER; note = 2'-O-methyl ribonucleotide
  modified_base 3: mod_base = OTHER; note = 2'-O-methyl ribonucleotide
  modified_base 98: mod_base = OTHER; note = 2'-O-methyl ribonucleotide
  modified_base 99: mod_base = OTHER; note = 2'-O-methyl ribonucleotide
  modified_base 100: mod_base = OTHER; note = 2'-O-methyl ribonucleotide
  modified_base 1..4: mod_base = OTHER; note = phosphorothioate linkage
  modified_base 97..100: mod_base = OTHER; note = phosphorothioate linkage
ttggaaagacggaggcagccgttttagagctagaaatagcaagttaaaataaggctagtccgttatcaacttgaaaaagtggcaccgagtcggtgctttt

SEQ ID NO: 262 - RNA, 100 nt, synthetic construct
  source 1..100: mol_type = other RNA
  modified_base 1: mod_base = OTHER; note = 2'-O-methyl ribonucleotide
  modified_base 2: mod_base = OTHER; note = 2'-O-methyl ribonucleotide
  modified_base 3: mod_base = OTHER; note = 2'-O-methyl ribonucleotide
  modified_base 98: mod_base = OTHER; note = 2'-O-methyl ribonucleotide
  modified_base 99: mod_base = OTHER; note = 2'-O-methyl ribonucleotide
  modified_base 100: mod_base = OTHER; note = 2'-O-methyl ribonucleotide
  modified_base 1..4: mod_base = OTHER; note = phosphorothioate linkage
  modified_base 97..100: mod_base = OTHER; note = phosphorothioate linkage
gaaagacggaggcagcctgggttttagagctagaaatagcaagttaaaataaggctagtccgttatcaacttgaaaaagtggcaccgagtcggtgctttt

SEQ ID NO: 263 - RNA, 100 nt, synthetic construct
  source 1..100: mol_type = other RNA
  modified_base 1: mod_base = OTHER; note = 2'-O-methyl ribonucleotide
  modified_base 2: mod_base = OTHER; note = 2'-O-methyl ribonucleotide
  modified_base 3: mod_base = OTHER; note = 2'-O-methyl ribonucleotide
  modified_base 98: mod_base = OTHER; note = 2'-O-methyl ribonucleotide
  modified_base 99: mod_base = OTHER; note = 2'-O-methyl ribonucleotide
  modified_base 100: mod_base = OTHER; note = 2'-O-methyl ribonucleotide
  modified_base 1..4: mod_base = OTHER; note = phosphorothioate linkage
  modified_base 97..100: mod_base = OTHER; note = phosphorothioate linkage
tcccaggcctggagtttattgttttagagctagaaatagcaagttaaaataaggctagtccgttatcaacttgaaaaagtggcaccgagtcggtgctttt

SEQ ID NO: 264 - DNA, 100 bp, synthetic construct
  source 1..100: mol_type = other DNA
  modified_base 1: mod_base = OTHER; note = 2'-O-methyl ribonucleotide
  modified_base 2: mod_base = OTHER; note = 2'-O-methyl ribonucleotide
  modified_base 3: mod_base = OTHER; note = 2'-O-methyl ribonucleotide
  modified_base 98: mod_base = OTHER; note = 2'-O-methyl ribonucleotide
  modified_base 99: mod_base = OTHER; note = 2'-O-methyl ribonucleotide
  modified_base 100: mod_base = OTHER; note = 2'-O-methyl ribonucleotide
  modified_base 1..4: mod_base = OTHER; note = phosphorothioate linkage
  modified_base 97..100: mod_base = OTHER; note = phosphorothioate linkage
  misc_feature 1: note = RNA
  misc_feature 2: note = RNA
  misc_feature 3: note = RNA
  misc_feature 4: note = RNA
  misc_feature 5: note = RNA
  misc_feature 6: note = RNA
  misc_feature 7: note = RNA
  misc_feature 8: note = RNA
  misc_feature 9: note = RNA
  misc_feature 10: note = RNA
  misc_feature 11: note = RNA
  misc_feature 12: note = RNA
  misc_feature 13: note = RNA
  misc_feature 14: note = RNA
  misc_feature 15: note = RNA
  misc_feature 16: note = RNA
  misc_feature 17: note = RNA
  misc_feature 18: note = RNA
  misc_feature 20: note = RNA
  misc_feature 21: note = RNA
  misc_feature 22: note = RNA
  misc_feature 23: note = RNA
  misc_feature 24: note = RNA
  misc_feature 25: note = RNA
  misc_feature 26: note = RNA
  misc_feature 27: note = RNA
  misc_feature 28: note = RNA
  misc_feature 29: note = RNA
  misc_feature 30: note = RNA
  misc_feature 31: note = RNA
  misc_feature 32: note = RNA
  misc_feature 33: note = RNA
  misc_feature 34: note = RNA
  misc_feature 35: note = RNA
  misc_feature 36: note = RNA
  misc_feature 37: note = RNA
  misc_feature 38: note = RNA
  misc_feature 39: note = RNA
  misc_feature 40: note = RNA
  misc_feature 41: note = RNA
  misc_feature 42: note = RNA
  misc_feature 43: note = RNA
  misc_feature 44: note = RNA
  misc_feature 45: note = RNA
  misc_feature 46: note = RNA
  misc_feature 47: note = RNA
  misc_feature 48: note = RNA
  misc_feature 49: note = RNA
  misc_feature 50: note = RNA
  misc_feature 51: note = RNA
  misc_feature 52: note = RNA
  misc_feature 53: note = RNA
  misc_feature 54: note = RNA
  misc_feature 55: note = RNA
  misc_feature 56: note = RNA
  misc_feature 57: note = RNA
  misc_feature 58: note = RNA
  misc_feature 59: note = RNA
  misc_feature 60: note = RNA
  misc_feature 61: note = RNA
  misc_feature 62: note = RNA
  misc_feature 63: note = RNA
  misc_feature 64: note = RNA
  misc_feature 65: note = RNA
  misc_feature 66: note = RNA
  misc_feature 67: note = RNA
  misc_feature 68: note = RNA
  misc_feature 69: note = RNA
  misc_feature 70: note = RNA
  misc_feature 71: note = RNA
  misc_feature 72: note = RNA
  misc_feature 73: note = RNA
  misc_feature 74: note = RNA
  misc_feature 75: note = RNA
  misc_feature 76: note = RNA
  misc_feature 77: note = RNA
  misc_feature 78: note = RNA
  misc_feature 79: note = RNA
  misc_feature 80: note = RNA
  misc_feature 81: note = RNA
  misc_feature 82: note = RNA
  misc_feature 83: note = RNA
  misc_feature 84: note = RNA
  misc_feature 85: note = RNA
  misc_feature 86: note = RNA
  misc_feature 87: note = RNA
  misc_feature 88: note = RNA
  misc_feature 89: note = RNA
  misc_feature 90: note = RNA
  misc_feature 91: note = RNA
  misc_feature 92: note = RNA
  misc_feature 93: note = RNA
  misc_feature 94: note = RNA
  misc_feature 95: note = RNA
  misc_feature 96: note = RNA
  misc_feature 97: note = RNA
  misc_feature 98: note = RNA
  misc_feature 99: note = RNA
  misc_feature 100: note = RNA
  misc_feature 19: note = DNA
agcacctacctcgggagctggttttagagctagaaatagcaagttaaaataaggctagtccgttatcaacttgaaaaagtggcaccgagtcggtgctttt

SEQ ID NO: 265 - RNA, 100 nt, synthetic construct
  source 1..100: mol_type = other RNA
  modified_base 1: mod_base = OTHER; note = 2'-O-methyl ribonucleotide
  modified_base 2: mod_base = OTHER; note = 2'-O-methyl ribonucleotide
  modified_base 3: mod_base = OTHER; note = 2'-O-methyl ribonucleotide
  modified_base 98: mod_base = OTHER; note = 2'-O-methyl ribonucleotide
  modified_base 99: mod_base = OTHER; note = 2'-O-methyl ribonucleotide
  modified_base 100: mod_base = OTHER; note = 2'-O-methyl ribonucleotide
  modified_base 1..4: mod_base = OTHER; note = phosphorothioate linkage
  modified_base 97..100: mod_base = OTHER; note = phosphorothioate linkage
ctttccaggtcatcacagttgttttagagctagaaatagcaagttaaaataaggctagtccgttatcaacttgaaaaagtggcaccgagtcggtgctttt

SEQ ID NO: 266 - RNA, 100 nt, synthetic construct
  source 1..100: mol_type = other RNA
  modified_base 1: mod_base = OTHER; note = 2'-O-methyl ribonucleotide
  modified_base 2: mod_base = OTHER; note = 2'-O-methyl ribonucleotide
  modified_base 3: mod_base = OTHER; note = 2'-O-methyl ribonucleotide
  modified_base 98: mod_base = OTHER; note = 2'-O-methyl ribonucleotide
  modified_base 99: mod_base = OTHER; note = 2'-O-methyl ribonucleotide
  modified_base 100: mod_base = OTHER; note = 2'-O-methyl ribonucleotide
  modified_base 1..4: mod_base = OTHER; note = phosphorothioate linkage
  modified_base 97..100: mod_base = OTHER; note = phosphorothioate linkage
cctttccaggtcatcacagtgttttagagctagaaatagcaagttaaaataaggctagtccgttatcaacttgaaaaagtggcaccgagtcggtgctttt

SEQ ID NO: 267 - RNA, 100 nt, synthetic construct
  source 1..100: mol_type = other RNA
  modified_base 1: mod_base = OTHER; note = 2'-O-methyl ribonucleotide
  modified_base 2: mod_base = OTHER; note = 2'-O-methyl ribonucleotide
  modified_base 3: mod_base = OTHER; note = 2'-O-methyl ribonucleotide
  modified_base 98: mod_base = OTHER; note = 2'-O-methyl ribonucleotide
  modified_base 99: mod_base = OTHER; note = 2'-O-methyl ribonucleotide
  modified_base 100: mod_base = OTHER; note = 2'-O-methyl ribonucleotide
  modified_base 1..4: mod_base = OTHER; note = phosphorothioate linkage
  modified_base 97..100: mod_base = OTHER; note = phosphorothioate linkage
tttccaggtcatcacagttggttttagagctagaaatagcaagttaaaataaggctagtccgttatcaacttgaaaaagtggcaccgagtcggtgctttt

SEQ ID NO: 268 - RNA, 100 nt, synthetic construct
  source 1..100: mol_type = other RNA
  modified_base 1: mod_base = OTHER; note = 2'-O-methyl ribonucleotide
  modified_base 2: mod_base = OTHER; note = 2'-O-methyl ribonucleotide
  modified_base 3: mod_base = OTHER; note = 2'-O-methyl ribonucleotide
  modified_base 98: mod_base = OTHER; note = 2'-O-methyl ribonucleotide
  modified_base 99: mod_base = OTHER; note = 2'-O-methyl ribonucleotide
  modified_base 100: mod_base = OTHER; note = 2'-O-methyl ribonucleotide
  modified_base 1..4: mod_base = OTHER; note = phosphorothioate linkage
  modified_base 97..100: mod_base = OTHER; note = phosphorothioate linkage
cttacctgccccatgggtgcgttttagagctagaaatagcaagttaaaataaggctagtccgttatcaacttgaaaaagtggcaccgagtcggtgctttt

SEQ ID NO: 269 - RNA, 100 nt, synthetic construct
  source 1..100: mol_type = other RNA
  modified_base 1: mod_base = OTHER; note = 2'-O-methyl ribonucleotide
  modified_base 2: mod_base = OTHER; note = 2'-O-methyl ribonucleotide
  modified_base 3: mod_base = OTHER; note = 2'-O-methyl ribonucleotide
  modified_base 98: mod_base = OTHER; note = 2'-O-methyl ribonucleotide
  modified_base 99: mod_base = OTHER; note = 2'-O-methyl ribonucleotide
  modified_base 100: mod_base = OTHER; note = 2'-O-methyl ribonucleotide
  modified_base 1..4: mod_base = OTHER; note = phosphorothioate linkage
  modified_base 97..100: mod_base = OTHER; note = phosphorothioate linkage
taaggcccaagggggcaagcgttttagagctagaaatagcaagttaaaataaggctagtccgttatcaacttgaaaaagtggcaccgagtcggtgctttt

SEQ ID NO: 270 - RNA, 100 nt, synthetic construct
  source 1..100: mol_type = other RNA
  modified_base 1: mod_base = OTHER; note = 2'-O-methyl ribonucleotide
  modified_base 2: mod_base = OTHER; note = 2'-O-methyl ribonucleotide
  modified_base 3: mod_base = OTHER; note = 2'-O-methyl ribonucleotide
  modified_base 98: mod_base = OTHER; note = 2'-O-methyl ribonucleotide
  modified_base 99: mod_base = OTHER; note = 2'-O-methyl ribonucleotide
  modified_base 100: mod_base = OTHER; note = 2'-O-methyl ribonucleotide
  modified_base 1..4: mod_base = OTHER; note = phosphorothioate linkage
  modified_base 97..100: mod_base = OTHER; note = phosphorothioate linkage
cctcttcacctgctcctgaggttttagagctagaaatagcaagttaaaataaggctagtccgttatcaacttgaaaaagtggcaccgagtcggtgctttt

SEQ ID NO: 271 - RNA, 100 nt, synthetic construct
  source 1..100: mol_type = other RNA
  modified_base 1: mod_base = OTHER; note = 2'-O-methyl ribonucleotide
  modified_base 2: mod_base = OTHER; note = 2'-O-methyl ribonucleotide
  modified_base 3: mod_base = OTHER; note = 2'-O-methyl ribonucleotide
  modified_base 98: mod_base = OTHER; note = 2'-O-methyl ribonucleotide
  modified_base 99: mod_base = OTHER; note = 2'-O-methyl ribonucleotide
  modified_base 100: mod_base = OTHER; note = 2'-O-methyl ribonucleotide
  modified_base 1..4: mod_base = OTHER; note = phosphorothioate linkage
  modified_base 97..100: mod_base = OTHER; note = phosphorothioate linkage
gcctcttcacctgctcctgagttttagagctagaaatagcaagttaaaataaggctagtccgttatcaacttgaaaaagtggcaccgagtcggtgctttt

SEQ ID NO: 272 - RNA, 100 nt, synthetic construct
  source 1..100: mol_type = other RNA
  modified_base 1: mod_base = OTHER; note = 2'-O-methyl ribonucleotide
  modified_base 2: mod_base = OTHER; note = 2'-O-methyl ribonucleotide
  modified_base 3: mod_base = OTHER; note = 2'-O-methyl ribonucleotide
  modified_base 98: mod_base = OTHER; note = 2'-O-methyl ribonucleotide
  modified_base 99: mod_base = OTHER; note = 2'-O-methyl ribonucleotide
  modified_base 100: mod_base = OTHER; note = 2'-O-methyl ribonucleotide
  modified_base 1..4: mod_base = OTHER; note = phosphorothioate linkage
  modified_base 97..100: mod_base = OTHER; note = phosphorothioate linkage
ttcacctgctcctgaggggcgttttagagctagaaatagcaagttaaaataaggctagtccgttatcaacttgaaaaagtggcaccgagtcggtgctttt

SEQ ID NO: 273 - RNA, 100 nt, synthetic construct
  source 1..100: mol_type = other RNA
  modified_base 1: mod_base = OTHER; note = 2'-O-methyl ribonucleotide
  modified_base 2: mod_base = OTHER; note = 2'-O-methyl ribonucleotide
  modified_base 3: mod_base = OTHER; note = 2'-O-methyl ribonucleotide
  modified_base 98: mod_base = OTHER; note = 2'-O-methyl ribonucleotide
  modified_base 99: mod_base = OTHER; note = 2'-O-methyl ribonucleotide
  modified_base 100: mod_base = OTHER; note = 2'-O-methyl ribonucleotide
  modified_base 1..4: mod_base = OTHER; note = phosphorothioate linkage
  modified_base 97..100: mod_base = OTHER; note = phosphorothioate linkage
tcacctgctcctgaggggccgttttagagctagaaatagcaagttaaaataaggctagtccgttatcaacttgaaaaagtggcaccgagtcggtgctttt

SEQ ID NO: 274 - RNA, 100 nt, synthetic construct
  source 1..100: mol_type = other RNA
  modified_base 1: mod_base = OTHER; note = 2'-O-methyl ribonucleotide
  modified_base 2: mod_base = OTHER; note = 2'-O-methyl ribonucleotide
  modified_base 3: mod_base = OTHER; note = 2'-O-methyl ribonucleotide
  modified_base 98: mod_base = OTHER; note = 2'-O-methyl ribonucleotide
  modified_base 99: mod_base = OTHER; note = 2'-O-methyl ribonucleotide
  modified_base 100: mod_base = OTHER; note = 2'-O-methyl ribonucleotide
  modified_base 1..4: mod_base = OTHER; note = phosphorothioate linkage
  modified_base 97..100: mod_base = OTHER; note = phosphorothioate linkage
cccaggctgcagctcccactgttttagagctagaaatagcaagttaaaataaggctagtccgttatcaacttgaaaaagtggcaccgagtcggtgctttt

SEQ ID NO: 275 - RNA, 100 nt, synthetic construct
  source 1..100: mol_type = other RNA
  modified_base 1: mod_base = OTHER; note = 2'-O-methyl ribonucleotide
  modified_base 2: mod_base = OTHER; note = 2'-O-methyl ribonucleotide
  modified_base 3: mod_base = OTHER; note = 2'-O-methyl ribonucleotide
  modified_base 98: mod_base = OTHER; note = 2'-O-methyl ribonucleotide
  modified_base 99: mod_base = OTHER; note = 2'-O-methyl ribonucleotide
  modified_base 100: mod_base = OTHER; note = 2'-O-methyl ribonucleotide
  modified_base 1..4: mod_base = OTHER; note = phosphorothioate linkage
  modified_base 97..100: mod_base = OTHER; note = phosphorothioate linkage
ccccaggctgcagctcccacgttttagagctagaaatagcaagttaaaataaggctagtccgttatcaacttgaaaaagtggcaccgagtcggtgctttt

SEQ ID NO: 276 - RNA, 100 nt, synthetic construct
  source 1..100: mol_type = other RNA
  modified_base 1: mod_base = OTHER; note = 2'-O-methyl ribonucleotide
  modified_base 2: mod_base = OTHER; note = 2'-O-methyl ribonucleotide
  modified_base 3: mod_base = OTHER; note = 2'-O-methyl ribonucleotide
  modified_base 98: mod_base = OTHER; note = 2'-O-methyl ribonucleotide
  modified_base 99: mod_base = OTHER; note = 2'-O-methyl ribonucleotide
  modified_base 100: mod_base = OTHER; note = 2'-O-methyl ribonucleotide
  modified_base 1..4: mod_base = OTHER; note = phosphorothioate linkage
  modified_base 97..100: mod_base = OTHER; note = phosphorothioate linkage
gcaggtgaccgtggcctgcggttttagagctagaaatagcaagttaaaataaggctagtccgttatcaacttgaaaaagtggcaccgagtcggtgctttt

SEQ ID NO: 277 - RNA, 100 nt, synthetic construct
  source 1..100: mol_type = other RNA
  modified_base 1: mod_base = OTHER; note = 2'-O-methyl ribonucleotide
  modified_base 2: mod_base = OTHER; note = 2'-O-methyl ribonucleotide
  modified_base 3: mod_base = OTHER; note = 2'-O-methyl ribonucleotide
  modified_base 98: mod_base = OTHER; note = 2'-O-methyl ribonucleotide
  modified_base 99: mod_base = OTHER; note = 2'-O-methyl ribonucleotide
  modified_base 100: mod_base = OTHER; note = 2'-O-methyl ribonucleotide
  modified_base 1..4: mod_base = OTHER; note = phosphorothioate linkage
  modified_base 97..100: mod_base = OTHER; note = phosphorothioate linkage
ctcctttaggaggctggtgggttttagagctagaaatagcaagttaaaataaggctagtccgttatcaacttgaaaaagtggcaccgagtcggtgctttt

SEQ ID NO: 278 - RNA, 100 nt, synthetic construct
  source 1..100: mol_type = other RNA
  modified_base 1: mod_base = OTHER; note = 2'-O-methyl ribonucleotide
  modified_base 2: mod_base = OTHER; note = 2'-O-methyl ribonucleotide
  modified_base 3: mod_base = OTHER; note = 2'-O-methyl ribonucleotide
  modified_base 98: mod_base = OTHER; note = 2'-O-methyl ribonucleotide
  modified_base 99: mod_base = OTHER; note = 2'-O-methyl ribonucleotide
  modified_base 100: mod_base = OTHER; note = 2'-O-methyl ribonucleotide
  modified_base 1..4: mod_base = OTHER; note = phosphorothioate linkage
  modified_base 97..100: mod_base = OTHER; note = phosphorothioate linkage
ttttcaggagaattttggttgttttagagctagaaatagcaagttaaaataaggctagtccgttatcaacttgaaaaagtggcaccgagtcggtgctttt

SEQ ID NO: 279 - RNA, 100 nt, synthetic construct
  source 1..100: mol_type = other RNA
  modified_base 1: mod_base = OTHER; note = 2'-O-methyl ribonucleotide
  modified_base 2: mod_base = OTHER; note = 2'-O-methyl ribonucleotide
  modified_base 3: mod_base = OTHER; note = 2'-O-methyl ribonucleotide
  modified_base 98: mod_base = OTHER; note = 2'-O-methyl ribonucleotide
  modified_base 99: mod_base = OTHER; note = 2'-O-methyl ribonucleotide
  modified_base 100: mod_base = OTHER; note = 2'-O-methyl ribonucleotide
  modified_base 1..4: mod_base = OTHER; note = phosphorothioate linkage
  modified_base 97..100: mod_base = OTHER; note = phosphorothioate linkage
cttttcaggagaattttggtgttttagagctagaaatagcaagttaaaataaggctagtccgttatcaacttgaaaaagtggcaccgagtcggtgctttt

SEQ ID NO: 280 - RNA, 100 nt, synthetic construct
  source 1..100: mol_type = other RNA
  modified_base 1: mod_base = OTHER; note = 2'-O-methyl ribonucleotide
  modified_base 2: mod_base = OTHER; note = 2'-O-methyl ribonucleotide
  modified_base 3: mod_base = OTHER; note = 2'-O-methyl ribonucleotide
  modified_base 98: mod_base = OTHER; note = 2'-O-methyl ribonucleotide
  modified_base 99: mod_base = OTHER; note = 2'-O-methyl ribonucleotide
  modified_base 100: mod_base = OTHER; note = 2'-O-methyl ribonucleotide
  modified_base 1..4: mod_base = OTHER; note = phosphorothioate linkage
  modified_base 97..100: mod_base = OTHER; note = phosphorothioate linkage
taatttggcccttcgtcttagttttagagctagaaatagcaagttaaaataaggctagtccgttatcaacttgaaaaagtggcaccgagtcggtgctttt

SEQ ID NO: 281 - RNA, 100 nt, synthetic construct
  source 1..100: mol_type = other RNA
  modified_base 1: mod_base = OTHER; note = 2'-O-methyl ribonucleotide
  modified_base 2: mod_base = OTHER; note = 2'-O-methyl ribonucleotide
  modified_base 3: mod_base = OTHER; note = 2'-O-methyl ribonucleotide
  modified_base 98: mod_base = OTHER; note = 2'-O-methyl ribonucleotide
  modified_base 99: mod_base = OTHER; note = 2'-O-methyl ribonucleotide
  modified_base 100: mod_base = OTHER; note = 2'-O-methyl ribonucleotide
  modified_base 1..4: mod_base = OTHER; note = phosphorothioate linkage
  modified_base 97..100: mod_base = OTHER; note = phosphorothioate linkage
agactttgtccataagacgagttttagagctagaaatagcaagttaaaataaggctagtccgttatcaacttgaaaaagtggcaccgagtcggtgctttt

SEQ ID NO: 282 - RNA, 100 nt, synthetic construct
  source 1..100: mol_type = other RNA
  modified_base 1: mod_base = OTHER; note = 2'-O-methyl ribonucleotide
  modified_base 2: mod_base = OTHER; note = 2'-O-methyl ribonucleotide
  modified_base 3: mod_base = OTHER; note = 2'-O-methyl ribonucleotide
  modified_base 98: mod_base = OTHER; note = 2'-O-methyl ribonucleotide
  modified_base 99: mod_base = OTHER; note = 2'-O-methyl ribonucleotide
  modified_base 100: mod_base = OTHER; note = 2'-O-methyl ribonucleotide
  modified_base 1..4: mod_base = OTHER; note = phosphorothioate linkage
  modified_base 97..100: mod_base = OTHER; note = phosphorothioate linkage
gactttgtccataagacgaagttttagagctagaaatagcaagttaaaataaggctagtccgttatcaacttgaaaaagtggcaccgagtcggtgctttt

SEQ ID NO: 283 - RNA, 100 nt, synthetic construct
  source 1..100: mol_type = other RNA
  modified_base 1: mod_base = OTHER; note = 2'-O-methyl ribonucleotide
  modified_base 2: mod_base = OTHER; note = 2'-O-methyl ribonucleotide
  modified_base 3: mod_base = OTHER; note = 2'-O-methyl ribonucleotide
  modified_base 98: mod_base = OTHER; note = 2'-O-methyl ribonucleotide
  modified_base 99: mod_base = OTHER; note = 2'-O-methyl ribonucleotide
  modified_base 100: mod_base = OTHER; note = 2'-O-methyl ribonucleotide
  modified_base 1..4: mod_base = OTHER; note = phosphorothioate linkage
  modified_base 97..100: mod_base = OTHER; note = phosphorothioate linkage
agccaatggcctccttcagtgttttagagctagaaatagcaagttaaaataaggctagtccgttatcaacttgaaaaagtggcaccgagtcggtgctttt

SEQ ID NO: 284 - RNA, 100 nt, synthetic construct
  source 1..100: mol_type = other RNA
  modified_base 1: mod_base = OTHER; note = 2'-O-methyl ribonucleotide
  modified_base 2: mod_base = OTHER; note = 2'-O-methyl ribonucleotide
  modified_base 3: mod_base = OTHER; note = 2'-O-methyl ribonucleotide
  modified_base 98: mod_base = OTHER; note = 2'-O-methyl ribonucleotide
  modified_base 99: mod_base = OTHER; note = 2'-O-methyl ribonucleotide
  modified_base 100: mod_base = OTHER; note = 2'-O-methyl ribonucleotide
  modified_base 1..4: mod_base = OTHER; note = phosphorothioate linkage
  modified_base 97..100: mod_base = OTHER; note = phosphorothioate linkage
tcccaactgaaggaggccatgttttagagctagaaatagcaagttaaaataaggctagtccgttatcaacttgaaaaagtggcaccgagtcggtgctttt

SEQ ID NO: 285 - RNA, 100 nt, synthetic construct
  source 1..100: mol_type = other RNA
  modified_base 1: mod_base = OTHER; note = 2'-O-methyl ribonucleotide
  modified_base 2: mod_base = OTHER; note = 2'-O-methyl ribonucleotide
  modified_base 3: mod_base = OTHER; note = 2'-O-methyl ribonucleotide
  modified_base 98: mod_base = OTHER; note = 2'-O-methyl ribonucleotide
  modified_base 99: mod_base = OTHER; note = 2'-O-methyl ribonucleotide
  modified_base 100: mod_base = OTHER; note = 2'-O-methyl ribonucleotide
  modified_base 1..4: mod_base = OTHER; note = phosphorothioate linkage
  modified_base 97..100: mod_base = OTHER; note = phosphorothioate linkage
ggcctccttcagttgggacagttttagagctagaaatagcaagttaaaataaggctagtccgttatcaacttgaaaaagtggcaccgagtcggtgctttt

SEQ ID NO: 286 - RNA, 100 nt, synthetic construct
  source 1..100: mol_type = other RNA
  modified_base 1: mod_base = OTHER; note = 2'-O-methyl ribonucleotide
  modified_base 2: mod_base = OTHER; note = 2'-O-methyl ribonucleotide
  modified_base 3: mod_base = OTHER; note = 2'-O-methyl ribonucleotide
  modified_base 98: mod_base = OTHER; note = 2'-O-methyl ribonucleotide
  modified_base 99: mod_base = OTHER; note = 2'-O-methyl ribonucleotide
  modified_base 100: mod_base = OTHER; note = 2'-O-methyl ribonucleotide
  modified_base 1..4: mod_base = OTHER; note = phosphorothioate linkage
  modified_base 97..100: mod_base = OTHER; note = phosphorothioate linkage
gaccatgtcccaactgaagggttttagagctagaaatagcaagttaaaataaggctagtccgttatcaacttgaaaaagtggcaccgagtcggtgctttt

SEQ ID NO: 287 - RNA, 100 nt, synthetic construct
  source 1..100: mol_type = other RNA
  modified_base 1: mod_base = OTHER; note = 2'-O-methyl ribonucleotide
  modified_base 2: mod_base = OTHER; note = 2'-O-methyl ribonucleotide
  modified_base 3: mod_base = OTHER; note = 2'-O-methyl ribonucleotide
  modified_base 98: mod_base = OTHER; note = 2'-O-methyl ribonucleotide
  modified_base 99: mod_base = OTHER; note = 2'-O-methyl ribonucleotide
  modified_base 100: mod_base = OTHER; note = 2'-O-methyl ribonucleotide
  modified_base 1..4: mod_base = OTHER; note = phosphorothioate linkage
  modified_base 97..100: mod_base = OTHER; note = phosphorothioate linkage
gccaatggcctccttcagttgttttagagctagaaatagcaagttaaaataaggctagtccgttatcaacttgaaaaagtggcaccgagtcggtgctttt

SEQ ID NO: 288 - RNA, 100 nt, synthetic construct
  source 1..100: mol_type = other RNA
  modified_base 1: mod_base = OTHER; note = 2'-O-methyl ribonucleotide
  modified_base 2: mod_base = OTHER; note = 2'-O-methyl ribonucleotide
  modified_base 3: mod_base = OTHER; note = 2'-O-methyl ribonucleotide
  modified_base 98: mod_base = OTHER; note = 2'-O-methyl ribonucleotide
  modified_base 99: mod_base = OTHER; note = 2'-O-methyl ribonucleotide
  modified_base 100: mod_base = OTHER; note = 2'-O-methyl ribonucleotide
  modified_base 1..4: mod_base = OTHER; note = phosphorothioate linkage
  modified_base 97..100: mod_base = OTHER; note = phosphorothioate linkage
attgtcttgatcaattctgggttttagagctagaaatagcaagttaaaataaggctagtccgttatcaacttgaaaaagtggcaccgagtcggtgctttt

SEQ ID NO: 289 - RNA, 100 nt, synthetic construct
  source 1..100: mol_type = other RNA
  modified_base 1: mod_base = OTHER; note = 2'-O-methyl ribonucleotide
  modified_base 2: mod_base = OTHER; note = 2'-O-methyl ribonucleotide
  modified_base 3: mod_base = OTHER; note = 2'-O-methyl ribonucleotide
  modified_base 98: mod_base = OTHER; note = 2'-O-methyl ribonucleotide
  modified_base 99: mod_base = OTHER; note = 2'-O-methyl ribonucleotide
  modified_base 100: mod_base = OTHER; note = 2'-O-methyl ribonucleotide
  modified_base 1..4: mod_base = OTHER; note = phosphorothioate linkage
  modified_base 97..100: mod_base = OTHER; note = phosphorothioate linkage
attctggaggaaataactaggttttagagctagaaatagcaagttaaaataaggctagtccgttatcaacttgaaaaagtggcaccgagtcggtgctttt

SEQ ID NO: 290 - RNA, 100 nt, synthetic construct
  source 1..100: mol_type = other RNA
  modified_base 1: mod_base = OTHER; note = 2'-O-methyl ribonucleotide
  modified_base 2: mod_base = OTHER; note = 2'-O-methyl ribonucleotide
  modified_base 3: mod_base = OTHER; note = 2'-O-methyl ribonucleotide
  modified_base 98: mod_base = OTHER; note = 2'-O-methyl ribonucleotide
  modified_base 99: mod_base = OTHER; note = 2'-O-methyl ribonucleotide
  modified_base 100: mod_base = OTHER; note = 2'-O-methyl ribonucleotide
  modified_base 1..4: mod_base = OTHER; note = phosphorothioate linkage
  modified_base 97..100: mod_base = OTHER; note = phosphorothioate linkage
tctgggtgttctggagtttcgttttagagctagaaatagcaagttaaaataaggctagtccgttatcaacttgaaaaagtggcaccgagtcggtgctttt

SEQ ID NO: 291 - RNA, 100 nt, synthetic construct
  source 1..100: mol_type = other RNA
  modified_base 1: mod_base = OTHER; note = 2'-O-methyl ribonucleotide
  modified_base 2: mod_base = OTHER; note = 2'-O-methyl ribonucleotide
  modified_base 3: mod_base = OTHER; note = 2'-O-methyl ribonucleotide
  modified_base 98: mod_base = OTHER; note = 2'-O-methyl ribonucleotide
  modified_base 99: mod_base = OTHER; note = 2'-O-methyl ribonucleotide
  modified_base 100: mod_base = OTHER; note = 2'-O-methyl ribonucleotide
  modified_base 1..4: mod_base = OTHER; note = phosphorothioate linkage
  modified_base 97..100: mod_base = OTHER; note = phosphorothioate linkage
aacatagcaaatcttgatttgttttagagctagaaatagcaagttaaaataaggctagtccgttatcaacttgaaaaagtggcaccgagtcggtgctttt

SEQ ID NO: 292 - RNA, 100 nt, synthetic construct
  source 1..100: mol_type = other RNA
  modified_base 1: mod_base = OTHER; note = 2'-O-methyl ribonucleotide
  modified_base 2: mod_base = OTHER; note = 2'-O-methyl ribonucleotide
  modified_base 3: mod_base = OTHER; note = 2'-O-methyl ribonucleotide
  modified_base 98: mod_base = OTHER; note = 2'-O-methyl ribonucleotide
  modified_base 99: mod_base = OTHER; note = 2'-O-methyl ribonucleotide
  modified_base 100: mod_base = OTHER; note = 2'-O-methyl ribonucleotide
  modified_base 1..4: mod_base = OTHER; note = phosphorothioate linkage
  modified_base 97..100: mod_base = OTHER; note = phosphorothioate linkage
gtagaattttttcttctagggttttagagctagaaatagcaagttaaaataaggctagtccgttatcaacttgaaaaagtggcaccgagtcggtgctttt

SEQ ID NO: 293 - RNA, 100 nt, synthetic construct
  source 1..100: mol_type = other RNA
  modified_base 1: mod_base = OTHER; note = 2'-O-methyl ribonucleotide
  modified_base 2: mod_base = OTHER; note = 2'-O-methyl ribonucleotide
  modified_base 3: mod_base = OTHER; note = 2'-O-methyl ribonucleotide
  modified_base 98: mod_base = OTHER; note = 2'-O-methyl ribonucleotide
  modified_base 99: mod_base = OTHER; note = 2'-O-methyl ribonucleotide
  modified_base 100: mod_base = OTHER; note = 2'-O-methyl ribonucleotide
  modified_base 1..4: mod_base = OTHER; note = phosphorothioate linkage
  modified_base 97..100: mod_base = OTHER; note = phosphorothioate linkage
actacaagtcaaaaatgaaggttttagagctagaaatagcaagttaaaataaggctagtccgttatcaacttgaaaaagtggcaccgagtcggtgctttt

SEQ ID NO: 294 - RNA, 100 nt, synthetic construct
  source 1..100: mol_type = other RNA
  modified_base 1: mod_base = OTHER; note = 2'-O-methyl ribonucleotide
  modified_base 2: mod_base = OTHER; note = 2'-O-methyl ribonucleotide
  modified_base 3: mod_base = OTHER; note = 2'-O-methyl ribonucleotide
  modified_base 98: mod_base = OTHER; note = 2'-O-methyl ribonucleotide
  modified_base 99: mod_base = OTHER; note = 2'-O-methyl ribonucleotide
  modified_base 100: mod_base = OTHER; note = 2'-O-methyl ribonucleotide
  modified_base 1..4: mod_base = OTHER; note = phosphorothioate linkage
  modified_base 97..100: mod_base = OTHER; note = phosphorothioate linkage
tatattggtcttccacggtcgttttagagctagaaatagcaagttaaaataaggctagtccgttatcaacttgaaaaagtggcaccgagtcggtgctttt

SEQ ID NO: 295 - RNA, 100 nt, synthetic construct
  source 1..100: mol_type = other RNA
  modified_base 1: mod_base = OTHER; note = 2'-O-methyl ribonucleotide
  modified_base 2: mod_base = OTHER; note = 2'-O-methyl ribonucleotide
  modified_base 3: mod_base = OTHER; note = 2'-O-methyl ribonucleotide
  modified_base 98: mod_base = OTHER; note = 2'-O-methyl ribonucleotide
  modified_base 99: mod_base = OTHER; note = 2'-O-methyl ribonucleotide
  modified_base 100: mod_base = OTHER; note = 2'-O-methyl ribonucleotide
  modified_base 1..4: mod_base = OTHER; note = phosphorothioate linkage
  modified_base 97..100: mod_base = OTHER; note = phosphorothioate linkage
caaagaccttctccagaccggttttagagctagaaatagcaagttaaaataaggctagtccgttatcaacttgaaaaagtggcaccgagtcggtgctttt

SEQ ID NO: 296 - RNA, 100 nt, synthetic construct
  source 1..100: mol_type = other RNA
  modified_base 1: mod_base = OTHER; note = 2'-O-methyl ribonucleotide
  modified_base 2: mod_base = OTHER; note = 2'-O-methyl ribonucleotide
  modified_base 3: mod_base = OTHER; note = 2'-O-methyl ribonucleotide
  modified_base 98: mod_base = OTHER; note = 2'-O-methyl ribonucleotide
  modified_base 99: mod_base = OTHER; note = 2'-O-methyl ribonucleotide
  modified_base 100: mod_base = OTHER; note = 2'-O-methyl ribonucleotide
  modified_base 1..4: mod_base = OTHER; note = phosphorothioate linkage
  modified_base 97..100: mod_base = OTHER; note = phosphorothioate linkage
ggtcttccacggtctggagagttttagagctagaaatagcaagttaaaataaggctagtccgttatcaacttgaaaaagtggcaccgagtcggtgctttt

SEQ ID NO: 297 - RNA, 100 nt, synthetic construct
  source 1..100: mol_type = other RNA
  modified_base 1: mod_base = OTHER; note = 2'-O-methyl ribonucleotide
  modified_base 2: mod_base = OTHER; note = 2'-O-methyl ribonucleotide
  modified_base 3: mod_base = OTHER; note = 2'-O-methyl ribonucleotide
  modified_base 98: mod_base = OTHER; note = 2'-O-methyl ribonucleotide
  modified_base 99: mod_base = OTHER; note = 2'-O-methyl ribonucleotide
  modified_base 100: mod_base = OTHER; note = 2'-O-methyl ribonucleotide
  modified_base 1..4: mod_base = OTHER; note = phosphorothioate linkage
  modified_base 97..100: mod_base = OTHER; note = phosphorothioate linkage
ttgtttatattggtcttccagttttagagctagaaatagcaagttaaaataaggctagtccgttatcaacttgaaaaagtggcaccgagtcggtgctttt

SEQ ID NO: 298 - RNA, 100 nt, synthetic construct
  source 1..100: mol_type = other RNA
  modified_base 1: mod_base = OTHER; note = 2'-O-methyl ribonucleotide
  modified_base 2: mod_base = OTHER; note = 2'-O-methyl ribonucleotide
  modified_base 3: mod_base = OTHER; note = 2'-O-methyl ribonucleotide
  modified_base 98: mod_base = OTHER; note = 2'-O-methyl ribonucleotide
  modified_base 99: mod_base = OTHER; note = 2'-O-methyl ribonucleotide
  modified_base 100: mod_base = OTHER; note = 2'-O-methyl ribonucleotide
  modified_base 1..4: mod_base = OTHER; note = phosphorothioate linkage
  modified_base 97..100: mod_base = OTHER; note = phosphorothioate linkage
cttttatttgactatgctgtgttttagagctagaaatagcaagttaaaataaggctagtccgttatcaacttgaaaaagtggcaccgagtcggtgctttt

SEQ ID NO: 299 - RNA, 100 nt, synthetic construct
  source 1..100: mol_type = other RNA
  modified_base 1: mod_base = OTHER; note = 2'-O-methyl ribonucleotide
  modified_base 2: mod_base = OTHER; note = 2'-O-methyl ribonucleotide
  modified_base 3: mod_base = OTHER; note = 2'-O-methyl ribonucleotide
  modified_base 98: mod_base = OTHER; note = 2'-O-methyl ribonucleotide
  modified_base 99: mod_base = OTHER; note = 2'-O-methyl ribonucleotide
  modified_base 100: mod_base = OTHER; note = 2'-O-methyl ribonucleotide
  modified_base 1..4: mod_base = OTHER; note = phosphorothioate linkage
  modified_base 97..100: mod_base = OTHER; note = phosphorothioate linkage
aaagtctggatatagagagtgttttagagctagaaatagcaagttaaaataaggctagtccgttatcaacttgaaaaagtggcaccgagtcggtgctttt

SEQ ID NO: 300 - RNA, 100 nt, synthetic construct
  source 1..100: mol_type = other RNA
  modified_base 1: mod_base = OTHER; note = 2'-O-methyl ribonucleotide
  modified_base 2: mod_base = OTHER; note = 2'-O-methyl ribonucleotide
  modified_base 3: mod_base = OTHER; note = 2'-O-methyl ribonucleotide
  modified_base 98: mod_base = OTHER; note = 2'-O-methyl ribonucleotide
  modified_base 99: mod_base = OTHER; note = 2'-O-methyl ribonucleotide
  modified_base 100: mod_base = OTHER; note = 2'-O-methyl ribonucleotide
  modified_base 1..4: mod_base = OTHER; note = phosphorothioate linkage
  modified_base 97..100: mod_base = OTHER; note = phosphorothioate linkage
gttggtttaattgtttatatgttttagagctagaaatagcaagttaaaataaggctagtccgttatcaacttgaaaaagtggcaccgagtcggtgctttt

SEQ ID NO: 301 - RNA, 100 nt, synthetic construct
  source 1..100: mol_type = other RNA
  modified_base 1: mod_base = OTHER; note = 2'-O-methyl ribonucleotide
  modified_base 2: mod_base = OTHER; note = 2'-O-methyl ribonucleotide
  modified_base 3: mod_base = OTHER; note = 2'-O-methyl ribonucleotide
  modified_base 98: mod_base = OTHER; note = 2'-O-methyl ribonucleotide
  modified_base 99: mod_base = OTHER; note = 2'-O-methyl ribonucleotide
  modified_base 100: mod_base = OTHER; note = 2'-O-methyl ribonucleotide
  modified_base 1..4: mod_base = OTHER; note = phosphorothioate linkage
  modified_base 97..100: mod_base = OTHER; note = phosphorothioate linkage
tgatggtaagacactttggtgttttagagctagaaatagcaagttaaaataaggctagtccgttatcaacttgaaaaagtggcaccgagtcggtgctttt

SEQ ID NO: 302 - RNA, 100 nt, synthetic construct
  source 1..100: mol_type = other RNA
  modified_base 1: mod_base = OTHER; note = 2'-O-methyl ribonucleotide
  modified_base 2: mod_base = OTHER; note = 2'-O-methyl ribonucleotide
  modified_base 3: mod_base = OTHER; note = 2'-O-methyl ribonucleotide
  modified_base 98: mod_base = OTHER; note = 2'-O-methyl ribonucleotide
  modified_base 99: mod_base = OTHER; note = 2'-O-methyl ribonucleotide
  modified_base 100: mod_base = OTHER; note = 2'-O-methyl ribonucleotide
  modified_base 1..4: mod_base = OTHER; note = phosphorothioate linkage
  modified_base 97..100: mod_base = OTHER; note = phosphorothioate linkage
ggagtagttcttggtgctctgttttagagctagaaatagcaagttaaaataaggctagtccgttatcaacttgaaaaagtggcaccgagtcggtgctttt

SEQ ID NO: 303 - RNA, 100 nt, synthetic construct
  source 1..100: mol_type = other RNA
  modified_base 1: mod_base = OTHER; note = 2'-O-methyl ribonucleotide
  modified_base 2: mod_base = OTHER; note = 2'-O-methyl ribonucleotide
  modified_base 3: mod_base = OTHER; note = 2'-O-methyl ribonucleotide
  modified_base 98: mod_base = OTHER; note = 2'-O-methyl ribonucleotide
  modified_base 99: mod_base = OTHER; note = 2'-O-methyl ribonucleotide
  modified_base 100: mod_base = OTHER; note = 2'-O-methyl ribonucleotide
  modified_base 1..4: mod_base = OTHER; note = phosphorothioate linkage
  modified_base 97..100: mod_base = OTHER; note = phosphorothioate linkage
aacatgatggtaagacacttgttttagagctagaaatagcaagttaaaataaggctagtccgttatcaacttgaaaaagtggcaccgagtcggtgctttt

SEQ ID NO: 304 - RNA, 100 nt, synthetic construct
  source 1..100: mol_type = other RNA
  modified_base 1: mod_base = OTHER; note = 2'-O-methyl ribonucleotide
  modified_base 2: mod_base = OTHER; note = 2'-O-methyl ribonucleotide
  modified_base 3: mod_base = OTHER; note = 2'-O-methyl ribonucleotide
  modified_base 98: mod_base = OTHER; note = 2'-O-methyl ribonucleotide
  modified_base 99: mod_base = OTHER; note = 2'-O-methyl ribonucleotide
  modified_base 100: mod_base = OTHER; note = 2'-O-methyl ribonucleotide
  modified_base 1..4: mod_base = OTHER; note = phosphorothioate linkage
  modified_base 97..100: mod_base = OTHER; note = phosphorothioate linkage
tgaagaaagggagtagttctgttttagagctagaaatagcaagttaaaataaggctagtccgttatcaacttgaaaaagtggcaccgagtcggtgctttt

SEQ ID NO: 305 - RNA, 100 nt, synthetic construct
  source 1..100: mol_type = other RNA
  modified_base 1: mod_base = OTHER; note = 2'-O-methyl ribonucleotide
  modified_base 2: mod_base = OTHER; note = 2'-O-methyl ribonucleotide
  modified_base 3: mod_base = OTHER; note = 2'-O-methyl ribonucleotide
  modified_base 98: mod_base = OTHER; note = 2'-O-methyl ribonucleotide
  modified_base 99: mod_base = OTHER; note = 2'-O-methyl ribonucleotide
  modified_base 100: mod_base = OTHER; note = 2'-O-methyl ribonucleotide
  modified_base 1..4: mod_base = OTHER; note = phosphorothioate linkage
  modified_base 97..100: mod_base = OTHER; note = phosphorothioate linkage
agttcttggtgctcttggctgttttagagctagaaatagcaagttaaaataaggctagtccgttatcaacttgaaaaagtggcaccgagtcggtgctttt

SEQ ID NO: 306 - RNA, 100 nt, synthetic construct
  source 1..100: mol_type = other RNA
  modified_base 1: mod_base = OTHER; note = 2'-O-methyl ribonucleotide
  modified_base 2: mod_base = OTHER; note = 2'-O-methyl ribonucleotide
  modified_base 3: mod_base = OTHER; note = 2'-O-methyl ribonucleotide
  modified_base 98: mod_base = OTHER; note = 2'-O-methyl ribonucleotide
  modified_base 99: mod_base = OTHER; note = 2'-O-methyl ribonucleotide
  modified_base 100: mod_base = OTHER; note = 2'-O-methyl ribonucleotide
  modified_base 1..4: mod_base = OTHER; note = phosphorothioate linkage
  modified_base 97..100: mod_base = OTHER; note = phosphorothioate linkage
atgatggtaagacactttgggttttagagctagaaatagcaagttaaaataaggctagtccgttatcaacttgaaaaagtggcaccgagtcggtgctttt

SEQ ID NO: 307 - RNA, 100 nt, synthetic construct
  source 1..100: mol_type = other RNA
  modified_base 1: mod_base = OTHER; note = 2'-O-methyl ribonucleotide
  modified_base 2: mod_base = OTHER; note = 2'-O-methyl ribonucleotide
  modified_base 3: mod_base = OTHER; note = 2'-O-methyl ribonucleotide
  modified_base 98: mod_base = OTHER; note = 2'-O-methyl ribonucleotide
  modified_base 99: mod_base = OTHER; note = 2'-O-methyl ribonucleotide
  modified_base 100: mod_base = OTHER; note = 2'-O-methyl ribonucleotide
  modified_base 1..4: mod_base = OTHER; note = phosphorothioate linkage
  modified_base 97..100: mod_base = OTHER; note = phosphorothioate linkage
gaagatagagaaatttctgtgttttagagctagaaatagcaagttaaaataaggctagtccgttatcaacttgaaaaagtggcaccgagtcggtgctttt

SEQ ID NO: 308 - RNA, 100 nt, synthetic construct
  source 1..100: mol_type = other RNA
  modified_base 1: mod_base = OTHER; note = 2'-O-methyl ribonucleotide
  modified_base 2: mod_base = OTHER; note = 2'-O-methyl ribonucleotide
  modified_base 3: mod_base = OTHER; note = 2'-O-methyl ribonucleotide
  modified_base 98: mod_base = OTHER; note = 2'-O-methyl ribonucleotide
  modified_base 99: mod_base = OTHER; note = 2'-O-methyl ribonucleotide
  modified_base 100: mod_base = OTHER; note = 2'-O-methyl ribonucleotide
  modified_base 1..4: mod_base = OTHER; note = phosphorothioate linkage
  modified_base 97..100: mod_base = OTHER; note = phosphorothioate linkage
ggaagatagagaaatttctggttttagagctagaaatagcaagttaaaataaggctagtccgttatcaacttgaaaaagtggcaccgagtcggtgctttt

SEQ ID NO: 309 - RNA, 100 nt, synthetic construct
  source 1..100: mol_type = other RNA
  modified_base 1: mod_base = OTHER; note = 2'-O-methyl ribonucleotide
  modified_base 2: mod_base = OTHER; note = 2'-O-methyl ribonucleotide
  modified_base 3: mod_base = OTHER; note = 2'-O-methyl ribonucleotide
  modified_base 98: mod_base = OTHER; note = 2'-O-methyl ribonucleotide
  modified_base 99: mod_base = OTHER; note = 2'-O-methyl ribonucleotide
  modified_base 100: mod_base = OTHER; note = 2'-O-methyl ribonucleotide
  modified_base 1..4: mod_base = OTHER; note = phosphorothioate linkage
  modified_base 97..100: mod_base = OTHER; note = phosphorothioate linkage
tatttcattcaactgaagaagttttagagctagaaatagcaagttaaaataaggctagtccgttatcaacttgaaaaagtggcaccgagtcggtgctttt

SEQ ID NO: 310 - RNA, 100 nt, synthetic construct
  source 1..100: mol_type = other RNA
  modified_base 1: mod_base = OTHER; note = 2'-O-methyl ribonucleotide
  modified_base 2: mod_base = OTHER; note = 2'-O-methyl ribonucleotide
  modified_base 3: mod_base = OTHER; note = 2'-O-methyl ribonucleotide
  modified_base 98: mod_base = OTHER; note = 2'-O-methyl ribonucleotide
  modified_base 99: mod_base = OTHER; note = 2'-O-methyl ribonucleotide
  modified_base 100: mod_base = OTHER; note = 2'-O-methyl ribonucleotide
  modified_base 1..4: mod_base = OTHER; note = phosphorothioate linkage
  modified_base 97..100: mod_base = OTHER; note = phosphorothioate linkage
atttcattcaactgaagaaagttttagagctagaaatagcaagttaaaataaggctagtccgttatcaacttgaaaaagtggcaccgagtcggtgctttt

SEQ ID NO: 311 - RNA, 100 nt, synthetic construct
  source 1..100: mol_type = other RNA
  modified_base 1: mod_base = OTHER; note = 2'-O-methyl ribonucleotide
  modified_base 2: mod_base = OTHER; note = 2'-O-methyl ribonucleotide
  modified_base 3: mod_base = OTHER; note = 2'-O-methyl ribonucleotide
  modified_base 98: mod_base = OTHER; note = 2'-O-methyl ribonucleotide
  modified_base 99: mod_base = OTHER; note = 2'-O-methyl ribonucleotide
  modified_base 100: mod_base = OTHER; note = 2'-O-methyl ribonucleotide
  modified_base 1..4: mod_base = OTHER; note = phosphorothioate linkage
  modified_base 97..100: mod_base = OTHER; note = phosphorothioate linkage
gtctactgtgatgttatatcgttttagagctagaaatagcaagttaaaataaggctagtccgttatcaacttgaaaaagtggcaccgagtcggtgctttt

SEQ ID NO: 312 - RNA, 100 nt, synthetic construct
  source 1..100: mol_type = other RNA
  modified_base 1: mod_base = OTHER; note = 2'-O-methyl ribonucleotide
  modified_base 2: mod_base = OTHER; note = 2'-O-methyl ribonucleotide
  modified_base 3: mod_base = OTHER; note = 2'-O-methyl ribonucleotide
  modified_base 98: mod_base = OTHER; note = 2'-O-methyl ribonucleotide
  modified_base 99: mod_base = OTHER; note = 2'-O-methyl ribonucleotide
  modified_base 100: mod_base = OTHER; note = 2'-O-methyl ribonucleotide
  modified_base 1..4: mod_base = OTHER; note = phosphorothioate linkage
  modified_base 97..100: mod_base = OTHER; note = phosphorothioate linkage
taaatggtggtacattcagcgttttagagctagaaatagcaagttaaaataaggctagtccgttatcaacttgaaaaagtggcaccgagtcggtgctttt

SEQ ID NO: 313 - RNA, 100 nt, synthetic construct
  source 1..100: mol_type = other RNA
  modified_base 1: mod_base = OTHER; note = 2'-O-methyl ribonucleotide
  modified_base 2: mod_base = OTHER; note = 2'-O-methyl ribonucleotide
  modified_base 3: mod_base = OTHER; note = 2'-O-methyl ribonucleotide
  modified_base 98: mod_base = OTHER; note = 2'-O-methyl ribonucleotide
  modified_base 99: mod_base = OTHER; note = 2'-O-methyl ribonucleotide
  modified_base 100: mod_base = OTHER; note = 2'-O-methyl ribonucleotide
  modified_base 1..4: mod_base = OTHER; note = phosphorothioate linkage
  modified_base 97..100: mod_base = OTHER; note = phosphorothioate linkage
tatcaggtaaaacctgtctagttttagagctagaaatagcaagttaaaataaggctagtccgttatcaacttgaaaaagtggcaccgagtcggtgctttt

SEQ ID NO: 314 - RNA, 100 nt, synthetic construct
  source 1..100: mol_type = other RNA
  modified_base 1: mod_base = OTHER; note = 2'-O-methyl ribonucleotide
  modified_base 2: mod_base = OTHER; note = 2'-O-methyl ribonucleotide
  modified_base 3: mod_base = OTHER; note = 2'-O-methyl ribonucleotide
  modified_base 98: mod_base = OTHER; note = 2'-O-methyl ribonucleotide
  modified_base 99: mod_base = OTHER; note = 2'-O-methyl ribonucleotide
  modified_base 100: mod_base = OTHER; note = 2'-O-methyl ribonucleotide
  modified_base 1..4: mod_base = OTHER; note = phosphorothioate linkage
  modified_base 97..100: mod_base = OTHER; note = phosphorothioate linkage
tgtaccaccatttataacaggttttagagctagaaatagcaagttaaaataaggctagtccgttatcaacttgaaaaagtggcaccgagtcggtgctttt

SEQ ID NO: 315 - RNA, 100 nt, synthetic construct
  source 1..100: mol_type = other RNA
  modified_base 1: mod_base = OTHER; note = 2'-O-methyl ribonucleotide
  modified_base 2: mod_base = OTHER; note = 2'-O-methyl ribonucleotide
  modified_base 3: mod_base = OTHER; note = 2'-O-methyl ribonucleotide
  modified_base 98: mod_base = OTHER; note = 2'-O-methyl ribonucleotide
  modified_base 99: mod_base = OTHER; note = 2'-O-methyl ribonucleotide
  modified_base 100: mod_base = OTHER; note = 2'-O-methyl ribonucleotide
  modified_base 1..4: mod_base = OTHER; note = phosphorothioate linkage
  modified_base 97..100: mod_base = OTHER; note = phosphorothioate linkage
ttcacctctgttataaatgggttttagagctagaaatagcaagttaaaataaggctagtccgttatcaacttgaaaaagtggcaccgagtcggtgctttt

SEQ ID NO: 316 - RNA, 100 nt, synthetic construct
  source 1..100: mol_type = other RNA
  modified_base 1: mod_base = OTHER; note = 2'-O-methyl ribonucleotide
  modified_base 2: mod_base = OTHER; note = 2'-O-methyl ribonucleotide
  modified_base 3: mod_base = OTHER; note = 2'-O-methyl ribonucleotide
  modified_base 98: mod_base = OTHER; note = 2'-O-methyl ribonucleotide
  modified_base 99: mod_base = OTHER; note = 2'-O-methyl ribonucleotide
  modified_base 100: mod_base = OTHER; note = 2'-O-methyl ribonucleotide
  modified_base 1..4: mod_base = OTHER; note = phosphorothioate linkage
  modified_base 97..100: mod_base = OTHER; note = phosphorothioate linkage
aacagaggtgaacatacaaggttttagagctagaaatagcaagttaaaataaggctagtccgttatcaacttgaaaaagtggcaccgagtcggtgctttt

SEQ ID NO: 317 - RNA, 100 nt, synthetic construct
  source 1..100: mol_type = other RNA
  modified_base 1: mod_base = OTHER; note = 2'-O-methyl ribonucleotide
  modified_base 2: mod_base = OTHER; note = 2'-O-methyl ribonucleotide
  modified_base 3: mod_base = OTHER; note = 2'-O-methyl ribonucleotide
  modified_base 98: mod_base = OTHER; note = 2'-O-methyl ribonucleotide
  modified_base 99: mod_base = OTHER; note = 2'-O-methyl ribonucleotide
  modified_base 100: mod_base = OTHER; note = 2'-O-methyl ribonucleotide
  modified_base 1..4: mod_base = OTHER; note = phosphorothioate linkage
  modified_base 97..100: mod_base = OTHER; note = phosphorothioate linkage
ttgagagttgctgggtctgagttttagagctagaaatagcaagttaaaataaggctagtccgttatcaacttgaaaaagtggcaccgagtcggtgctttt

SEQ ID NO: 318 - RNA, 100 nt, synthetic construct
  source 1..100: mol_type = other RNA
  modified_base 1: mod_base = OTHER; note = 2'-O-methyl ribonucleotide
  modified_base 2: mod_base = OTHER; note = 2'-O-methyl ribonucleotide
  modified_base 3: mod_base = OTHER; note = 2'-O-methyl ribonucleotide
  modified_base 98: mod_base = OTHER; note = 2'-O-methyl ribonucleotide
  modified_base 99: mod_base = OTHER; note = 2'-O-methyl ribonucleotide
  modified_base 100: mod_base = OTHER; note = 2'-O-methyl ribonucleotide
  modified_base 1..4: mod_base = OTHER; note = phosphorothioate linkage
  modified_base 97..100: mod_base = OTHER; note = phosphorothioate linkage
tgaaaaacttgagagttgctgttttagagctagaaatagcaagttaaaataaggctagtccgttatcaacttgaaaaagtggcaccgagtcggtgctttt

SEQ ID NO: 319 - RNA, 100 nt, synthetic construct
  source 1..100: mol_type = other RNA
  modified_base 1: mod_base = OTHER; note = 2'-O-methyl ribonucleotide
  modified_base 2: mod_base = OTHER; note = 2'-O-methyl ribonucleotide
  modified_base 3: mod_base = OTHER; note = 2'-O-methyl ribonucleotide
  modified_base 98: mod_base = OTHER; note = 2'-O-methyl ribonucleotide
  modified_base 99: mod_base = OTHER; note = 2'-O-methyl ribonucleotide
  modified_base 100: mod_base = OTHER; note = 2'-O-methyl ribonucleotide
  modified_base 1..4: mod_base = OTHER; note = phosphorothioate linkage
  modified_base 97..100: mod_base = OTHER; note = phosphorothioate linkage
ttaattcaacatcgaatagagttttagagctagaaatagcaagttaaaataaggctagtccgttatcaacttgaaaaagtggcaccgagtcggtgctttt

SEQ ID NO: 320 - RNA, 100 nt, synthetic construct
  source 1..100: mol_type = other RNA
  modified_base 1: mod_base = OTHER; note = 2'-O-methyl ribonucleotide
  modified_base 2: mod_base = OTHER; note = 2'-O-methyl ribonucleotide
  modified_base 3: mod_base = OTHER; note = 2'-O-methyl ribonucleotide
  modified_base 98: mod_base = OTHER; note = 2'-O-methyl ribonucleotide
  modified_base 99: mod_base = OTHER; note = 2'-O-methyl ribonucleotide
  modified_base 100: mod_base = OTHER; note = 2'-O-methyl ribonucleotide
  modified_base 1..4: mod_base = OTHER; note = phosphorothioate linkage
  modified_base 97..100: mod_base = OTHER; note = phosphorothioate linkage
tttgggaggcttgatggtaagttttagagctagaaatagcaagttaaaataaggctagtccgttatcaacttgaaaaagtggcaccgagtcggtgctttt

SEQ ID NO: 321 - RNA, 100 nt, synthetic construct
  source 1..100: mol_type = other RNA
  modified_base 1: mod_base = OTHER; note = 2'-O-methyl ribonucleotide
  modified_base 2: mod_base = OTHER; note = 2'-O-methyl ribonucleotide
  modified_base 3: mod_base = OTHER; note = 2'-O-methyl ribonucleotide
  modified_base 98: mod_base = OTHER; note = 2'-O-methyl ribonucleotide
  modified_base 99: mod_base = OTHER; note = 2'-O-methyl ribonucleotide
  modified_base 100: mod_base = OTHER; note = 2'-O-methyl ribonucleotide
  modified_base 1..4: mod_base = OTHER; note = phosphorothioate linkage
  modified_base 97..100: mod_base = OTHER; note = phosphorothioate linkage
cattatattcaggtagtccagttttagagctagaaatagcaagttaaaataaggctagtccgttatcaacttgaaaaagtggcaccgagtcggtgctttt

SEQ ID NO: 322 - RNA, 100 nt, synthetic construct
  source 1..100: mol_type = other RNA
  modified_base 1: mod_base = OTHER; note = 2'-O-methyl ribonucleotide
  modified_base 2: mod_base = OTHER; note = 2'-O-methyl ribonucleotide
  modified_base 3: mod_base = OTHER; note = 2'-O-methyl ribonucleotide
  modified_base 98: mod_base = OTHER; note = 2'-O-methyl ribonucleotide
  modified_base 99: mod_base = OTHER; note = 2'-O-methyl ribonucleotide
  modified_base 100: mod_base = OTHER; note = 2'-O-methyl ribonucleotide
  modified_base 1..4: mod_base = OTHER; note = phosphorothioate linkage
  modified_base 97..100: mod_base = OTHER; note = phosphorothioate linkage
ttgggaggcttgatggtaaggttttagagctagaaatagcaagttaaaataaggctagtccgttatcaacttgaaaaagtggcaccgagtcggtgctttt

SEQ ID NO: 323 - RNA, 100 nt, synthetic construct
  source 1..100: mol_type = other RNA
  modified_base 1: mod_base = OTHER; note = 2'-O-methyl ribonucleotide
  modified_base 2: mod_base = OTHER; note = 2'-O-methyl ribonucleotide
  modified_base 3: mod_base = OTHER; note = 2'-O-methyl ribonucleotide
  modified_base 98: mod_base = OTHER; note = 2'-O-methyl ribonucleotide
  modified_base 99: mod_base = OTHER; note = 2'-O-methyl ribonucleotide
  modified_base 100: mod_base = OTHER; note = 2'-O-methyl ribonucleotide
  modified_base 1..4: mod_base = OTHER; note = phosphorothioate linkage
  modified_base 97..100: mod_base = OTHER; note = phosphorothioate linkage
ttttgggaggcttgatggtagttttagagctagaaatagcaagttaaaataaggctagtccgttatcaacttgaaaaagtggcaccgagtcggtgctttt

SEQ ID NO: 324 - RNA, 100 nt, synthetic construct
  source 1..100: mol_type = other RNA
  modified_base 1: mod_base = OTHER; note = 2'-O-methyl ribonucleotide
  modified_base 2: mod_base = OTHER; note = 2'-O-methyl ribonucleotide
  modified_base 3: mod_base = OTHER; note = 2'-O-methyl ribonucleotide
  modified_base 98: mod_base = OTHER; note = 2'-O-methyl ribonucleotide
  modified_base 99: mod_base = OTHER; note = 2'-O-methyl ribonucleotide
  modified_base 100: mod_base = OTHER; note = 2'-O-methyl ribonucleotide
  modified_base 1..4: mod_base = OTHER; note = phosphorothioate linkage
  modified_base 97..100: mod_base = OTHER; note = phosphorothioate linkage
acaaaacttcaatgaaacgtgttttagagctagaaatagcaagttaaaataaggctagtccgttatcaacttgaaaaagtggcaccgagtcggtgctttt

SEQ ID NO: 325 - RNA, 100 nt, synthetic construct
  source 1..100: mol_type = other RNA
  modified_base 1: mod_base = OTHER; note = 2'-O-methyl ribonucleotide
  modified_base 2: mod_base = OTHER; note = 2'-O-methyl ribonucleotide
  modified_base 3: mod_base = OTHER; note = 2'-O-methyl ribonucleotide
  modified_base 98: mod_base = OTHER; note = 2'-O-methyl ribonucleotide
  modified_base 99: mod_base = OTHER; note = 2'-O-methyl ribonucleotide
  modified_base 100: mod_base = OTHER; note = 2'-O-methyl ribonucleotide
  modified_base 1..4: mod_base = OTHER; note = phosphorothioate linkage
  modified_base 97..100: mod_base = OTHER; note = phosphorothioate linkage
tatggttttgggaggcttgagttttagagctagaaatagcaagttaaaataaggctagtccgttatcaacttgaaaaagtggcaccgagtcggtgctttt

SEQ ID NO: 326 - RNA, 100 nt, synthetic construct
  source 1..100: mol_type = other RNA
  modified_base 1: mod_base = OTHER; note = 2'-O-methyl ribonucleotide
  modified_base 2: mod_base = OTHER; note = 2'-O-methyl ribonucleotide
  modified_base 3: mod_base = OTHER; note = 2'-O-methyl ribonucleotide
  modified_base 98: mod_base = OTHER; note = 2'-O-methyl ribonucleotide
  modified_base 99: mod_base = OTHER; note = 2'-O-methyl ribonucleotide
  modified_base 100: mod_base = OTHER; note = 2'-O-methyl ribonucleotide
  modified_base 1..4: mod_base = OTHER; note = phosphorothioate linkage
  modified_base 97..100: mod_base = OTHER; note = phosphorothioate linkage
actacaaatatggttttggggttttagagctagaaatagcaagttaaaataaggctagtccgttatcaacttgaaaaagtggcaccgagtcggtgctttt

SEQ ID NO: 327 - RNA, 100 nt, synthetic construct
  source 1..100: mol_type = other RNA
  modified_base 1: mod_base = OTHER; note = 2'-O-methyl ribonucleotide
  modified_base 2: mod_base = OTHER; note = 2'-O-methyl ribonucleotide
  modified_base 3: mod_base = OTHER; note = 2'-O-methyl ribonucleotide
  modified_base 98: mod_base = OTHER; note = 2'-O-methyl ribonucleotide
  modified_base 99: mod_base = OTHER; note = 2'-O-methyl ribonucleotide
  modified_base 100: mod_base = OTHER; note = 2'-O-methyl ribonucleotide
  modified_base 1..4: mod_base = OTHER; note = phosphorothioate linkage
  modified_base 97..100: mod_base = OTHER; note = phosphorothioate linkage
gagaactacaaatatggtttgttttagagctagaaatagcaagttaaaataaggctagtccgttatcaacttgaaaaagtggcaccgagtcggtgctttt

SEQ ID NO: 328 - RNA, 100 nt, synthetic construct
  source 1..100: mol_type = other RNA
  modified_base 1: mod_base = OTHER; note = 2'-O-methyl ribonucleotide
  modified_base 2: mod_base = OTHER; note = 2'-O-methyl ribonucleotide
  modified_base 3: mod_base = OTHER; note = 2'-O-methyl ribonucleotide
  modified_base 98: mod_base = OTHER; note = 2'-O-methyl ribonucleotide
  modified_base 99: mod_base = OTHER; note = 2'-O-methyl ribonucleotide
  modified_base 100: mod_base = OTHER; note = 2'-O-methyl ribonucleotide
  modified_base 1..4: mod_base = OTHER; note = phosphorothioate linkage
  modified_base 97..100: mod_base = OTHER; note = phosphorothioate linkage
aggacacttcaactgtccaggttttagagctagaaatagcaagttaaaataaggctagtccgttatcaacttgaaaaagtggcaccgagtcggtgctttt

SEQ ID NO: 329 - RNA, 100 nt, synthetic construct
  source 1..100: mol_type = other RNA
  modified_base 1: mod_base = OTHER; note = 2'-O-methyl ribonucleotide
  modified_base 2: mod_base = OTHER; note = 2'-O-methyl ribonucleotide
  modified_base 3: mod_base = OTHER; note = 2'-O-methyl ribonucleotide
  modified_base 98: mod_base = OTHER; note = 2'-O-methyl ribonucleotide
  modified_base 99: mod_base = OTHER; note = 2'-O-methyl ribonucleotide
  modified_base 100: mod_base = OTHER; note = 2'-O-methyl ribonucleotide
  modified_base 1..4: mod_base = OTHER; note = phosphorothioate linkage
  modified_base 97..100: mod_base = OTHER; note = phosphorothioate linkage
gccgtcctcctcggaacgcagttttagagctagaaatagcaagttaaaataaggctagtccgttatcaacttgaaaaagtggcaccgagtcggtgctttt

SEQ ID NO: 330 - RNA, 100 nt, synthetic construct
  source 1..100: mol_type = other RNA
  modified_base 1: mod_base = OTHER; note = 2'-O-methyl ribonucleotide
  modified_base 2: mod_base = OTHER; note = 2'-O-methyl ribonucleotide
  modified_base 3: mod_base = OTHER; note = 2'-O-methyl ribonucleotide
  modified_base 98: mod_base = OTHER; note = 2'-O-methyl ribonucleotide
  modified_base 99: mod_base = OTHER; note = 2'-O-methyl ribonucleotide
  modified_base 100: mod_base = OTHER; note = 2'-O-methyl ribonucleotide
  modified_base 1..4: mod_base = OTHER; note = phosphorothioate linkage
  modified_base 97..100: mod_base = OTHER; note = phosphorothioate linkage
gctagccttgcgttccgagggttttagagctagaaatagcaagttaaaataaggctagtccgttatcaacttgaaaaagtggcaccgagtcggtgctttt

SEQ ID NO: 331 - RNA, 100 nt, synthetic construct
  source 1..100: mol_type = other RNA
  modified_base 1: mod_base = OTHER; note = 2'-O-methyl ribonucleotide
  modified_base 2: mod_base = OTHER; note = 2'-O-methyl ribonucleotide
  modified_base 3: mod_base = OTHER; note = 2'-O-methyl ribonucleotide
  modified_base 98: mod_base = OTHER; note = 2'-O-methyl ribonucleotide
  modified_base 99: mod_base = OTHER; note = 2'-O-methyl ribonucleotide
  modified_base 100: mod_base = OTHER; note = 2'-O-methyl ribonucleotide
  modified_base 1..4: mod_base = OTHER; note = phosphorothioate linkage
  modified_base 97..100: mod_base = OTHER; note = phosphorothioate linkage
gcgttccgaggaggacggccgttttagagctagaaatagcaagttaaaataaggctagtccgttatcaacttgaaaaagtggcaccgagtcggtgctttt

SEQ ID NO: 332 - RNA, 100 nt, synthetic construct
  source 1..100: mol_type = other RNA
  modified_base 1: mod_base = OTHER; note = 2'-O-methyl ribonucleotide
  modified_base 2: mod_base = OTHER; note = 2'-O-methyl ribonucleotide
  modified_base 3: mod_base = OTHER; note = 2'-O-methyl ribonucleotide
  modified_base 98: mod_base = OTHER; note = 2'-O-methyl ribonucleotide
  modified_base 99: mod_base = OTHER; note = 2'-O-methyl ribonucleotide
  modified_base 100: mod_base = OTHER; note = 2'-O-methyl ribonucleotide
  modified_base 1..4: mod_base = OTHER; note = phosphorothioate linkage
  modified_base 97..100: mod_base = OTHER; note = phosphorothioate linkage
gccttgcgttccgaggaggagttttagagctagaaatagcaagttaaaataaggctagtccgttatcaacttgaaaaagtggcaccgagtcggtgctttt

SEQ ID NO: 333 - RNA, 100 nt, synthetic construct
  source 1..100: mol_type = other RNA
  modified_base 1: mod_base = OTHER; note = 2'-O-methyl ribonucleotide
  modified_base 2: mod_base = OTHER; note = 2'-O-methyl ribonucleotide
  modified_base 3: mod_base = OTHER; note = 2'-O-methyl ribonucleotide
  modified_base 98: mod_base = OTHER; note = 2'-O-methyl ribonucleotide
  modified_base 99: mod_base = OTHER; note = 2'-O-methyl ribonucleotide
  modified_base 100: mod_base = OTHER; note = 2'-O-methyl ribonucleotide
  modified_base 1..4: mod_base = OTHER; note = phosphorothioate linkage
  modified_base 97..100: mod_base = OTHER; note = phosphorothioate linkage
ggacgaggacggcgactacggttttagagctagaaatagcaagttaaaataaggctagtccgttatcaacttgaaaaagtggcaccgagtcggtgctttt

SEQ ID NO: 334 - RNA, 100 nt, synthetic construct
  source 1..100: mol_type = other RNA
  modified_base 1: mod_base = OTHER; note = 2'-O-methyl ribonucleotide
  modified_base 2: mod_base = OTHER; note = 2'-O-methyl ribonucleotide
  modified_base 3: mod_base = OTHER; note = 2'-O-methyl ribonucleotide
  modified_base 98: mod_base = OTHER; note = 2'-O-methyl ribonucleotide
  modified_base 99: mod_base = OTHER; note = 2'-O-methyl ribonucleotide
  modified_base 100: mod_base = OTHER; note = 2'-O-methyl ribonucleotide
  modified_base 1..4: mod_base = OTHER; note = phosphorothioate linkage
  modified_base 97..100: mod_base = OTHER; note = phosphorothioate linkage
ggacggcgactacgaggagcgttttagagctagaaatagcaagttaaaataaggctagtccgttatcaacttgaaaaagtggcaccgagtcggtgctttt

SEQ ID NO: 335 - RNA, 100 nt, synthetic construct
  source 1..100: mol_type = other RNA
  modified_base 1: mod_base = OTHER; note = 2'-O-methyl ribonucleotide
  modified_base 2: mod_base = OTHER; note = 2'-O-methyl ribonucleotide
  modified_base 3: mod_base = OTHER; note = 2'-O-methyl ribonucleotide
  modified_base 98: mod_base = OTHER; note = 2'-O-methyl ribonucleotide
  modified_base 99: mod_base = OTHER; note = 2'-O-methyl ribonucleotide
  modified_base 100: mod_base = OTHER; note = 2'-O-methyl ribonucleotide
  modified_base 1..4: mod_base = OTHER; note = phosphorothioate linkage
  modified_base 97..100: mod_base = OTHER; note = phosphorothioate linkage
cgtcctcgtcctcctgcgcagttttagagctagaaatagcaagttaaaataaggctagtccgttatcaacttgaaaaagtggcaccgagtcggtgctttt

SEQ ID NO: 336 - RNA, 100 nt, synthetic construct
  source 1..100: mol_type = other RNA
  modified_base 1: mod_base = OTHER; note = 2'-O-methyl ribonucleotide
  modified_base 2: mod_base = OTHER; note = 2'-O-methyl ribonucleotide
  modified_base 3: mod_base = OTHER; note = 2'-O-methyl ribonucleotide
  modified_base 98: mod_base = OTHER; note = 2'-O-methyl ribonucleotide
  modified_base 99: mod_base = OTHER; note = 2'-O-methyl ribonucleotide
  modified_base 100: mod_base = OTHER; note = 2'-O-methyl ribonucleotide
  modified_base 1..4: mod_base = OTHER; note = phosphorothioate linkage
  modified_base 97..100: mod_base = OTHER; note = phosphorothioate linkage
gtcctcgtcctcctgcgcacgttttagagctagaaatagcaagttaaaataaggctagtccgttatcaacttgaaaaagtggcaccgagtcggtgctttt

SEQ ID NO: 337 - RNA, 100 nt, synthetic construct
  source 1..100: mol_type = other RNA
  modified_base 1: mod_base = OTHER; note = 2'-O-methyl ribonucleotide
  modified_base 2: mod_base = OTHER; note = 2'-O-methyl ribonucleotide
  modified_base 3: mod_base = OTHER; note = 2'-O-methyl ribonucleotide
  modified_base 98: mod_base = OTHER; note = 2'-O-methyl ribonucleotide
  modified_base 99: mod_base = OTHER; note = 2'-O-methyl ribonucleotide
  modified_base 100: mod_base = OTHER; note = 2'-O-methyl ribonucleotide
  modified_base 1..4: mod_base = OTHER; note = phosphorothioate linkage
  modified_base 97..100: mod_base = OTHER; note = phosphorothioate linkage
ccgtcagctccaggcggtccgttttagagctagaaatagcaagttaaaataaggctagtccgttatcaacttgaaaaagtggcaccgagtcggtgctttt

SEQ ID NO: 338 - RNA, 100 nt, synthetic construct
  source 1..100: mol_type = other RNA
  modified_base 1: mod_base = OTHER; note = 2'-O-methyl ribonucleotide
  modified_base 2: mod_base = OTHER; note = 2'-O-methyl ribonucleotide
  modified_base 3: mod_base = OTHER; note = 2'-O-methyl ribonucleotide
  modified_base 98: mod_base = OTHER; note = 2'-O-methyl ribonucleotide
  modified_base 99: mod_base = OTHER; note = 2'-O-methyl ribonucleotide
  modified_base 100: mod_base = OTHER; note = 2'-O-methyl ribonucleotide
  modified_base 1..4: mod_base = OTHER; note = phosphorothioate linkage
  modified_base 97..100: mod_base = OTHER; note = phosphorothioate linkage
cgcccgtgcgcaggaggacggttttagagctagaaatagcaagttaaaataaggctagtccgttatcaacttgaaaaagtggcaccgagtcggtgctttt

SEQ ID NO: 339 - RNA, 100 nt, synthetic construct
  source 1..100: mol_type = other RNA
  modified_base 1: mod_base = OTHER; note = 2'-O-methyl ribonucleotide
  modified_base 2: mod_base = OTHER; note = 2'-O-methyl ribonucleotide
  modified_base 3: mod_base = OTHER; note = 2'-O-methyl ribonucleotide
  modified_base 98: mod_base = OTHER; note = 2'-O-methyl ribonucleotide
  modified_base 99: mod_base = OTHER; note = 2'-O-methyl ribonucleotide
  modified_base 100: mod_base = OTHER; note = 2'-O-methyl ribonucleotide
  modified_base 1..4: mod_base = OTHER; note = phosphorothioate linkage
  modified_base 97..100: mod_base = OTHER; note = phosphorothioate linkage
tcagctccaggcggtcctgggttttagagctagaaatagcaagttaaaataaggctagtccgttatcaacttgaaaaagtggcaccgagtcggtgctttt

SEQ ID NO: 340 - RNA, 100 nt, synthetic construct
  source 1..100: mol_type = other RNA
  modified_base 1: mod_base = OTHER; note = 2'-O-methyl ribonucleotide
  modified_base 2: mod_base = OTHER; note = 2'-O-methyl ribonucleotide
  modified_base 3: mod_base = OTHER; note = 2'-O-methyl ribonucleotide
  modified_base 98: mod_base = OTHER; note = 2'-O-methyl ribonucleotide
  modified_base 99: mod_base = OTHER; note = 2'-O-methyl ribonucleotide
  modified_base 100: mod_base = OTHER; note = 2'-O-methyl ribonucleotide
  modified_base 1..4: mod_base = OTHER; note = phosphorothioate linkage
  modified_base 97..100: mod_base = OTHER; note = phosphorothioate linkage
cttggcgcagcggtggaagggttttagagctagaaatagcaagttaaaataaggctagtccgttatcaacttgaaaaagtggcaccgagtcggtgctttt

SEQ ID NO: 341 - RNA, 100 nt, synthetic construct
  source 1..100: mol_type = other RNA
  modified_base 1: mod_base = OTHER; note = 2'-O-methyl ribonucleotide
  modified_base 2: mod_base = OTHER; note = 2'-O-methyl ribonucleotide
  modified_base 3: mod_base = OTHER; note = 2'-O-methyl ribonucleotide
  modified_base 98: mod_base = OTHER; note = 2'-O-methyl ribonucleotide
  modified_base 99: mod_base = OTHER; note = 2'-O-methyl ribonucleotide
  modified_base 100: mod_base = OTHER; note = 2'-O-methyl ribonucleotide
  modified_base 1..4: mod_base = OTHER; note = phosphorothioate linkage
  modified_base 97..100: mod_base = OTHER; note = phosphorothioate linkage
cgtgcgcaggaggacgaggagttttagagctagaaatagcaagttaaaataaggctagtccgttatcaacttgaaaaagtggcaccgagtcggtgctttt

SEQ ID NO: 342 - RNA, 100 nt, synthetic construct
  source 1..100: mol_type = other RNA
  modified_base 1: mod_base = OTHER; note = 2'-O-methyl ribonucleotide
  modified_base 2: mod_base = OTHER; note = 2'-O-methyl ribonucleotide
  modified_base 3: mod_base = OTHER; note = 2'-O-methyl ribonucleotide
  modified_base 98: mod_base = OTHER; note = 2'-O-methyl ribonucleotide
  modified_base 99: mod_base = OTHER; note = 2'-O-methyl ribonucleotide
  modified_base 100: mod_base = OTHER; note = 2'-O-methyl ribonucleotide
  modified_base 1..4: mod_base = OTHER; note = phosphorothioate linkage
  modified_base 97..100: mod_base = OTHER; note = phosphorothioate linkage
ccaggaccgcctggagctgagttttagagctagaaatagcaagttaaaataaggctagtccgttatcaacttgaaaaagtggcaccgagtcggtgctttt

SEQ ID NO: 343 - RNA, 100 nt, synthetic construct
  source 1..100: mol_type = other RNA
  modified_base 1: mod_base = OTHER; note = 2'-O-methyl ribonucleotide
  modified_base 2: mod_base = OTHER; note = 2'-O-methyl ribonucleotide
  modified_base 3: mod_base = OTHER; note = 2'-O-methyl ribonucleotide
  modified_base 98: mod_base = OTHER; note = 2'-O-methyl ribonucleotide
  modified_base 99: mod_base = OTHER; note = 2'-O-methyl ribonucleotide
  modified_base 100: mod_base = OTHER; note = 2'-O-methyl ribonucleotide
  modified_base 1..4: mod_base = OTHER; note = phosphorothioate linkage
  modified_base 97..100: mod_base = OTHER; note = phosphorothioate linkage
tcttggtgaggtatccccgggttttagagctagaaatagcaagttaaaataaggctagtccgttatcaacttgaaaaagtggcaccgagtcggtgctttt

SEQ ID NO: 344 - RNA, 100 nt, synthetic construct
  source 1..100: mol_type = other RNA
  modified_base 1: mod_base = OTHER; note = 2'-O-methyl ribonucleotide
  modified_base 2: mod_base = OTHER; note = 2'-O-methyl ribonucleotide
  modified_base 3: mod_base = OTHER; note = 2'-O-methyl ribonucleotide
  modified_base 98: mod_base = OTHER; note = 2'-O-methyl ribonucleotide
  modified_base 99: mod_base = OTHER; note = 2'-O-methyl ribonucleotide
  modified_base 100: mod_base = OTHER; note = 2'-O-methyl ribonucleotide
  modified_base 1..4: mod_base = OTHER; note = phosphorothioate linkage
  modified_base 97..100: mod_base = OTHER; note = phosphorothioate linkage
cagtgcgctctgactgcgaggttttagagctagaaatagcaagttaaaataaggctagtccgttatcaacttgaaaaagtggcaccgagtcggtgctttt

SEQ ID NO: 345 - RNA, 100 nt, synthetic construct
  source 1..100: mol_type = other RNA
  modified_base 1: mod_base = OTHER; note = 2'-O-methyl ribonucleotide
  modified_base 2: mod_base = OTHER; note = 2'-O-methyl ribonucleotide
  modified_base 3: mod_base = OTHER; note = 2'-O-methyl ribonucleotide
  modified_base 98: mod_base = OTHER; note = 2'-O-methyl ribonucleotide
  modified_base 99: mod_base = OTHER; note = 2'-O-methyl ribonucleotide
  modified_base 100: mod_base = OTHER; note = 2'-O-methyl ribonucleotide
  modified_base 1..4: mod_base = OTHER; note = phosphorothioate linkage
  modified_base 97..100: mod_base = OTHER; note = phosphorothioate linkage
cttggtgaggtatccccggcgttttagagctagaaatagcaagttaaaataaggctagtccgttatcaacttgaaaaagtggcaccgagtcggtgctttt

SEQ ID NO: 346 - RNA, 100 nt, synthetic construct
  source 1..100: mol_type = other RNA
  modified_base 1: mod_base = OTHER; note = 2'-O-methyl ribonucleotide
  modified_base 2: mod_base = OTHER; note = 2'-O-methyl ribonucleotide
  modified_base 3: mod_base = OTHER; note = 2'-O-methyl ribonucleotide
  modified_base 98: mod_base = OTHER; note = 2'-O-methyl ribonucleotide
  modified_base 99: mod_base = OTHER; note = 2'-O-methyl ribonucleotide
  modified_base 100: mod_base = OTHER; note = 2'-O-methyl ribonucleotide
  modified_base 1..4: mod_base = OTHER; note = phosphorothioate linkage
  modified_base 97..100: mod_base = OTHER; note = phosphorothioate linkage
ggatcttggtgaggtatcccgttttagagctagaaatagcaagttaaaataaggctagtccgttatcaacttgaaaaagtggcaccgagtcggtgctttt

SEQ ID NO: 347 - RNA, 100 nt, synthetic construct
  source 1..100: mol_type = other RNA
  modified_base 1: mod_base = OTHER; note = 2'-O-methyl ribonucleotide
  modified_base 2: mod_base = OTHER; note = 2'-O-methyl ribonucleotide
  modified_base 3: mod_base = OTHER; note = 2'-O-methyl ribonucleotide
  modified_base 98: mod_base = OTHER; note = 2'-O-methyl ribonucleotide
  modified_base 99: mod_base = OTHER; note = 2'-O-methyl ribonucleotide
  modified_base 100: mod_base = OTHER; note = 2'-O-methyl ribonucleotide
  modified_base 1..4: mod_base = OTHER; note = phosphorothioate linkage
  modified_base 97..100: mod_base = OTHER; note = phosphorothioate linkage
gaagatgagtggcgacctgcgttttagagctagaaatagcaagttaaaataaggctagtccgttatcaacttgaaaaagtggcaccgagtcggtgctttt

SEQ ID NO: 348 - RNA, 100 nt, synthetic construct
  source 1..100: mol_type = other RNA
  modified_base 1: mod_base = OTHER; note = 2'-O-methyl ribonucleotide
  modified_base 2: mod_base = OTHER; note = 2'-O-methyl ribonucleotide
  modified_base 3: mod_base = OTHER; note = 2'-O-methyl ribonucleotide
  modified_base 98: mod_base = OTHER; note = 2'-O-methyl ribonucleotide
  modified_base 99: mod_base = OTHER; note = 2'-O-methyl ribonucleotide
  modified_base 100: mod_base = OTHER; note = 2'-O-methyl ribonucleotide
  modified_base 1..4: mod_base = OTHER; note = phosphorothioate linkage
  modified_base 97..100: mod_base = OTHER; note = phosphorothioate linkage
agcaccaccacgtaggtgccgttttagagctagaaatagcaagttaaaataaggctagtccgttatcaacttgaaaaagtggcaccgagtcggtgctttt

SEQ ID NO: 349 - RNA, 100 nt, synthetic construct
  source 1..100: mol_type = other RNA
  modified_base 1: mod_base = OTHER; note = 2'-O-methyl ribonucleotide
  modified_base 2: mod_base = OTHER; note = 2'-O-methyl ribonucleotide
  modified_base 3: mod_base = OTHER; note = 2'-O-methyl ribonucleotide
  modified_base 98: mod_base = OTHER; note = 2'-O-methyl ribonucleotide
  modified_base 99: mod_base = OTHER; note = 2'-O-methyl ribonucleotide
  modified_base 100: mod_base = OTHER; note = 2'-O-methyl ribonucleotide
  modified_base 1..4: mod_base = OTHER; note = phosphorothioate linkage
  modified_base 97..100: mod_base = OTHER; note = phosphorothioate linkage
ggtcgccactcatcttcaccgttttagagctagaaatagcaagttaaaataaggctagtccgttatcaacttgaaaaagtggcaccgagtcggtgctttt

SEQ ID NO: 350 - RNA, 100 nt, synthetic construct
  source 1..100: mol_type = other RNA
  modified_base 1: mod_base = OTHER; note = 2'-O-methyl ribonucleotide
  modified_base 2: mod_base = OTHER; note = 2'-O-methyl ribonucleotide
  modified_base 3: mod_base = OTHER; note = 2'-O-methyl ribonucleotide
  modified_base 98: mod_base = OTHER; note = 2'-O-methyl ribonucleotide
  modified_base 99: mod_base = OTHER; note = 2'-O-methyl ribonucleotide
  modified_base 100: mod_base = OTHER; note = 2'-O-methyl ribonucleotide
  modified_base 1..4: mod_base = OTHER; note = phosphorothioate linkage
  modified_base 97..100: mod_base = OTHER; note = phosphorothioate linkage
ctccttcagcaccaccacgtgttttagagctagaaatagcaagttaaaataaggctagtccgttatcaacttgaaaaagtggcaccgagtcggtgctttt

SEQ ID NO: 351 - RNA, 100 nt, synthetic construct
  source 1..100: mol_type = other RNA
  modified_base 1: mod_base = OTHER; note = 2'-O-methyl ribonucleotide
  modified_base 2: mod_base = OTHER; note = 2'-O-methyl ribonucleotide
  modified_base 3: mod_base = OTHER; note = 2'-O-methyl ribonucleotide
  modified_base 98: mod_base = OTHER; note = 2'-O-methyl ribonucleotide
  modified_base 99: mod_base = OTHER; note = 2'-O-methyl ribonucleotide
  modified_base 100: mod_base = OTHER; note = 2'-O-methyl ribonucleotide
  modified_base 1..4: mod_base = OTHER; note = phosphorothioate linkage
  modified_base 97..100: mod_base = OTHER; note = phosphorothioate linkage
gagtggcgacctgctggagcgttttagagctagaaatagcaagttaaaataaggctagtccgttatcaacttgaaaaagtggcaccgagtcggtgctttt

SEQ ID NO: 352 - RNA, 100 nt, synthetic construct
  source 1..100: mol_type = other RNA
  modified_base 1: mod_base = OTHER; note = 2'-O-methyl ribonucleotide
  modified_base 2: mod_base = OTHER; note = 2'-O-methyl ribonucleotide
  modified_base 3: mod_base = OTHER; note = 2'-O-methyl ribonucleotide
  modified_base 98: mod_base = OTHER; note = 2'-O-methyl ribonucleotide
  modified_base 99: mod_base = OTHER; note = 2'-O-methyl ribonucleotide
  modified_base 100: mod_base = OTHER; note = 2'-O-methyl ribonucleotide
  modified_base 1..4: mod_base = OTHER; note = phosphorothioate linkage
  modified_base 97..100: mod_base = OTHER; note = phosphorothioate linkage
gcgcactgcccgccgcctgcgttttagagctagaaatagcaagttaaaataaggctagtccgttatcaacttgaaaaagtggcaccgagtcggtgctttt

SEQ ID NO: 353 - RNA, 100 nt, synthetic construct
  source 1..100: mol_type = other RNA
  modified_base 1: mod_base = OTHER; note = 2'-O-methyl ribonucleotide
  modified_base 2: mod_base = OTHER; note = 2'-O-methyl ribonucleotide
  modified_base 3: mod_base = OTHER; note = 2'-O-methyl ribonucleotide
  modified_base 98: mod_base = OTHER; note = 2'-O-methyl ribonucleotide
  modified_base 99: mod_base = OTHER; note = 2'-O-methyl ribonucleotide
  modified_base 100: mod_base = OTHER; note = 2'-O-methyl ribonucleotide
  modified_base 1..4: mod_base = OTHER; note = phosphorothioate linkage
  modified_base 97..100: mod_base = OTHER; note = phosphorothioate linkage
ggcttcctggtgaagatgaggttttagagctagaaatagcaagttaaaataaggctagtccgttatcaacttgaaaaagtggcaccgagtcggtgctttt

SEQ ID NO: 354 - RNA, 100 nt, synthetic construct
  source 1..100: mol_type = other RNA
  modified_base 1: mod_base = OTHER; note = 2'-O-methyl ribonucleotide
  modified_base 2: mod_base = OTHER; note = 2'-O-methyl ribonucleotide
  modified_base 3: mod_base = OTHER; note = 2'-O-methyl ribonucleotide
  modified_base 98: mod_base = OTHER; note = 2'-O-methyl ribonucleotide
  modified_base 99: mod_base = OTHER; note = 2'-O-methyl ribonucleotide
  modified_base 100: mod_base = OTHER; note = 2'-O-methyl ribonucleotide
  modified_base 1..4: mod_base = OTHER; note = phosphorothioate linkage
  modified_base 97..100: mod_base = OTHER; note = phosphorothioate linkage
cacctacgtggtggtgctgagttttagagctagaaatagcaagttaaaataaggctagtccgttatcaacttgaaaaagtggcaccgagtcggtgctttt

SEQ ID NO: 355 - RNA, 100 nt, synthetic construct
  source 1..100: mol_type = other RNA
  modified_base 1: mod_base = OTHER; note = 2'-O-methyl ribonucleotide
  modified_base 2: mod_base = OTHER; note = 2'-O-methyl ribonucleotide
  modified_base 3: mod_base = OTHER; note = 2'-O-methyl ribonucleotide
  modified_base 98: mod_base = OTHER; note = 2'-O-methyl ribonucleotide
  modified_base 99: mod_base = OTHER; note = 2'-O-methyl ribonucleotide
  modified_base 100: mod_base = OTHER; note = 2'-O-methyl ribonucleotide
  modified_base 1..4: mod_base = OTHER; note = phosphorothioate linkage
  modified_base 97..100: mod_base = OTHER; note = phosphorothioate linkage
ctacgtggtggtgctgaagggttttagagctagaaatagcaagttaaaataaggctagtccgttatcaacttgaaaaagtggcaccgagtcggtgctttt

SEQ ID NO: 356 - RNA, 100 nt, synthetic construct
  source 1..100: mol_type = other RNA
  modified_base 1: mod_base = OTHER; note = 2'-O-methyl ribonucleotide
  modified_base 2: mod_base = OTHER; note = 2'-O-methyl ribonucleotide
  modified_base 3: mod_base = OTHER; note = 2'-O-methyl ribonucleotide
  modified_base 98: mod_base = OTHER; note = 2'-O-methyl ribonucleotide
  modified_base 99: mod_base = OTHER; note = 2'-O-methyl ribonucleotide
  modified_base 100: mod_base = OTHER; note = 2'-O-methyl ribonucleotide
  modified_base 1..4: mod_base = OTHER; note = phosphorothioate linkage
  modified_base 97..100: mod_base = OTHER; note = phosphorothioate linkage
atggaagacatgcaggatctgttttagagctagaaatagcaagttaaaataaggctagtccgttatcaacttgaaaaagtggcaccgagtcggtgctttt

SEQ ID NO: 357 - RNA, 100 nt, synthetic construct
  source 1..100: mol_type = other RNA
  modified_base 1: mod_base = OTHER; note = 2'-O-methyl ribonucleotide
  modified_base 2: mod_base = OTHER; note = 2'-O-methyl ribonucleotide
  modified_base 3: mod_base = OTHER; note = 2'-O-methyl ribonucleotide
  modified_base 98: mod_base = OTHER; note = 2'-O-methyl ribonucleotide
  modified_base 99: mod_base = OTHER; note = 2'-O-methyl ribonucleotide
  modified_base 100: mod_base = OTHER; note = 2'-O-methyl ribonucleotide
  modified_base 1..4: mod_base = OTHER; note = phosphorothioate linkage
  modified_base 97..100: mod_base = OTHER; note = phosphorothioate linkage
agacatgcaggatcttggtggttttagagctagaaatagcaagttaaaataaggctagtccgttatcaacttgaaaaagtggcaccgagtcggtgctttt

SEQ ID NO: 358 - RNA, 100 nt, synthetic construct
  source 1..100: mol_type = other RNA
  modified_base 1: mod_base = OTHER; note = 2'-O-methyl ribonucleotide
  modified_base 2: mod_base = OTHER; note = 2'-O-methyl ribonucleotide
  modified_base 3: mod_base = OTHER; note = 2'-O-methyl ribonucleotide
  modified_base 98: mod_base = OTHER; note = 2'-O-methyl ribonucleotide
  modified_base 99: mod_base = OTHER; note = 2'-O-methyl ribonucleotide
  modified_base 100: mod_base = OTHER; note = 2'-O-methyl ribonucleotide
  modified_base 1..4: mod_base = OTHER; note = phosphorothioate linkage
  modified_base 97..100: mod_base = OTHER; note = phosphorothioate linkage
ctcatcttcaccaggaagccgttttagagctagaaatagcaagttaaaataaggctagtccgttatcaacttgaaaaagtggcaccgagtcggtgctttt

SEQ ID NO: 359 - RNA, 100 nt, synthetic construct
  source 1..100: mol_type = other RNA
  modified_base 1: mod_base = OTHER; note = 2'-O-methyl ribonucleotide
  modified_base 2: mod_base = OTHER; note = 2'-O-methyl ribonucleotide
  modified_base 3: mod_base = OTHER; note = 2'-O-methyl ribonucleotide
  modified_base 98: mod_base = OTHER; note = 2'-O-methyl ribonucleotide
  modified_base 99: mod_base = OTHER; note = 2'-O-methyl ribonucleotide
  modified_base 100: mod_base = OTHER; note = 2'-O-methyl ribonucleotide
  modified_base 1..4: mod_base = OTHER; note = phosphorothioate linkage
  modified_base 97..100: mod_base = OTHER; note = phosphorothioate linkage
ctcctcgatgtagtcgacatgttttagagctagaaatagcaagttaaaataaggctagtccgttatcaacttgaaaaagtggcaccgagtcggtgctttt

SEQ ID NO: 360 - RNA, 100 nt, synthetic construct
  source 1..100: mol_type = other RNA
  modified_base 1: mod_base = OTHER; note = 2'-O-methyl ribonucleotide
  modified_base 2: mod_base = OTHER; note = 2'-O-methyl ribonucleotide
  modified_base 3: mod_base = OTHER; note = 2'-O-methyl ribonucleotide
  modified_base 98: mod_base = OTHER; note = 2'-O-methyl ribonucleotide
  modified_base 99: mod_base = OTHER; note = 2'-O-methyl ribonucleotide
  modified_base 100: mod_base = OTHER; note = 2'-O-methyl ribonucleotide
  modified_base 1..4: mod_base = OTHER; note = phosphorothioate linkage
  modified_base 97..100: mod_base = OTHER; note = phosphorothioate linkage
tattcatccgcccggtaccggttttagagctagaaatagcaagttaaaataaggctagtccgttatcaacttgaaaaagtggcaccgagtcggtgctttt

SEQ ID NO: 361 - RNA, 100 nt, synthetic construct
  source 1..100: mol_type = other RNA
  modified_base 1: mod_base = OTHER; note = 2'-O-methyl ribonucleotide
  modified_base 2: mod_base = OTHER; note = 2'-O-methyl ribonucleotide
  modified_base 3: mod_base = OTHER; note = 2'-O-methyl ribonucleotide
  modified_base 98: mod_base = OTHER; note = 2'-O-methyl ribonucleotide
  modified_base 99: mod_base = OTHER; note = 2'-O-methyl ribonucleotide
  modified_base 100: mod_base = OTHER; note = 2'-O-methyl ribonucleotide
  modified_base 1..4: mod_base = OTHER; note = phosphorothioate linkage
  modified_base 97..100: mod_base = OTHER; note = phosphorothioate linkage
tcctcgatgtagtcgacatggttttagagctagaaatagcaagttaaaataaggctagtccgttatcaacttgaaaaagtggcaccgagtcggtgctttt

SEQ ID NO: 362 - RNA, 100 nt, synthetic construct
  source 1..100: mol_type = other RNA
  modified_base 1: mod_base = OTHER; note = 2'-O-methyl ribonucleotide
  modified_base 2: mod_base = OTHER; note = 2'-O-methyl ribonucleotide
  modified_base 3: mod_base = OTHER; note = 2'-O-methyl ribonucleotide
  modified_base 98: mod_base = OTHER; note = 2'-O-methyl ribonucleotide
  modified_base 99: mod_base = OTHER; note = 2'-O-methyl ribonucleotide
  modified_base 100: mod_base = OTHER; note = 2'-O-methyl ribonucleotide
  modified_base 1..4: mod_base = OTHER; note = phosphorothioate linkage
  modified_base 97..100: mod_base = OTHER; note = phosphorothioate linkage
cctcctcgatgtagtcgacagttttagagctagaaatagcaagttaaaataaggctagtccgttatcaacttgaaaaagtggcaccgagtcggtgctttt

SEQ ID NO: 363 - RNA, 100 nt, synthetic construct
  source 1..100: mol_type = other RNA
  modified_base 1: mod_base = OTHER; note = 2'-O-methyl ribonucleotide
  modified_base 2: mod_base = OTHER; note = 2'-O-methyl ribonucleotide
  modified_base 3: mod_base = OTHER; note = 2'-O-methyl ribonucleotide
  modified_base 98: mod_base = OTHER; note = 2'-O-methyl ribonucleotide
  modified_base 99: mod_base = OTHER; note = 2'-O-methyl ribonucleotide
  modified_base 100: mod_base = OTHER; note = 2'-O-methyl ribonucleotide
  modified_base 1..4: mod_base = OTHER; note = phosphorothioate linkage
  modified_base 97..100: mod_base = OTHER; note = phosphorothioate linkage
gccccatgtcgactacatcggttttagagctagaaatagcaagttaaaataaggctagtccgttatcaacttgaaaaagtggcaccgagtcggtgctttt

SEQ ID NO: 364 - RNA, 100 nt, synthetic construct
  source 1..100: mol_type = other RNA
  modified_base 1: mod_base = OTHER; note = 2'-O-methyl ribonucleotide
  modified_base 2: mod_base = OTHER; note = 2'-O-methyl ribonucleotide
  modified_base 3: mod_base = OTHER; note = 2'-O-methyl ribonucleotide
  modified_base 98: mod_base = OTHER; note = 2'-O-methyl ribonucleotide
  modified_base 99: mod_base = OTHER; note = 2'-O-methyl ribonucleotide
  modified_base 100: mod_base = OTHER; note = 2'-O-methyl ribonucleotide
  modified_base 1..4: mod_base = OTHER; note = phosphorothioate linkage
  modified_base 97..100: mod_base = OTHER; note = phosphorothioate linkage
ccatgtcgactacatcgagggttttagagctagaaatagcaagttaaaataaggctagtccgttatcaacttgaaaaagtggcaccgagtcggtgctttt

SEQ ID NO: 365 - RNA, 100 nt, synthetic construct
  source 1..100: mol_type = other RNA
  modified_base 1: mod_base = OTHER; note = 2'-O-methyl ribonucleotide
  modified_base 2: mod_base = OTHER; note = 2'-O-methyl ribonucleotide
  modified_base 3: mod_base = OTHER; note = 2'-O-methyl ribonucleotide
  modified_base 98: mod_base = OTHER; note = 2'-O-methyl ribonucleotide
  modified_base 99: mod_base = OTHER; note = 2'-O-methyl ribonucleotide
  modified_base 100: mod_base = OTHER; note = 2'-O-methyl ribonucleotide
  modified_base 1..4: mod_base = OTHER; note = phosphorothioate linkage
  modified_base 97..100: mod_base = OTHER; note = phosphorothioate linkage
ggggctggtattcatccgccgttttagagctagaaatagcaagttaaaataaggctagtccgttatcaacttgaaaaagtggcaccgagtcggtgctttt

SEQ ID NO: 366 - RNA, 100 nt, synthetic construct
  source 1..100: mol_type = other RNA
  modified_base 1: mod_base = OTHER; note = 2'-O-methyl ribonucleotide
  modified_base 2: mod_base = OTHER; note = 2'-O-methyl ribonucleotide
  modified_base 3: mod_base = OTHER; note = 2'-O-methyl ribonucleotide
  modified_base 98: mod_base = OTHER; note = 2'-O-methyl ribonucleotide
  modified_base 99: mod_base = OTHER; note = 2'-O-methyl ribonucleotide
  modified_base 100: mod_base = OTHER; note = 2'-O-methyl ribonucleotide
  modified_base 1..4: mod_base = OTHER; note = phosphorothioate linkage
  modified_base 97..100: mod_base = OTHER; note = phosphorothioate linkage
gtcgacatggggcaacttcagttttagagctagaaatagcaagttaaaataaggctagtccgttatcaacttgaaaaagtggcaccgagtcggtgctttt

SEQ ID NO: 367 - RNA, 100 nt, synthetic construct
  source 1..100: mol_type = other RNA
  modified_base 1: mod_base = OTHER; note = 2'-O-methyl ribonucleotide
  modified_base 2: mod_base = OTHER; note = 2'-O-methyl ribonucleotide
  modified_base 3: mod_base = OTHER; note = 2'-O-methyl ribonucleotide
  modified_base 98: mod_base = OTHER; note = 2'-O-methyl ribonucleotide
  modified_base 99: mod_base = OTHER; note = 2'-O-methyl ribonucleotide
  modified_base 100: mod_base = OTHER; note = 2'-O-methyl ribonucleotide
  modified_base 1..4: mod_base = OTHER; note = phosphorothioate linkage
  modified_base 97..100: mod_base = OTHER; note = phosphorothioate linkage
accaccgggaaatcgagggcgttttagagctagaaatagcaagttaaaataaggctagtccgttatcaacttgaaaaagtggcaccgagtcggtgctttt

SEQ ID NO: 368 - RNA, 100 nt, synthetic construct
  source 1..100: mol_type = other RNA
  modified_base 1: mod_base = OTHER; note = 2'-O-methyl ribonucleotide
  modified_base 2: mod_base = OTHER; note = 2'-O-methyl ribonucleotide
  modified_base 3: mod_base = OTHER; note = 2'-O-methyl ribonucleotide
  modified_base 98: mod_base = OTHER; note = 2'-O-methyl ribonucleotide
  modified_base 99: mod_base = OTHER; note = 2'-O-methyl ribonucleotide
  modified_base 100: mod_base = OTHER; note = 2'-O-methyl ribonucleotide
  modified_base 1..4: mod_base = OTHER; note = phosphorothioate linkage
  modified_base 97..100: mod_base = OTHER; note = phosphorothioate linkage
gagtgaccaccgggaaatcggttttagagctagaaatagcaagttaaaataaggctagtccgttatcaacttgaaaaagtggcaccgagtcggtgctttt

SEQ ID NO: 369 - RNA, 100 nt, synthetic construct
  source 1..100: mol_type = other RNA
  modified_base 1: mod_base = OTHER; note = 2'-O-methyl ribonucleotide
  modified_base 2: mod_base = OTHER; note = 2'-O-methyl ribonucleotide
  modified_base 3: mod_base = OTHER; note = 2'-O-methyl ribonucleotide
  modified_base 98: mod_base = OTHER; note = 2'-O-methyl ribonucleotide
  modified_base 99: mod_base = OTHER; note = 2'-O-methyl ribonucleotide
  modified_base 100: mod_base = OTHER; note = 2'-O-methyl ribonucleotide
  modified_base 1..4: mod_base = OTHER; note = phosphorothioate linkage
  modified_base 97..100: mod_base = OTHER; note = phosphorothioate linkage
agtgaccaccgggaaatcgagttttagagctagaaatagcaagttaaaataaggctagtccgttatcaacttgaaaaagtggcaccgagtcggtgctttt

SEQ ID NO: 370 - RNA, 100 nt, synthetic construct
  source 1..100: mol_type = other RNA
  modified_base 1: mod_base = OTHER; note = 2'-O-methyl ribonucleotide
  modified_base 2: mod_base = OTHER; note = 2'-O-methyl ribonucleotide
  modified_base 3: mod_base = OTHER; note = 2'-O-methyl ribonucleotide
  modified_base 98: mod_base = OTHER; note = 2'-O-methyl ribonucleotide
  modified_base 99: mod_base = OTHER; note = 2'-O-methyl ribonucleotide
  modified_base 100: mod_base = OTHER; note = 2'-O-methyl ribonucleotide
  modified_base 1..4: mod_base = OTHER; note = phosphorothioate linkage
  modified_base 97..100: mod_base = OTHER; note = phosphorothioate linkage
ccaccgggaaatcgagggcagttttagagctagaaatagcaagttaaaataaggctagtccgttatcaacttgaaaaagtggcaccgagtcggtgctttt

SEQ ID NO: 371 - RNA, 100 nt, synthetic construct
  source 1..100: mol_type = other RNA
  modified_base 1: mod_base = OTHER; note = 2'-O-methyl ribonucleotide
  modified_base 2: mod_base = OTHER; note = 2'-O-methyl ribonucleotide
  modified_base 3: mod_base = OTHER; note = 2'-O-methyl ribonucleotide
  modified_base 98: mod_base = OTHER; note = 2'-O-methyl ribonucleotide
  modified_base 99: mod_base = OTHER; note = 2'-O-methyl ribonucleotide
  modified_base 100: mod_base = OTHER; note = 2'-O-methyl ribonucleotide
  modified_base 1..4: mod_base = OTHER; note = phosphorothioate linkage
  modified_base 97..100: mod_base = OTHER; note = phosphorothioate linkage
gaagcgggtcccgtcctcctgttttagagctagaaatagcaagttaaaataaggctagtccgttatcaacttgaaaaagtggcaccgagtcggtgctttt

SEQ ID NO: 372 - RNA, 100 nt, synthetic construct
  source 1..100: mol_type = other RNA
  modified_base 1: mod_base = OTHER; note = 2'-O-methyl ribonucleotide
  modified_base 2: mod_base = OTHER; note = 2'-O-methyl ribonucleotide
  modified_base 3: mod_base = OTHER; note = 2'-O-methyl ribonucleotide
  modified_base 98: mod_base = OTHER; note = 2'-O-methyl ribonucleotide
  modified_base 99: mod_base = OTHER; note = 2'-O-methyl ribonucleotide
  modified_base 100: mod_base = OTHER; note = 2'-O-methyl ribonucleotide
  modified_base 1..4: mod_base = OTHER; note = phosphorothioate linkage
  modified_base 97..100: mod_base = OTHER; note = phosphorothioate linkage
ctaggagatacacctccaccgttttagagctagaaatagcaagttaaaataaggctagtccgttatcaacttgaaaaagtggcaccgagtcggtgctttt

SEQ ID NO: 373 - RNA, 100 nt, synthetic construct
  source 1..100: mol_type = other RNA
  modified_base 1: mod_base = OTHER; note = 2'-O-methyl ribonucleotide
  modified_base 2: mod_base = OTHER; note = 2'-O-methyl ribonucleotide
  modified_base 3: mod_base = OTHER; note = 2'-O-methyl ribonucleotide
  modified_base 98: mod_base = OTHER; note = 2'-O-methyl ribonucleotide
  modified_base 99: mod_base = OTHER; note = 2'-O-methyl ribonucleotide
  modified_base 100: mod_base = OTHER; note = 2'-O-methyl ribonucleotide
  modified_base 1..4: mod_base = OTHER; note = phosphorothioate linkage
  modified_base 97..100: mod_base = OTHER; note = phosphorothioate linkage
cagcatacagagtgaccaccgttttagagctagaaatagcaagttaaaataaggctagtccgttatcaacttgaaaaagtggcaccgagtcggtgctttt

SEQ ID NO: 374 - RNA, 100 nt, synthetic construct
  source 1..100: mol_type = other RNA
  modified_base 1: mod_base = OTHER; note = 2'-O-methyl ribonucleotide
  modified_base 2: mod_base = OTHER; note = 2'-O-methyl ribonucleotide
  modified_base 3: mod_base = OTHER; note = 2'-O-methyl ribonucleotide
  modified_base 98: mod_base = OTHER; note = 2'-O-methyl ribonucleotide
  modified_base 99: mod_base = OTHER; note = 2'-O-methyl ribonucleotide
  modified_base 100: mod_base = OTHER; note = 2'-O-methyl ribonucleotide
  modified_base 1..4: mod_base = OTHER; note = phosphorothioate linkage
  modified_base 97..100: mod_base = OTHER; note = phosphorothioate linkage
aagcgggtcccgtcctcctcgttttagagctagaaatagcaagttaaaataaggctagtccgttatcaacttgaaaaagtggcaccgagtcggtgctttt

SEQ ID NO: 375 - RNA, 100 nt, synthetic construct
  source 1..100: mol_type = other RNA
  modified_base 1: mod_base = OTHER; note = 2'-O-methyl ribonucleotide
  modified_base 2: mod_base = OTHER; note = 2'-O-methyl ribonucleotide
  modified_base 3: mod_base = OTHER; note = 2'-O-methyl ribonucleotide
  modified_base 98: mod_base = OTHER; note = 2'-O-methyl ribonucleotide
  modified_base 99: mod_base = OTHER; note = 2'-O-methyl ribonucleotide
  modified_base 100: mod_base = OTHER; note = 2'-O-methyl ribonucleotide
  modified_base 1..4: mod_base = OTHER; note = phosphorothioate linkage
  modified_base 97..100: mod_base = OTHER; note = phosphorothioate linkage
tgaccctgccctcgatttccgttttagagctagaaatagcaagttaaaataaggctagtccgttatcaacttgaaaaagtggcaccgagtcggtgctttt

SEQ ID NO: 376 - RNA, 100 nt, synthetic construct
  source 1..100: mol_type = other RNA
  modified_base 1: mod_base = OTHER; note = 2'-O-methyl ribonucleotide
  modified_base 2: mod_base = OTHER; note = 2'-O-methyl ribonucleotide
  modified_base 3: mod_base = OTHER; note = 2'-O-methyl ribonucleotide
  modified_base 98: mod_base = OTHER; note = 2'-O-methyl ribonucleotide
  modified_base 99: mod_base = OTHER; note = 2'-O-methyl ribonucleotide
  modified_base 100: mod_base = OTHER; note = 2'-O-methyl ribonucleotide
  modified_base 1..4: mod_base = OTHER; note = phosphorothioate linkage
  modified_base 97..100: mod_base = OTHER; note = phosphorothioate linkage
cactctgtatgctggtgtctgttttagagctagaaatagcaagttaaaataaggctagtccgttatcaacttgaaaaagtggcaccgagtcggtgctttt

SEQ ID NO: 377 - RNA, 100 nt, synthetic construct
  source 1..100: mol_type = other RNA
  modified_base 1: mod_base = OTHER; note = 2'-O-methyl ribonucleotide
  modified_base 2: mod_base = OTHER; note = 2'-O-methyl ribonucleotide
  modified_base 3: mod_base = OTHER; note = 2'-O-methyl ribonucleotide
  modified_base 98: mod_base = OTHER; note = 2'-O-methyl ribonucleotide
  modified_base 99: mod_base = OTHER; note = 2'-O-methyl ribonucleotide
  modified_base 100: mod_base = OTHER; note = 2'-O-methyl ribonucleotide
  modified_base 1..4: mod_base = OTHER; note = phosphorothioate linkage
  modified_base 97..100: mod_base = OTHER; note = phosphorothioate linkage
ccctgccctcgatttcccgggttttagagctagaaatagcaagttaaaataaggctagtccgttatcaacttgaaaaagtggcaccgagtcggtgctttt

SEQ ID NO: 378 - RNA, 100 nt, synthetic construct
  source 1..100: mol_type = other RNA
  modified_base 1: mod_base = OTHER; note = 2'-O-methyl ribonucleotide
  modified_base 2: mod_base = OTHER; note = 2'-O-methyl ribonucleotide
  modified_base 3: mod_base = OTHER; note = 2'-O-methyl ribonucleotide
  modified_base 98: mod_base = OTHER; note = 2'-O-methyl ribonucleotide
  modified_base 99: mod_base = OTHER; note = 2'-O-methyl ribonucleotide
  modified_base 100: mod_base = OTHER; note = 2'-O-methyl ribonucleotide
  modified_base 1..4: mod_base = OTHER; note = phosphorothioate linkage
  modified_base 97..100: mod_base = OTHER; note = phosphorothioate linkage
ccggtggtcactctgtatgcgttttagagctagaaatagcaagttaaaataaggctagtccgttatcaacttgaaaaagtggcaccgagtcggtgctttt

SEQ ID NO: 379 - RNA, 100 nt, synthetic construct
  source 1..100: mol_type = other RNA
  modified_base 1: mod_base = OTHER; note = 2'-O-methyl ribonucleotide
  modified_base 2: mod_base = OTHER; note = 2'-O-methyl ribonucleotide
  modified_base 3: mod_base = OTHER; note = 2'-O-methyl ribonucleotide
  modified_base 98: mod_base = OTHER; note = 2'-O-methyl ribonucleotide
  modified_base 99: mod_base = OTHER; note = 2'-O-methyl ribonucleotide
  modified_base 100: mod_base = OTHER; note = 2'-O-methyl ribonucleotide
  modified_base 1..4: mod_base = OTHER; note = phosphorothioate linkage
  modified_base 97..100: mod_base = OTHER; note = phosphorothioate linkage
ggaaatcgagggcagggtcagttttagagctagaaatagcaagttaaaataaggctagtccgttatcaacttgaaaaagtggcaccgagtcggtgctttt

SEQ ID NO: 380 - RNA, 100 nt, synthetic construct
  source 1..100: mol_type = other RNA
  modified_base 1: mod_base = OTHER; note = 2'-O-methyl ribonucleotide
  modified_base 2: mod_base = OTHER; note = 2'-O-methyl ribonucleotide
  modified_base 3: mod_base = OTHER; note = 2'-O-methyl ribonucleotide
  modified_base 98: mod_base = OTHER; note = 2'-O-methyl ribonucleotide
  modified_base 99: mod_base = OTHER; note = 2'-O-methyl ribonucleotide
  modified_base 100: mod_base = OTHER; note = 2'-O-methyl ribonucleotide
  modified_base 1..4: mod_base = OTHER; note = phosphorothioate linkage
  modified_base 97..100: mod_base = OTHER; note = phosphorothioate linkage
ccagcatacagagtgaccacgttttagagctagaaatagcaagttaaaataaggctagtccgttatcaacttgaaaaagtggcaccgagtcggtgctttt

SEQ ID NO: 381 - RNA, 100 nt, synthetic construct
  source 1..100: mol_type = other RNA
  modified_base 1: mod_base = OTHER; note = 2'-O-methyl ribonucleotide
  modified_base 2: mod_base = OTHER; note = 2'-O-methyl ribonucleotide
  modified_base 3: mod_base = OTHER; note = 2'-O-methyl ribonucleotide
  modified_base 98: mod_base = OTHER; note = 2'-O-methyl ribonucleotide
  modified_base 99: mod_base = OTHER; note = 2'-O-methyl ribonucleotide
  modified_base 100: mod_base = OTHER; note = 2'-O-methyl ribonucleotide
  modified_base 1..4: mod_base = OTHER; note = phosphorothioate linkage
  modified_base 97..100: mod_base = OTHER; note = phosphorothioate linkage
cttggcagttgagcacgcgcgttttagagctagaaatagcaagttaaaataaggctagtccgttatcaacttgaaaaagtggcaccgagtcggtgctttt

SEQ ID NO: 382 - RNA, 100 nt, synthetic construct
  source 1..100: mol_type = other RNA
  modified_base 1: mod_base = OTHER; note = 2'-O-methyl ribonucleotide
  modified_base 2: mod_base = OTHER; note = 2'-O-methyl ribonucleotide
  modified_base 3: mod_base = OTHER; note = 2'-O-methyl ribonucleotide
  modified_base 98: mod_base = OTHER; note = 2'-O-methyl ribonucleotide
  modified_base 99: mod_base = OTHER; note = 2'-O-methyl ribonucleotide
  modified_base 100: mod_base = OTHER; note = 2'-O-methyl ribonucleotide
  modified_base 1..4: mod_base = OTHER; note = phosphorothioate linkage
  modified_base 97..100: mod_base = OTHER; note = phosphorothioate linkage
ctgcgcgtgctcaactgccagttttagagctagaaatagcaagttaaaataaggctagtccgttatcaacttgaaaaagtggcaccgagtcggtgctttt

SEQ ID NO: 383 - RNA, 100 nt, synthetic construct
  source 1..100: mol_type = other RNA
  modified_base 1: mod_base = OTHER; note = 2'-O-methyl ribonucleotide
  modified_base 2: mod_base = OTHER; note = 2'-O-methyl ribonucleotide
  modified_base 3: mod_base = OTHER; note = 2'-O-methyl ribonucleotide
  modified_base 98: mod_base = OTHER; note = 2'-O-methyl ribonucleotide
  modified_base 99: mod_base = OTHER; note = 2'-O-methyl ribonucleotide
  modified_base 100: mod_base = OTHER; note = 2'-O-methyl ribonucleotide
  modified_base 1..4: mod_base = OTHER; note = phosphorothioate linkage
  modified_base 97..100: mod_base = OTHER; note = phosphorothioate linkage
tgcgcgtgctcaactgccaagttttagagctagaaatagcaagttaaaataaggctagtccgttatcaacttgaaaaagtggcaccgagtcggtgctttt

SEQ ID NO: 384 - RNA, 100 nt, synthetic construct
  source 1..100: mol_type = other RNA
  modified_base 1: mod_base = OTHER; note = 2'-O-methyl ribonucleotide
  modified_base 2: mod_base = OTHER; note = 2'-O-methyl ribonucleotide
  modified_base 3: mod_base = OTHER; note = 2'-O-methyl ribonucleotide
  modified_base 98: mod_base = OTHER; note = 2'-O-methyl ribonucleotide
  modified_base 99: mod_base = OTHER; note = 2'-O-methyl ribonucleotide
  modified_base 100: mod_base = OTHER; note = 2'-O-methyl ribonucleotide
  modified_base 1..4: mod_base = OTHER; note = phosphorothioate linkage
  modified_base 97..100: mod_base = OTHER; note = phosphorothioate linkage
cgggatgccggcgtggccaagttttagagctagaaatagcaagttaaaataaggctagtccgttatcaacttgaaaaagtggcaccgagtcggtgctttt

SEQ ID NO: 385 - RNA, 100 nt, synthetic construct
  source 1..100: mol_type = other RNA
  modified_base 1: mod_base = OTHER; note = 2'-O-methyl ribonucleotide
  modified_base 2: mod_base = OTHER; note = 2'-O-methyl ribonucleotide
  modified_base 3: mod_base = OTHER; note = 2'-O-methyl ribonucleotide
  modified_base 98: mod_base = OTHER; note = 2'-O-methyl ribonucleotide
  modified_base 99: mod_base = OTHER; note = 2'-O-methyl ribonucleotide
  modified_base 100: mod_base = OTHER; note = 2'-O-methyl ribonucleotide
  modified_base 1..4: mod_base = OTHER; note = phosphorothioate linkage
  modified_base 97..100: mod_base = OTHER; note = phosphorothioate linkage
cgtgctcaactgccaagggagttttagagctagaaatagcaagttaaaataaggctagtccgttatcaacttgaaaaagtggcaccgagtcggtgctttt

SEQ ID NO: 386 - RNA, 100 nt, synthetic construct
  source 1..100: mol_type = other RNA
  modified_base 1: mod_base = OTHER; note = 2'-O-methyl ribonucleotide
  modified_base 2: mod_base = OTHER; note = 2'-O-methyl ribonucleotide
  modified_base 3: mod_base = OTHER; note = 2'-O-methyl ribonucleotide
  modified_base 98: mod_base = OTHER; note = 2'-O-methyl ribonucleotide
  modified_base 99: mod_base = OTHER; note = 2'-O-methyl ribonucleotide
  modified_base 100: mod_base = OTHER; note = 2'-O-methyl ribonucleotide
  modified_base 1..4: mod_base = OTHER; note = phosphorothioate linkage
  modified_base 97..100: mod_base = OTHER; note = phosphorothioate linkage
ccttggccacgccggcatccgttttagagctagaaatagcaagttaaaataaggctagtccgttatcaacttgaaaaagtggcaccgagtcggtgctttt

SEQ ID NO: 387 - RNA, 100 nt, synthetic construct
  source 1..100: mol_type = other RNA
  modified_base 1: mod_base = OTHER; note = 2'-O-methyl ribonucleotide
  modified_base 2: mod_base = OTHER; note = 2'-O-methyl ribonucleotide
  modified_base 3: mod_base = OTHER; note = 2'-O-methyl ribonucleotide
  modified_base 98: mod_base = OTHER; note = 2'-O-methyl ribonucleotide
  modified_base 99: mod_base = OTHER; note = 2'-O-methyl ribonucleotide
  modified_base 100: mod_base = OTHER; note = 2'-O-methyl ribonucleotide
  modified_base 1..4: mod_base = OTHER; note = phosphorothioate linkage
  modified_base 97..100: mod_base = OTHER; note = phosphorothioate linkage
cagcggccgggatgccggcggttttagagctagaaatagcaagttaaaataaggctagtccgttatcaacttgaaaaagtggcaccgagtcggtgctttt

SEQ ID NO: 388 - RNA, 100 nt, synthetic construct
  source 1..100: mol_type = other RNA
  modified_base 1: mod_base = OTHER; note = 2'-O-methyl ribonucleotide
  modified_base 2: mod_base = OTHER; note = 2'-O-methyl ribonucleotide
  modified_base 3: mod_base = OTHER; note = 2'-O-methyl ribonucleotide
  modified_base 98: mod_base = OTHER; note = 2'-O-methyl ribonucleotide
  modified_base 99: mod_base = OTHER; note = 2'-O-methyl ribonucleotide
  modified_base 100: mod_base = OTHER; note = 2'-O-methyl ribonucleotide
  modified_base 1..4: mod_base = OTHER; note = phosphorothioate linkage
  modified_base 97..100: mod_base = OTHER; note = phosphorothioate linkage
ccgggatgccggcgtggccagttttagagctagaaatagcaagttaaaataaggctagtccgttatcaacttgaaaaagtggcaccgagtcggtgctttt

SEQ ID NO: 389 - RNA, 100 nt, synthetic construct
  source 1..100: mol_type = other RNA
  modified_base 1: mod_base = OTHER; note = 2'-O-methyl ribonucleotide
  modified_base 2: mod_base = OTHER; note = 2'-O-methyl ribonucleotide
  modified_base 3: mod_base = OTHER; note = 2'-O-methyl ribonucleotide
  modified_base 98: mod_base = OTHER; note = 2'-O-methyl ribonucleotide
  modified_base 99: mod_base = OTHER; note = 2'-O-methyl ribonucleotide
  modified_base 100: mod_base = OTHER; note = 2'-O-methyl ribonucleotide
  modified_base 1..4: mod_base = OTHER; note = phosphorothioate linkage
  modified_base 97..100: mod_base = OTHER; note = phosphorothioate linkage
gtggtcagcggccgggatgcgttttagagctagaaatagcaagttaaaataaggctagtccgttatcaacttgaaaaagtggcaccgagtcggtgctttt

SEQ ID NO: 390 - RNA, 100 nt, synthetic construct
  source 1..100: mol_type = other RNA
  modified_base 1: mod_base = OTHER; note = 2'-O-methyl ribonucleotide
  modified_base 2: mod_base = OTHER; note = 2'-O-methyl ribonucleotide
  modified_base 3: mod_base = OTHER; note = 2'-O-methyl ribonucleotide
  modified_base 98: mod_base = OTHER; note = 2'-O-methyl ribonucleotide
  modified_base 99: mod_base = OTHER; note = 2'-O-methyl ribonucleotide
  modified_base 100: mod_base = OTHER; note = 2'-O-methyl ribonucleotide
  modified_base 1..4: mod_base = OTHER; note = phosphorothioate linkage
  modified_base 97..100: mod_base = OTHER; note = phosphorothioate linkage
cgctgaccacccctgccagggttttagagctagaaatagcaagttaaaataaggctagtccgttatcaacttgaaaaagtggcaccgagtcggtgctttt

SEQ ID NO: 391 - RNA, 100 nt, synthetic construct
  source 1..100: mol_type = other RNA
  modified_base 1: mod_base = OTHER; note = 2'-O-methyl ribonucleotide
  modified_base 2: mod_base = OTHER; note = 2'-O-methyl ribonucleotide
  modified_base 3: mod_base = OTHER; note = 2'-O-methyl ribonucleotide
  modified_base 98: mod_base = OTHER; note = 2'-O-methyl ribonucleotide
  modified_base 99: mod_base = OTHER; note = 2'-O-methyl ribonucleotide
  modified_base 100: mod_base = OTHER; note = 2'-O-methyl ribonucleotide
  modified_base 1..4: mod_base = OTHER; note = phosphorothioate linkage
  modified_base 97..100: mod_base = OTHER; note = phosphorothioate linkage
ggcaggggtggtcagcggccgttttagagctagaaatagcaagttaaaataaggctagtccgttatcaacttgaaaaagtggcaccgagtcggtgctttt

SEQ ID NO: 392 - RNA, 100 nt, synthetic construct
  source 1..100: mol_type = other RNA
  modified_base 1: mod_base = OTHER; note = 2'-O-methyl ribonucleotide
  modified_base 2: mod_base = OTHER; note = 2'-O-methyl ribonucleotide
  modified_base 3: mod_base = OTHER; note = 2'-O-methyl ribonucleotide
  modified_base 98: mod_base = OTHER; note = 2'-O-methyl ribonucleotide
  modified_base 99: mod_base = OTHER; note = 2'-O-methyl ribonucleotide
  modified_base 100: mod_base = OTHER; note = 2'-O-methyl ribonucleotide
  modified_base 1..4: mod_base = OTHER; note = phosphorothioate linkage
  modified_base 97..100: mod_base = OTHER; note = phosphorothioate linkage
gtgctcaactgccaagggaagttttagagctagaaatagcaagttaaaataaggctagtccgttatcaacttgaaaaagtggcaccgagtcggtgctttt

SEQ ID NO: 393 - RNA, 100 nt, synthetic construct
  source 1..100: mol_type = other RNA
  modified_base 1: mod_base = OTHER; note = 2'-O-methyl ribonucleotide
  modified_base 2: mod_base = OTHER; note = 2'-O-methyl ribonucleotide
  modified_base 3: mod_base = OTHER; note = 2'-O-methyl ribonucleotide
  modified_base 98: mod_base = OTHER; note = 2'-O-methyl ribonucleotide
  modified_base 99: mod_base = OTHER; note = 2'-O-methyl ribonucleotide
  modified_base 100: mod_base = OTHER; note = 2'-O-methyl ribonucleotide
  modified_base 1..4: mod_base = OTHER; note = phosphorothioate linkage
  modified_base 97..100: mod_base = OTHER; note = phosphorothioate linkage
tcatggcacccacctggcaggttttagagctagaaatagcaagttaaaataaggctagtccgttatcaacttgaaaaagtggcaccgagtcggtgctttt

SEQ ID NO: 394 - RNA, 100 nt, synthetic construct
  source 1..100: mol_type = other RNA
  modified_base 1: mod_base = OTHER; note = 2'-O-methyl ribonucleotide
  modified_base 2: mod_base = OTHER; note = 2'-O-methyl ribonucleotide
  modified_base 3: mod_base = OTHER; note = 2'-O-methyl ribonucleotide
  modified_base 98: mod_base = OTHER; note = 2'-O-methyl ribonucleotide
  modified_base 99: mod_base = OTHER; note = 2'-O-methyl ribonucleotide
  modified_base 100: mod_base = OTHER; note = 2'-O-methyl ribonucleotide
  modified_base 1..4: mod_base = OTHER; note = phosphorothioate linkage
  modified_base 97..100: mod_base = OTHER; note = phosphorothioate linkage
tggcaggggtggtcagcggcgttttagagctagaaatagcaagttaaaataaggctagtccgttatcaacttgaaaaagtggcaccgagtcggtgctttt

SEQ ID NO: 395 - RNA, 100 nt, synthetic construct
  source 1..100: mol_type = other RNA
  modified_base 1: mod_base = OTHER; note = 2'-O-methyl ribonucleotide
  modified_base 2: mod_base = OTHER; note = 2'-O-methyl ribonucleotide
  modified_base 3: mod_base = OTHER; note = 2'-O-methyl ribonucleotide
  modified_base 98: mod_base = OTHER; note = 2'-O-methyl ribonucleotide
  modified_base 99: mod_base = OTHER; note = 2'-O-methyl ribonucleotide
  modified_base 100: mod_base = OTHER; note = 2'-O-methyl ribonucleotide
  modified_base 1..4: mod_base = OTHER; note = phosphorothioate linkage
  modified_base 97..100: mod_base = OTHER; note = phosphorothioate linkage
gctgaccacccctgccaggtgttttagagctagaaatagcaagttaaaataaggctagtccgttatcaacttgaaaaagtggcaccgagtcggtgctttt

SEQ ID NO: 396 - RNA, 100 nt, synthetic construct
  source 1..100: mol_type = other RNA
  modified_base 1: mod_base = OTHER; note = 2'-O-methyl ribonucleotide
  modified_base 2: mod_base = OTHER; note = 2'-O-methyl ribonucleotide
  modified_base 3: mod_base = OTHER; note = 2'-O-methyl ribonucleotide
  modified_base 98: mod_base = OTHER; note = 2'-O-methyl ribonucleotide
  modified_base 99: mod_base = OTHER; note = 2'-O-methyl ribonucleotide
  modified_base 100: mod_base = OTHER; note = 2'-O-methyl ribonucleotide
  modified_base 1..4: mod_base = OTHER; note = phosphorothioate linkage
  modified_base 97..100: mod_base = OTHER; note = phosphorothioate linkage
ggccgctgaccacccctgccgttttagagctagaaatagcaagttaaaataaggctagtccgttatcaacttgaaaaagtggcaccgagtcggtgctttt

SEQ ID NO: 397 - RNA, 100 nt, synthetic construct
  source 1..100: mol_type = other RNA
  modified_base 1: mod_base = OTHER; note = 2'-O-methyl ribonucleotide
  modified_base 2: mod_base = OTHER; note = 2'-O-methyl ribonucleotide
  modified_base 3: mod_base = OTHER; note = 2'-O-methyl ribonucleotide
  modified_base 98: mod_base = OTHER; note = 2'-O-methyl ribonucleotide
  modified_base 99: mod_base = OTHER; note = 2'-O-methyl ribonucleotide
  modified_base 100: mod_base = OTHER; note = 2'-O-methyl ribonucleotide
  modified_base 1..4: mod_base = OTHER; note = phosphorothioate linkage
  modified_base 97..100: mod_base = OTHER; note = phosphorothioate linkage
ggcatcgtcccggaagttgcgttttagagctagaaatagcaagttaaaataaggctagtccgttatcaacttgaaaaagtggcaccgagtcggtgctttt

SEQ ID NO: 398 - RNA, 100 nt, synthetic construct
  source 1..100: mol_type = other RNA
  modified_base 1: mod_base = OTHER; note = 2'-O-methyl ribonucleotide
  modified_base 2: mod_base = OTHER; note = 2'-O-methyl ribonucleotide
  modified_base 3: mod_base = OTHER; note = 2'-O-methyl ribonucleotide
  modified_base 98: mod_base = OTHER; note = 2'-O-methyl ribonucleotide
  modified_base 99: mod_base = OTHER; note = 2'-O-methyl ribonucleotide
  modified_base 100: mod_base = OTHER; note = 2'-O-methyl ribonucleotide
  modified_base 1..4: mod_base = OTHER; note = phosphorothioate linkage
  modified_base 97..100: mod_base = OTHER; note = phosphorothioate linkage
ggcttttccgaataaactccgttttagagctagaaatagcaagttaaaataaggctagtccgttatcaacttgaaaaagtggcaccgagtcggtgctttt

SEQ ID NO: 399 - RNA, 100 nt, synthetic construct
  source 1..100: mol_type = other RNA
  modified_base 1: mod_base = OTHER; note = 2'-O-methyl ribonucleotide
  modified_base 2: mod_base = OTHER; note = 2'-O-methyl ribonucleotide
  modified_base 3: mod_base = OTHER; note = 2'-O-methyl ribonucleotide
  modified_base 98: mod_base = OTHER; note = 2'-O-methyl ribonucleotide
  modified_base 99: mod_base = OTHER; note = 2'-O-methyl ribonucleotide
  modified_base 100: mod_base = OTHER; note = 2'-O-methyl ribonucleotide
  modified_base 1..4: mod_base = OTHER; note = phosphorothioate linkage
  modified_base 97..100: mod_base = OTHER; note = phosphorothioate linkage
gtcccggaagttgccggcaggttttagagctagaaatagcaagttaaaataaggctagtccgttatcaacttgaaaaagtggcaccgagtcggtgctttt

SEQ ID NO: 400 - RNA, 100 nt, synthetic construct
  source 1..100: mol_type = other RNA
  modified_base 1: mod_base = OTHER; note = 2'-O-methyl ribonucleotide
  modified_base 2: mod_base = OTHER; note = 2'-O-methyl ribonucleotide
  modified_base 3: mod_base = OTHER; note = 2'-O-methyl ribonucleotide
  modified_base 98: mod_base = OTHER; note = 2'-O-methyl ribonucleotide
  modified_base 99: mod_base = OTHER; note = 2'-O-methyl ribonucleotide
  modified_base 100: mod_base = OTHER; note = 2'-O-methyl ribonucleotide
  modified_base 1..4: mod_base = OTHER; note = phosphorothioate linkage
  modified_base 97..100: mod_base = OTHER; note = phosphorothioate linkage
cggctgtacccacccgccaggttttagagctagaaatagcaagttaaaataaggctagtccgttatcaacttgaaaaagtggcaccgagtcggtgctttt

SEQ ID NO: 401 - RNA, 100 nt, synthetic construct
  source 1..100: mol_type = other RNA
  modified_base 1: mod_base = OTHER; note = 2'-O-methyl ribonucleotide
  modified_base 2: mod_base = OTHER; note = 2'-O-methyl ribonucleotide
  modified_base 3: mod_base = OTHER; note = 2'-O-methyl ribonucleotide
  modified_base 98: mod_base = OTHER; note = 2'-O-methyl ribonucleotide
  modified_base 99: mod_base = OTHER; note = 2'-O-methyl ribonucleotide
  modified_base 100: mod_base = OTHER; note = 2'-O-methyl ribonucleotide
  modified_base 1..4: mod_base = OTHER; note = phosphorothioate linkage
  modified_base 97..100: mod_base = OTHER; note = phosphorothioate linkage
gtcgtgctggtcaccgctgcgttttagagctagaaatagcaagttaaaataaggctagtccgttatcaacttgaaaaagtggcaccgagtcggtgctttt

SEQ ID NO: 402 - RNA, 100 nt, synthetic construct
  source 1..100: mol_type = other RNA
  modified_base 1: mod_base = OTHER; note = 2'-O-methyl ribonucleotide
  modified_base 2: mod_base = OTHER; note = 2'-O-methyl ribonucleotide
  modified_base 3: mod_base = OTHER; note = 2'-O-methyl ribonucleotide
  modified_base 98: mod_base = OTHER; note = 2'-O-methyl ribonucleotide
  modified_base 99: mod_base = OTHER; note = 2'-O-methyl ribonucleotide
  modified_base 100: mod_base = OTHER; note = 2'-O-methyl ribonucleotide
  modified_base 1..4: mod_base = OTHER; note = phosphorothioate linkage
  modified_base 97..100: mod_base = OTHER; note = phosphorothioate linkage
agtagaggcaggcatcgtccgttttagagctagaaatagcaagttaaaataaggctagtccgttatcaacttgaaaaagtggcaccgagtcggtgctttt

SEQ ID NO: 403 - RNA, 100 nt, synthetic construct
  source 1..100: mol_type = other RNA
  modified_base 1: mod_base = OTHER; note = 2'-O-methyl ribonucleotide
  modified_base 2: mod_base = OTHER; note = 2'-O-methyl ribonucleotide
  modified_base 3: mod_base = OTHER; note = 2'-O-methyl ribonucleotide
  modified_base 98: mod_base = OTHER; note = 2'-O-methyl ribonucleotide
  modified_base 99: mod_base = OTHER; note = 2'-O-methyl ribonucleotide
  modified_base 100: mod_base = OTHER; note = 2'-O-methyl ribonucleotide
  modified_base 1..4: mod_base = OTHER; note = phosphorothioate linkage
  modified_base 97..100: mod_base = OTHER; note = phosphorothioate linkage
tccgaataaactccaggcctgttttagagctagaaatagcaagttaaaataaggctagtccgttatcaacttgaaaaagtggcaccgagtcggtgctttt

SEQ ID NO: 404 - RNA, 100 nt, synthetic construct
  source 1..100: mol_type = other RNA
  modified_base 1: mod_base = OTHER; note = 2'-O-methyl ribonucleotide
  modified_base 2: mod_base = OTHER; note = 2'-O-methyl ribonucleotide
  modified_base 3: mod_base = OTHER; note = 2'-O-methyl ribonucleotide
  modified_base 98: mod_base = OTHER; note = 2'-O-methyl ribonucleotide
  modified_base 99: mod_base = OTHER; note = 2'-O-methyl ribonucleotide
  modified_base 100: mod_base = OTHER; note = 2'-O-methyl ribonucleotide
  modified_base 1..4: mod_base = OTHER; note = phosphorothioate linkage
  modified_base 97..100: mod_base = OTHER; note = phosphorothioate linkage
gtttattcggaaaagccagcgttttagagctagaaatagcaagttaaaataaggctagtccgttatcaacttgaaaaagtggcaccgagtcggtgctttt

SEQ ID NO: 405 - RNA, 100 nt, synthetic construct
  source 1..100: mol_type = other RNA
  modified_base 1: mod_base = OTHER; note = 2'-O-methyl ribonucleotide
  modified_base 2: mod_base = OTHER; note = 2'-O-methyl ribonucleotide
  modified_base 3: mod_base = OTHER; note = 2'-O-methyl ribonucleotide
  modified_base 98: mod_base = OTHER; note = 2'-O-methyl ribonucleotide
  modified_base 99: mod_base = OTHER; note = 2'-O-methyl ribonucleotide
  modified_base 100: mod_base = OTHER; note = 2'-O-methyl ribonucleotide
  modified_base 1..4: mod_base = OTHER; note = phosphorothioate linkage
  modified_base 97..100: mod_base = OTHER; note = phosphorothioate linkage
gcggctgtacccacccgccagttttagagctagaaatagcaagttaaaataaggctagtccgttatcaacttgaaaaagtggcaccgagtcggtgctttt

SEQ ID NO: 406 - RNA, 100 nt, synthetic construct
  source 1..100: mol_type = other RNA
  modified_base 1: mod_base = OTHER; note = 2'-O-methyl ribonucleotide
  modified_base 2: mod_base = OTHER; note = 2'-O-methyl ribonucleotide
  modified_base 3: mod_base = OTHER; note = 2'-O-methyl ribonucleotide
  modified_base 98: mod_base = OTHER; note = 2'-O-methyl ribonucleotide
  modified_base 99: mod_base = OTHER; note = 2'-O-methyl ribonucleotide
  modified_base 100: mod_base = OTHER; note = 2'-O-methyl ribonucleotide
  modified_base 1..4: mod_base = OTHER; note = phosphorothioate linkage
  modified_base 97..100: mod_base = OTHER; note = phosphorothioate linkage
caccgctgccggcaacttccgttttagagctagaaatagcaagttaaaataaggctagtccgttatcaacttgaaaaagtggcaccgagtcggtgctttt

SEQ ID NO: 407 - RNA, 100 nt, synthetic construct
  source 1..100: mol_type = other RNA
  modified_base 1: mod_base = OTHER; note = 2'-O-methyl ribonucleotide
  modified_base 2: mod_base = OTHER; note = 2'-O-methyl ribonucleotide
  modified_base 3: mod_base = OTHER; note = 2'-O-methyl ribonucleotide
  modified_base 98: mod_base = OTHER; note = 2'-O-methyl ribonucleotide
  modified_base 99: mod_base = OTHER; note = 2'-O-methyl ribonucleotide
  modified_base 100: mod_base = OTHER; note = 2'-O-methyl ribonucleotide
  modified_base 1..4: mod_base = OTHER; note = phosphorothioate linkage
  modified_base 97..100: mod_base = OTHER; note = phosphorothioate linkage
agccctcgccaggcgctggcgttttagagctagaaatagcaagttaaaataaggctagtccgttatcaacttgaaaaagtggcaccgagtcggtgctttt

SEQ ID NO: 408 - RNA, 100 nt, synthetic construct
  source 1..100: mol_type = other RNA
  modified_base 1: mod_base = OTHER; note = 2'-O-methyl ribonucleotide
  modified_base 2: mod_base = OTHER; note = 2'-O-methyl ribonucleotide
  modified_base 3: mod_base = OTHER; note = 2'-O-methyl ribonucleotide
  modified_base 98: mod_base = OTHER; note = 2'-O-methyl ribonucleotide
  modified_base 99: mod_base = OTHER; note = 2'-O-methyl ribonucleotide
  modified_base 100: mod_base = OTHER; note = 2'-O-methyl ribonucleotide
  modified_base 1..4: mod_base = OTHER; note = phosphorothioate linkage
  modified_base 97..100: mod_base = OTHER; note = phosphorothioate linkage
caacgccgcctgccagcgccgttttagagctagaaatagcaagttaaaataaggctagtccgttatcaacttgaaaaagtggcaccgagtcggtgctttt

SEQ ID NO: 409 - RNA, 100 nt, synthetic construct
  source 1..100: mol_type = other RNA
  modified_base 1: mod_base = OTHER; note = 2'-O-methyl ribonucleotide
  modified_base 2: mod_base = OTHER; note = 2'-O-methyl ribonucleotide
  modified_base 3: mod_base = OTHER; note = 2'-O-methyl ribonucleotide
  modified_base 98: mod_base = OTHER; note = 2'-O-methyl ribonucleotide
  modified_base 99: mod_base = OTHER; note = 2'-O-methyl ribonucleotide
  modified_base 100: mod_base = OTHER; note = 2'-O-methyl ribonucleotide
  modified_base 1..4: mod_base = OTHER; note = phosphorothioate linkage
  modified_base 97..100: mod_base = OTHER; note = phosphorothioate linkage
gcacgaccccagccctcgccgttttagagctagaaatagcaagttaaaataaggctagtccgttatcaacttgaaaaagtggcaccgagtcggtgctttt

SEQ ID NO: 410 - RNA, 100 nt, synthetic construct
  source 1..100: mol_type = other RNA
  modified_base 1: mod_base = OTHER; note = 2'-O-methyl ribonucleotide
  modified_base 2: mod_base = OTHER; note = 2'-O-methyl ribonucleotide
  modified_base 3: mod_base = OTHER; note = 2'-O-methyl ribonucleotide
  modified_base 98: mod_base = OTHER; note = 2'-O-methyl ribonucleotide
  modified_base 99: mod_base = OTHER; note = 2'-O-methyl ribonucleotide
  modified_base 100: mod_base = OTHER; note = 2'-O-methyl ribonucleotide
  modified_base 1..4: mod_base = OTHER; note = phosphorothioate linkage
  modified_base 97..100: mod_base = OTHER; note = phosphorothioate linkage
ccgcctgccagcgcctggcggttttagagctagaaatagcaagttaaaataaggctagtccgttatcaacttgaaaaagtggcaccgagtcggtgctttt

SEQ ID NO: 411 - RNA, 100 nt, synthetic construct
  source 1..100: mol_type = other RNA
  modified_base 1: mod_base = OTHER; note = 2'-O-methyl ribonucleotide
  modified_base 2: mod_base = OTHER; note = 2'-O-methyl ribonucleotide
  modified_base 3: mod_base = OTHER; note = 2'-O-methyl ribonucleotide
  modified_base 98: mod_base = OTHER; note = 2'-O-methyl ribonucleotide
  modified_base 99: mod_base = OTHER; note = 2'-O-methyl ribonucleotide
  modified_base 100: mod_base = OTHER; note = 2'-O-methyl ribonucleotide
  modified_base 1..4: mod_base = OTHER; note = phosphorothioate linkage
  modified_base 97..100: mod_base = OTHER; note = phosphorothioate linkage
tgccagcgcctggcgagggcgttttagagctagaaatagcaagttaaaataaggctagtccgttatcaacttgaaaaagtggcaccgagtcggtgctttt

SEQ ID NO: 412 - RNA, 100 nt, synthetic construct
  source 1..100: mol_type = other RNA
  modified_base 1: mod_base = OTHER; note = 2'-O-methyl ribonucleotide
  modified_base 2: mod_base = OTHER; note = 2'-O-methyl ribonucleotide
  modified_base 3: mod_base = OTHER; note = 2'-O-methyl ribonucleotide
  modified_base 98: mod_base = OTHER; note = 2'-O-methyl ribonucleotide
  modified_base 99: mod_base = OTHER; note = 2'-O-methyl ribonucleotide
  modified_base 100: mod_base = OTHER; note = 2'-O-methyl ribonucleotide
  modified_base 1..4: mod_base = OTHER; note = phosphorothioate linkage
  modified_base 97..100: mod_base = OTHER; note = phosphorothioate linkage
tgctgctgcccctggcgggtgttttagagctagaaatagcaagttaaaataaggctagtccgttatcaacttgaaaaagtggcaccgagtcggtgctttt

SEQ ID NO: 413 - RNA, 100 nt, synthetic construct
  source 1..100: mol_type = other RNA
  modified_base 1: mod_base = OTHER; note = 2'-O-methyl ribonucleotide
  modified_base 2: mod_base = OTHER; note = 2'-O-methyl ribonucleotide
  modified_base 3: mod_base = OTHER; note = 2'-O-methyl ribonucleotide
  modified_base 98: mod_base = OTHER; note = 2'-O-methyl ribonucleotide
  modified_base 99: mod_base = OTHER; note = 2'-O-methyl ribonucleotide
  modified_base 100: mod_base = OTHER; note = 2'-O-methyl ribonucleotide
  modified_base 1..4: mod_base = OTHER; note = phosphorothioate linkage
  modified_base 97..100: mod_base = OTHER; note = phosphorothioate linkage
tcaccgctgccggcaacttcgttttagagctagaaatagcaagttaaaataaggctagtccgttatcaacttgaaaaagtggcaccgagtcggtgctttt

SEQ ID NO: 414 - RNA, 100 nt, synthetic construct
  source 1..100: mol_type = other RNA
  modified_base 1: mod_base = OTHER; note = 2'-O-methyl ribonucleotide
  modified_base 2: mod_base = OTHER; note = 2'-O-methyl ribonucleotide
  modified_base 3: mod_base = OTHER; note = 2'-O-methyl ribonucleotide
  modified_base 98: mod_base = OTHER; note = 2'-O-methyl ribonucleotide
  modified_base 99: mod_base = OTHER; note = 2'-O-methyl ribonucleotide
  modified_base 100: mod_base = OTHER; note = 2'-O-methyl ribonucleotide
  modified_base 1..4: mod_base = OTHER; note = phosphorothioate linkage
  modified_base 97..100: mod_base = OTHER; note = phosphorothioate linkage
ggcgagggctggggtcgtgcgttttagagctagaaatagcaagttaaaataaggctagtccgttatcaacttgaaaaagtggcaccgagtcggtgctttt

SEQ ID NO: 415 - RNA, 100 nt, synthetic construct
  source 1..100: mol_type = other RNA
  modified_base 1: mod_base = OTHER; note = 2'-O-methyl ribonucleotide
  modified_base 2: mod_base = OTHER; note = 2'-O-methyl ribonucleotide
  modified_base 3: mod_base = OTHER; note = 2'-O-methyl ribonucleotide
  modified_base 98: mod_base = OTHER; note = 2'-O-methyl ribonucleotide
  modified_base 99: mod_base = OTHER; note = 2'-O-methyl ribonucleotide
  modified_base 100: mod_base = OTHER; note = 2'-O-methyl ribonucleotide
  modified_base 1..4: mod_base = OTHER; note = phosphorothioate linkage
  modified_base 97..100: mod_base = OTHER; note = phosphorothioate linkage
ttccgaataaactccaggccgttttagagctagaaatagcaagttaaaataaggctagtccgttatcaacttgaaaaagtggcaccgagtcggtgctttt

SEQ ID NO: 416 - RNA, 100 nt, synthetic construct
  source 1..100: mol_type = other RNA
  modified_base 1: mod_base = OTHER; note = 2'-O-methyl ribonucleotide
  modified_base 2: mod_base = OTHER; note = 2'-O-methyl ribonucleotide
  modified_base 3: mod_base = OTHER; note = 2'-O-methyl ribonucleotide
  modified_base 98: mod_base = OTHER; note = 2'-O-methyl ribonucleotide
  modified_base 99: mod_base = OTHER; note = 2'-O-methyl ribonucleotide
  modified_base 100: mod_base = OTHER; note = 2'-O-methyl ribonucleotide
  modified_base 1..4: mod_base = OTHER; note = phosphorothioate linkage
  modified_base 97..100: mod_base = OTHER; note = phosphorothioate linkage
gtgctgctgcccctggcggggttttagagctagaaatagcaagttaaaataaggctagtccgttatcaacttgaaaaagtggcaccgagtcggtgctttt

SEQ ID NO: 417 - RNA, 100 nt, synthetic construct
  source 1..100: mol_type = other RNA
  modified_base 1: mod_base = OTHER; note = 2'-O-methyl ribonucleotide
  modified_base 2: mod_base = OTHER; note = 2'-O-methyl ribonucleotide
  modified_base 3: mod_base = OTHER; note = 2'-O-methyl ribonucleotide
  modified_base 98: mod_base = OTHER; note = 2'-O-methyl ribonucleotide
  modified_base 99: mod_base = OTHER; note = 2'-O-methyl ribonucleotide
  modified_base 100: mod_base = OTHER; note = 2'-O-methyl ribonucleotide
  modified_base 1..4: mod_base = OTHER; note = phosphorothioate linkage
  modified_base 97..100: mod_base = OTHER; note = phosphorothioate linkage
gccagcgcctggcgagggctgttttagagctagaaatagcaagttaaaataaggctagtccgttatcaacttgaaaaagtggcaccgagtcggtgctttt

SEQ ID NO: 418 - RNA, 100 nt, synthetic construct
  source 1..100: mol_type = other RNA
  modified_base 1: mod_base = OTHER; note = 2'-O-methyl ribonucleotide
  modified_base 2: mod_base = OTHER; note = 2'-O-methyl ribonucleotide
  modified_base 3: mod_base = OTHER; note = 2'-O-methyl ribonucleotide
  modified_base 98: mod_base = OTHER; note = 2'-O-methyl ribonucleotide
  modified_base 99: mod_base = OTHER; note = 2'-O-methyl ribonucleotide
  modified_base 100: mod_base = OTHER; note = 2'-O-methyl ribonucleotide
  modified_base 1..4: mod_base = OTHER; note = phosphorothioate linkage
  modified_base 97..100: mod_base = OTHER; note = phosphorothioate linkage
cctcgccaggcgctggcagggttttagagctagaaatagcaagttaaaataaggctagtccgttatcaacttgaaaaagtggcaccgagtcggtgctttt

SEQ ID NO: 419 - RNA, 100 nt, synthetic construct; identical to SEQ ID NO: 253
  source 1..100: mol_type = other RNA
  modified_base 1: mod_base = OTHER; note = 2'-O-methyl ribonucleotide
  modified_base 2: mod_base = OTHER; note = 2'-O-methyl ribonucleotide
  modified_base 3: mod_base = OTHER; note = 2'-O-methyl ribonucleotide
  modified_base 5: mod_base = OTHER; note = 2'-O-methyl ribonucleotide
  modified_base 29: mod_base = OTHER; note = 2'-O-methyl ribonucleotide
  modified_base 30: mod_base = OTHER; note = 2'-O-methyl ribonucleotide
  modified_base 31: mod_base = OTHER; note = 2'-O-methyl ribonucleotide
  modified_base 32: mod_base = OTHER; note = 2'-O-methyl ribonucleotide
  modified_base 33: mod_base = OTHER; note = 2'-O-methyl ribonucleotide
  modified_base 34: mod_base = OTHER; note = 2'-O-methyl ribonucleotide
  modified_base 35: mod_base = OTHER; note = 2'-O-methyl ribonucleotide
  modified_base 36: mod_base = OTHER; note = 2'-O-methyl ribonucleotide
  modified_base 37: mod_base = OTHER; note = 2'-O-methyl ribonucleotide
  modified_base 38: mod_base = OTHER; note = 2'-O-methyl ribonucleotide
  modified_base 39: mod_base = OTHER; note = 2'-O-methyl ribonucleotide
  modified_base 40: mod_base = OTHER; note = 2'-O-methyl ribonucleotide
  modified_base 69: mod_base = OTHER; note = 2'-O-methyl ribonucleotide
  modified_base 70: mod_base = OTHER; note = 2'-O-methyl ribonucleotide
  modified_base 71: mod_base = OTHER; note = 2'-O-methyl ribonucleotide
  modified_base 72: mod_base = OTHER; note = 2'-O-methyl ribonucleotide
  modified_base 73: mod_base = OTHER; note = 2'-O-methyl ribonucleotide
  modified_base 74: mod_base = OTHER; note = 2'-O-methyl ribonucleotide
  modified_base 75: mod_base = OTHER; note = 2'-O-methyl ribonucleotide
  modified_base 76: mod_base = OTHER; note = 2'-O-methyl ribonucleotide
  modified_base 77: mod_base = OTHER; note = 2'-O-methyl ribonucleotide
  modified_base 78: mod_base = OTHER; note = 2'-O-methyl ribonucleotide
  modified_base 79: mod_base = OTHER; note = 2'-O-methyl ribonucleotide
  modified_base 80: mod_base = OTHER; note = 2'-O-methyl ribonucleotide
  modified_base 81: mod_base = OTHER; note = 2'-O-methyl ribonucleotide
  modified_base 82: mod_base = OTHER; note = 2'-O-methyl ribonucleotide
  modified_base 83: mod_base = OTHER; note = 2'-O-methyl ribonucleotide
  modified_base 84: mod_base = OTHER; note = 2'-O-methyl ribonucleotide
  modified_base 85: mod_base = OTHER; note = 2'-O-methyl ribonucleotide
  modified_base 86: mod_base = OTHER; note = 2'-O-methyl ribonucleotide
  modified_base 87: mod_base = OTHER; note = 2'-O-methyl ribonucleotide
  modified_base 88: mod_base = OTHER; note = 2'-O-methyl ribonucleotide
  modified_base 89: mod_base = OTHER; note = 2'-O-methyl ribonucleotide
  modified_base 90: mod_base = OTHER; note = 2'-O-methyl ribonucleotide
  modified_base 91: mod_base = OTHER; note = 2'-O-methyl ribonucleotide
  modified_base 92: mod_base = OTHER; note = 2'-O-methyl ribonucleotide
  modified_base 93: mod_base = OTHER; note = 2'-O-methyl ribonucleotide
  modified_base 94: mod_base = OTHER; note = 2'-O-methyl ribonucleotide
  modified_base 95: mod_base = OTHER; note = 2'-O-methyl ribonucleotide
  modified_base 96: mod_base = OTHER; note = 2'-O-methyl ribonucleotide
  modified_base 97: mod_base = OTHER; note = 2'-O-methyl ribonucleotide
  modified_base 98: mod_base = OTHER; note = 2'-O-methyl ribonucleotide
  modified_base 99: mod_base = OTHER; note = 2'-O-methyl ribonucleotide
  modified_base 100: mod_base = OTHER; note = 2'-O-methyl ribonucleotide
  modified_base 5: mod_base = OTHER; note = cytidine phosphonoacetate
  modified_base 1..4: mod_base = OTHER; note = phosphorothioate linkage
  modified_base 97..100: mod_base = OTHER; note = phosphorothioate linkage

SEQ ID NO: 420 - RNA, 100 nt, synthetic construct; identical to SEQ ID NO: 253
  source 1..100: mol_type = other RNA
  modified_base 1: mod_base = OTHER; note = 2'-O-methyl ribonucleotide
  modified_base 2: mod_base = OTHER; note = 2'-O-methyl ribonucleotide
  modified_base 3: mod_base = OTHER; note = 2'-O-methyl ribonucleotide
  modified_base 11: mod_base = OTHER; note = 2'-O-methyl ribonucleotide
  modified_base 29: mod_base = OTHER; note = 2'-O-methyl ribonucleotide
  modified_base 30: mod_base = OTHER; note = 2'-O-methyl ribonucleotide
  modified_base 31: mod_base = OTHER; note = 2'-O-methyl ribonucleotide
  modified_base 32: mod_base = OTHER; note = 2'-O-methyl ribonucleotide
  modified_base 33: mod_base = OTHER; note = 2'-O-methyl ribonucleotide
  modified_base 34: mod_base = OTHER; note = 2'-O-methyl ribonucleotide
  modified_base 35: mod_base = OTHER; note = 2'-O-methyl ribonucleotide
  modified_base 36: mod_base = OTHER; note = 2'-O-methyl ribonucleotide
  modified_base 37: mod_base = OTHER; note = 2'-O-methyl ribonucleotide
  modified_base 38: mod_base = OTHER; note = 2'-O-methyl ribonucleotide
  modified_base 39: mod_base = OTHER; note = 2'-O-methyl ribonucleotide
  modified_base 40: mod_base = OTHER; note = 2'-O-methyl ribonucleotide
  modified_base 69: mod_base = OTHER; note = 2'-O-methyl ribonucleotide
  modified_base 70: mod_base = OTHER; note = 2'-O-methyl ribonucleotide
  modified_base 71: mod_base = OTHER; note = 2'-O-methyl ribonucleotide
  modified_base 72: mod_base = OTHER; note = 2'-O-methyl ribonucleotide
  modified_base 73: mod_base = OTHER; note = 2'-O-methyl ribonucleotide
  modified_base 74: mod_base = OTHER; note = 2'-O-methyl ribonucleotide
  modified_base 75: mod_base = OTHER; note = 2'-O-methyl ribonucleotide
  modified_base 76: mod_base = OTHER; note = 2'-O-methyl ribonucleotide
  modified_base 77: mod_base = OTHER; note = 2'-O-methyl ribonucleotide
  modified_base 78: mod_base = OTHER; note = 2'-O-methyl ribonucleotide
  modified_base 79: mod_base = OTHER; note = 2'-O-methyl ribonucleotide
  modified_base 80: mod_base = OTHER; note = 2'-O-methyl ribonucleotide
  modified_base 81: mod_base = OTHER; note = 2'-O-methyl ribonucleotide
  modified_base 82: mod_base = OTHER; note = 2'-O-methyl ribonucleotide
  modified_base 83: mod_base = OTHER; note = 2'-O-methyl ribonucleotide
  modified_base 84: mod_base = OTHER; note = 2'-O-methyl ribonucleotide
  modified_base 85: mod_base = OTHER; note = 2'-O-methyl ribonucleotide
  modified_base 86: mod_base = OTHER; note = 2'-O-methyl ribonucleotide
  modified_base 87: mod_base = OTHER; note = 2'-O-methyl ribonucleotide
  modified_base 88: mod_base = OTHER; note = 2'-O-methyl ribonucleotide
  modified_base 89: mod_base = OTHER; note = 2'-O-methyl ribonucleotide
  modified_base 90: mod_base = OTHER; note = 2'-O-methyl ribonucleotide
  modified_base 91: mod_base = OTHER; note = 2'-O-methyl ribonucleotide
  modified_base 92: mod_base = OTHER; note = 2'-O-methyl ribonucleotide
  modified_base 93: mod_base = OTHER; note = 2'-O-methyl ribonucleotide
  modified_base 94: mod_base = OTHER; note = 2'-O-methyl ribonucleotide
  modified_base 95: mod_base = OTHER; note = 2'-O-methyl ribonucleotide
  modified_base 96: mod_base = OTHER; note = 2'-O-methyl ribonucleotide
  modified_base 97: mod_base = OTHER; note = 2'-O-methyl ribonucleotide
  modified_base 98: mod_base = OTHER; note = 2'-O-methyl ribonucleotide
  modified_base 99: mod_base = OTHER; note = 2'-O-methyl ribonucleotide
  modified_base 100: mod_base = OTHER; note = 2'-O-methyl ribonucleotide
  modified_base 11: mod_base = OTHER; note = uridine phosphonoacetate
  modified_base 1..4: mod_base = OTHER; note = phosphorothioate linkage
  modified_base 97..100: mod_base = OTHER; note = phosphorothioate linkage

SEQ ID NO: 421 - RNA, 100 nt, synthetic construct
  source 1..100: mol_type = other RNA
  modified_base 1: mod_base = OTHER; note = 2'-O-methyl ribonucleotide
  modified_base 2: mod_base = OTHER; note = 2'-O-methyl ribonucleotide
  modified_base 3: mod_base = OTHER; note = 2'-O-methyl ribonucleotide
  modified_base 21: mod_base = OTHER; note = 2'-O-methyl ribonucleotide
  modified_base 28: mod_base = OTHER; note = 2'-O-methyl ribonucleotide
  modified_base 29: mod_base = OTHER; note = 2'-O-methyl ribonucleotide
  modified_base 30: mod_base = OTHER; note = 2'-O-methyl ribonucleotide
  modified_base 31: mod_base = OTHER; note = 2'-O-methyl ribonucleotide
  modified_base 32: mod_base = OTHER; note = 2'-O-methyl ribonucleotide
  modified_base 34: mod_base = OTHER; note = 2'-O-methyl ribonucleotide
  modified_base 35: mod_base = OTHER; note = 2'-O-methyl ribonucleotide
  modified_base 36: mod_base = OTHER; note = 2'-O-methyl ribonucleotide
  modified_base 37: mod_base = OTHER; note = 2'-O-methyl ribonucleotide
  modified_base 38: mod_base = OTHER; note = 2'-O-methyl ribonucleotide
  modified_base 39: mod_base = OTHER; note = 2'-O-methyl ribonucleotide
  modified_base 40: mod_base = OTHER; note = 2'-O-methyl ribonucleotide
  modified_base 41: mod_base = OTHER; note = 2'-O-methyl ribonucleotide
  modified_base 42: mod_base = OTHER; note = 2'-O-methyl ribonucleotide
  modified_base 46: mod_base = OTHER; note = 2'-O-methyl ribonucleotide
  modified_base 48: mod_base = OTHER; note = 2'-O-methyl ribonucleotide
  modified_base 50: mod_base = OTHER; note = 2'-O-methyl ribonucleotide
  modified_base 52: mod_base = OTHER; note = 2'-O-methyl ribonucleotide
  modified_base 53: mod_base = OTHER; note = 2'-O-methyl ribonucleotide
  modified_base 54: mod_base = OTHER; note = 2'-O-methyl ribonucleotide
  modified_base 57: mod_base = OTHER; note = 2'-O-methyl ribonucleotide
  modified_base 61: mod_base = OTHER; note = 2'-O-methyl ribonucleotide
  modified_base 66: mod_base = OTHER; note = 2'-O-methyl ribonucleotide
  modified_base 67: mod_base = OTHER; note = 2'-O-methyl ribonucleotide
  modified_base 70: mod_base = OTHER; note = 2'-O-methyl ribonucleotide
  modified_base 71: mod_base = OTHER; note = 2'-O-methyl ribonucleotide
  modified_base 72: mod_base = OTHER; note = 2'-O-methyl ribonucleotide
  modified_base 74: mod_base = OTHER; note = 2'-O-methyl ribonucleotide
  modified_base 75: mod_base = OTHER; note = 2'-O-methyl ribonucleotide
  modified_base 76: mod_base = OTHER; note = 2'-O-methyl ribonucleotide
  modified_base 77: mod_base = OTHER; note = 2'-O-methyl ribonucleotide
  modified_base 78: mod_base = OTHER; note = 2'-O-methyl ribonucleotide
  modified_base 79: mod_base = OTHER; note = 2'-O-methyl ribonucleotide
  modified_base 80: mod_base = OTHER; note = 2'-O-methyl ribonucleotide
  modified_base 82: mod_base = OTHER; note = 2'-O-methyl ribonucleotide
  modified_base 83: mod_base = OTHER; note = 2'-O-methyl ribonucleotide
  modified_base 84: mod_base = OTHER; note = 2'-O-methyl ribonucleotide
  modified_base 85: mod_base = OTHER; note = 2'-O-methyl ribonucleotide
  modified_base 86: mod_base = OTHER; note = 2'-O-methyl ribonucleotide
  modified_base 87: mod_base = OTHER; note = 2'-O-methyl ribonucleotide
  modified_base 89: mod_base = OTHER; note = 2'-O-methyl ribonucleotide
  modified_base 92: mod_base = OTHER; note = 2'-O-methyl ribonucleotide
  modified_base 93: mod_base = OTHER; note = 2'-O-methyl ribonucleotide
  modified_base 94: mod_base = OTHER; note = 2'-O-methyl ribonucleotide
  modified_base 95: mod_base = OTHER; note = 2'-O-methyl ribonucleotide
  modified_base 96: mod_base = OTHER; note = 2'-O-methyl ribonucleotide
  modified_base 97: mod_base = OTHER; note = 2'-O-methyl ribonucleotide
  modified_base 98: mod_base = OTHER; note = 2'-O-methyl ribonucleotide
  modified_base 99: mod_base = OTHER; note = 2'-O-methyl ribonucleotide
  modified_base 100: mod_base = OTHER; note = 2'-O-methyl ribonucleotide
  modified_base 1..4: mod_base = OTHER; note = phosphorothioate linkage
  modified_base 97..100: mod_base = OTHER; note = phosphorothioate linkage
cccataccttggagcaacgggttttagagctagaaatagcaagttaaaataaggctagtccgttatcaacttgaaaaagtggcaccgagtcggtgctttt

SEQ ID NO: 422 - RNA, 100 nt, synthetic construct
  source 1..100: mol_type = other RNA
  modified_base 1: mod_base = OTHER; note = 2'-O-methyl ribonucleotide
  modified_base 2: mod_base = OTHER; note = 2'-O-methyl ribonucleotide
  modified_base 3: mod_base = OTHER; note = 2'-O-methyl ribonucleotide
  modified_base 21: mod_base = OTHER; note = 2'-O-methyl ribonucleotide
  modified_base 28: mod_base = OTHER; note = 2'-O-methyl ribonucleotide
  modified_base 29: mod_base = OTHER; note = 2'-O-methyl ribonucleotide
  modified_base 30: mod_base = OTHER; note = 2'-O-methyl ribonucleotide
  modified_base 31: mod_base = OTHER; note = 2'-O-methyl ribonucleotide
  modified_base 32: mod_base = OTHER; note = 2'-O-methyl ribonucleotide
  modified_base 34: mod_base = OTHER; note = 2'-O-methyl ribonucleotide
  modified_base 35: mod_base = OTHER; note = 2'-O-methyl ribonucleotide
  modified_base 36: mod_base = OTHER; note = 2'-O-methyl ribonucleotide
  modified_base 37: mod_base = OTHER; note = 2'-O-methyl ribonucleotide
  modified_base 38: mod_base = OTHER; note = 2'-O-methyl ribonucleotide
  modified_base 39: mod_base = OTHER; note = 2'-O-methyl ribonucleotide
  modified_base 40: mod_base = OTHER; note = 2'-O-methyl ribonucleotide
  modified_base 41: mod_base = OTHER; note = 2'-O-methyl ribonucleotide
  modified_base 42: mod_base = OTHER; note = 2'-O-methyl ribonucleotide
  modified_base 46: mod_base = OTHER; note = 2'-O-methyl ribonucleotide
  modified_base 48: mod_base = OTHER; note = 2'-O-methyl ribonucleotide
  modified_base 50: mod_base = OTHER; note = 2'-O-methyl ribonucleotide
  modified_base 52: mod_base = OTHER; note = 2'-O-methyl ribonucleotide
  modified_base 53: mod_base = OTHER; note = 2'-O-methyl ribonucleotide
  modified_base 54: mod_base = OTHER; note = 2'-O-methyl ribonucleotide
  modified_base 57: mod_base = OTHER; note = 2'-O-methyl ribonucleotide
  modified_base 61: mod_base = OTHER; note = 2'-O-methyl ribonucleotide
  modified_base 66: mod_base = OTHER; note = 2'-O-methyl ribonucleotide
  modified_base 67: mod_base = OTHER; note = 2'-O-methyl ribonucleotide
  modified_base 70: mod_base = OTHER; note = 2'-O-methyl ribonucleotide
  modified_base 71: mod_base = OTHER; note = 2'-O-methyl ribonucleotide
  modified_base 72: mod_base = OTHER; note = 2'-O-methyl ribonucleotide
  modified_base 74: mod_base = OTHER; note = 2'-O-methyl ribonucleotide
  modified_base 75: mod_base = OTHER; note = 2'-O-methyl ribonucleotide
  modified_base 76: mod_base = OTHER; note = 2'-O-methyl ribonucleotide
  modified_base 77: mod_base = OTHER; note = 2'-O-methyl ribonucleotide
  modified_base 78: mod_base = OTHER; note = 2'-O-methyl ribonucleotide
  modified_base 79: mod_base = OTHER; note = 2'-O-methyl ribonucleotide
  modified_base 80: mod_base = OTHER; note = 2'-O-methyl ribonucleotide
  modified_base 82: mod_base = OTHER; note = 2'-O-methyl ribonucleotide
  modified_base 83: mod_base = OTHER; note = 2'-O-methyl ribonucleotide
  modified_base 84: mod_base = OTHER; note = 2'-O-methyl ribonucleotide
  modified_base 85: mod_base = OTHER; note = 2'-O-methyl ribonucleotide
  modified_base 86: mod_base = OTHER; note = 2'-O-methyl ribonucleotide
  modified_base 87: mod_base = OTHER; note = 2'-O-methyl ribonucleotide
  modified_base 89: mod_base = OTHER; note = 2'-O-methyl ribonucleotide
  modified_base 92: mod_base = OTHER; note = 2'-O-methyl ribonucleotide
  modified_base 93: mod_base = OTHER; note = 2'-O-methyl ribonucleotide
  modified_base 94: mod_base = OTHER; note = 2'-O-methyl ribonucleotide
  modified_base 95: mod_base = OTHER; note = 2'-O-methyl ribonucleotide
  modified_base 96: mod_base = OTHER; note = 2'-O-methyl ribonucleotide
  modified_base 97: mod_base = OTHER; note = 2'-O-methyl ribonucleotide
  modified_base 98: mod_base = OTHER; note = 2'-O-methyl ribonucleotide
  modified_base 99: mod_base = OTHER; note = 2'-O-methyl ribonucleotide
  modified_base 100: mod_base = OTHER; note = 2'-O-methyl ribonucleotide
  modified_base 1..4: mod_base = OTHER; note = phosphorothioate linkage
  modified_base 97..100: mod_base = OTHER; note = phosphorothioate linkage
gagatacctgagtaactttcgttttagagctagaaatagcaagttaaaataaggctagtccgttatcaacttgaaaaagtggcaccgagtcggtgctttt

SEQ ID NO: 423 - RNA, 100 nt, synthetic construct
  source 1..100: mol_type = other RNA
  modified_base 1: mod_base = OTHER; note = 2'-O-methyl ribonucleotide
  modified_base 2: mod_base = OTHER; note = 2'-O-methyl ribonucleotide
  modified_base 3: mod_base = OTHER; note = 2'-O-methyl ribonucleotide
  modified_base 98: mod_base = OTHER; note = 2'-O-methyl ribonucleotide
  modified_base 99: mod_base = OTHER; note = 2'-O-methyl ribonucleotide
  modified_base 100: mod_base = OTHER; note = 2'-O-methyl ribonucleotide
  modified_base 1..4: mod_base = OTHER; note = phosphorothioate linkage
  modified_base 97..100: mod_base = OTHER; note = phosphorothioate linkage
acgtgggagaactacaaatagttttagagctagaaatagcaagttaaaataaggctagtccgttatcaacttgaaaaagtggcaccgagtcggtgctttt

SEQ ID NO: 424 - RNA, 100 nt, synthetic construct
  source 1..100: mol_type = other RNA
  modified_base 1: mod_base = OTHER; note = 2'-O-methyl ribonucleotide
  modified_base 2: mod_base = OTHER; note = 2'-O-methyl ribonucleotide
  modified_base 3: mod_base = OTHER; note = 2'-O-methyl ribonucleotide
  modified_base 98: mod_base = OTHER; note = 2'-O-methyl ribonucleotide
  modified_base 99: mod_base = OTHER; note = 2'-O-methyl ribonucleotide
  modified_base 100: mod_base = OTHER; note = 2'-O-methyl ribonucleotide
  modified_base 1..4: mod_base = OTHER; note = phosphorothioate linkage
  modified_base 97..100: mod_base = OTHER; note = phosphorothioate linkage
cgatgttgaattaatgtccagttttagagctagaaatagcaagttaaaataaggctagtccgttatcaacttgaaaaagtggcaccgagtcggtgctttt

SEQ ID NO: 425 - RNA, 100 nt, synthetic construct
  source 1..100: mol_type = other RNA
  modified_base 1: mod_base = OTHER; note = 2'-O-methyl ribonucleotide
  modified_base 2: mod_base = OTHER; note = 2'-O-methyl ribonucleotide
  modified_base 3: mod_base = OTHER; note = 2'-O-methyl ribonucleotide
  modified_base 98: mod_base = OTHER; note = 2'-O-methyl ribonucleotide
  modified_base 99: mod_base = OTHER; note = 2'-O-methyl ribonucleotide
  modified_base 100: mod_base = OTHER; note = 2'-O-methyl ribonucleotide
  modified_base 1..4: mod_base = OTHER; note = phosphorothioate linkage
  modified_base 97..100: mod_base = OTHER; note = phosphorothioate linkage
cacaaaacttcaatgaaacggttttagagctagaaatagcaagttaaaataaggctagtccgttatcaacttgaaaaagtggcaccgagtcggtgctttt

SEQ ID NO: 426 - RNA, 100 nt, synthetic construct
  source 1..100: mol_type = other RNA
  modified_base 1: mod_base = OTHER; note = 2'-O-methyl ribonucleotide
  modified_base 2: mod_base = OTHER; note = 2'-O-methyl ribonucleotide
  modified_base 3: mod_base = OTHER; note = 2'-O-methyl ribonucleotide
  modified_base 98: mod_base = OTHER; note = 2'-O-methyl ribonucleotide
  modified_base 99: mod_base = OTHER; note = 2'-O-methyl ribonucleotide
  modified_base 100: mod_base = OTHER; note = 2'-O-methyl ribonucleotide
  modified_base 1..4: mod_base = OTHER; note = phosphorothioate linkage
  modified_base 97..100: mod_base = OTHER; note = phosphorothioate linkage
tacgaattgagttggaagacgttttagagctagaaatagcaagttaaaataaggctagtccgttatcaacttgaaaaagtggcaccgagtcggtgctttt

SEQ ID NO: 427 - RNA, 100 nt, synthetic construct
  source 1..100: mol_type = other RNA
  modified_base 1: mod_base = OTHER; note = 2'-O-methyl ribonucleotide
  modified_base 2: mod_base = OTHER; note = 2'-O-methyl ribonucleotide
  modified_base 3: mod_base = OTHER; note = 2'-O-methyl ribonucleotide
  modified_base 98: mod_base = OTHER; note = 2'-O-methyl ribonucleotide
  modified_base 99: mod_base = OTHER; note = 2'-O-methyl ribonucleotide
  modified_base 100: mod_base = OTHER; note = 2'-O-methyl ribonucleotide
  modified_base 1..4: mod_base = OTHER; note = phosphorothioate linkage
  modified_base 97..100: mod_base = OTHER; note = phosphorothioate linkage
ctatggagtatatcttctctgttttagagctagaaatagcaagttaaaataaggctagtccgttatcaacttgaaaaagtggcaccgagtcggtgctttt

SEQ ID NO: 428 - RNA, 100 nt, synthetic construct
  source 1..100: mol_type = other RNA
  modified_base 1: mod_base = OTHER; note = 2'-O-methyl ribonucleotide
  modified_base 2: mod_base = OTHER; note = 2'-O-methyl ribonucleotide
  modified_base 3: mod_base = OTHER; note = 2'-O-methyl ribonucleotide
  modified_base 21: mod_base = OTHER; note = 2'-O-methyl ribonucleotide
  modified_base 28: mod_base = OTHER; note = 2'-O-methyl ribonucleotide
  modified_base 29: mod_base = OTHER; note = 2'-O-methyl ribonucleotide
  modified_base 30: mod_base = OTHER; note = 2'-O-methyl ribonucleotide
  modified_base 31: mod_base = OTHER; note = 2'-O-methyl ribonucleotide
  modified_base 32: mod_base = OTHER; note = 2'-O-methyl ribonucleotide
  modified_base 33: mod_base = OTHER; note = 2'-O-methyl ribonucleotide
  modified_base 34: mod_base = OTHER; note = 2'-O-methyl ribonucleotide
  modified_base 35: mod_base = OTHER; note = 2'-O-methyl ribonucleotide
  modified_base 36: mod_base = OTHER; note = 2'-O-methyl ribonucleotide
  modified_base 37: mod_base = OTHER; note = 2'-O-methyl ribonucleotide
  modified_base 38: mod_base = OTHER; note = 2'-O-methyl ribonucleotide
  modified_base 39: mod_base = OTHER; note = 2'-O-methyl ribonucleotide
  modified_base 40: mod_base = OTHER; note = 2'-O-methyl ribonucleotide
  modified_base 41: mod_base = OTHER; note = 2'-O-methyl ribonucleotide
  modified_base 42: mod_base = OTHER; note = 2'-O-methyl ribonucleotide
  modified_base 46: mod_base = OTHER; note = 2'-O-methyl ribonucleotide
  modified_base 48: mod_base = OTHER; note = 2'-O-methyl ribonucleotide
  modified_base 50: mod_base = OTHER; note = 2'-O-methyl ribonucleotide
  modified_base 52: mod_base = OTHER; note = 2'-O-methyl ribonucleotide
  modified_base 53: mod_base = OTHER; note = 2'-O-methyl ribonucleotide
  modified_base 54: mod_base = OTHER; note = 2'-O-methyl ribonucleotide
  modified_base 55: mod_base = OTHER; note = 2'-O-methyl ribonucleotide
  modified_base 56: mod_base = OTHER; note = 2'-O-methyl ribonucleotide
  modified_base 57: mod_base = OTHER; note = 2'-O-methyl ribonucleotide
  modified_base 60: mod_base = OTHER; note = 2'-O-methyl ribonucleotide
  modified_base 61: mod_base = OTHER; note = 2'-O-methyl ribonucleotide
  modified_base 66: mod_base = OTHER; note = 2'-O-methyl ribonucleotide
  modified_base 67: mod_base = OTHER; note = 2'-O-methyl ribonucleotide
  modified_base 70: mod_base = OTHER; note = 2'-O-methyl ribonucleotide
  modified_base 71: mod_base = OTHER; note = 2'-O-methyl ribonucleotide
  modified_base 72: mod_base = OTHER; note = 2'-O-methyl ribonucleotide
  modified_base 73: mod_base = OTHER; note = 2'-O-methyl ribonucleotide
  modified_base 74: mod_base = OTHER; note = 2'-O-methyl ribonucleotide
  modified_base 75: mod_base = OTHER; note = 2'-O-methyl ribonucleotide
  modified_base 76: mod_base = OTHER; note = 2'-O-methyl ribonucleotide
  modified_base 77: mod_base = OTHER; note = 2'-O-methyl ribonucleotide
  modified_base 78: mod_base = OTHER; note = 2'-O-methyl ribonucleotide
  modified_base 79: mod_base = OTHER; note = 2'-O-methyl ribonucleotide
  modified_base 80: mod_base = OTHER; note = 2'-O-methyl ribonucleotide
  modified_base 81: mod_base = OTHER; note = 2'-O-methyl ribonucleotide
  modified_base 83: mod_base = OTHER; note = 2'-O-methyl ribonucleotide
  modified_base 84: mod_base = OTHER; note = 2'-O-methyl ribonucleotide
  modified_base 85: mod_base = OTHER; note = 2'-O-methyl ribonucleotide
  modified_base 86: mod_base = OTHER; note = 2'-O-methyl ribonucleotide
  modified_base 87: mod_base = OTHER; note = 2'-O-methyl ribonucleotide
  modified_base 88: mod_base = OTHER; note = 2'-O-methyl ribonucleotide
  modified_base 89: mod_base = OTHER; note = 2'-O-methyl ribonucleotide
  modified_base 90: mod_base = OTHER; note = 2'-O-methyl ribonucleotide
  modified_base 91: mod_base = OTHER; note = 2'-O-methyl ribonucleotide
  modified_base 92: mod_base = OTHER; note = 2'-O-methyl ribonucleotide
  modified_base 93: mod_base = OTHER; note = 2'-O-methyl ribonucleotide
  modified_base 94: mod_base = OTHER; note = 2'-O-methyl ribonucleotide
  modified_base 95: mod_base = OTHER; note = 2'-O-methyl ribonucleotide
  modified_base 96: mod_base = OTHER; note = 2'-O-methyl ribonucleotide
  modified_base 97: mod_base = OTHER; note = 2'-O-methyl ribonucleotide
  modified_base 98: mod_base = OTHER; note = 2'-O-methyl ribonucleotide
  modified_base 99: mod_base = OTHER; note = 2'-O-methyl ribonucleotide
  modified_base 100: mod_base = OTHER; note = 2'-O-methyl ribonucleotide
  modified_base 1..4: mod_base = OTHER; note = phosphorothioate linkage
  modified_base 97..100: mod_base = OTHER; note = phosphorothioate linkage
cccgcaccttggcgcagcgggttttagagctagaaatagcaagttaaaataaggctagtccgttaacaacgggaaaccgtggcaccgagtcggtgctttt

SEQ ID NO: 429 - DNA, 100 bp, synthetic construct; identical to SEQ ID NO: 58
  source 1..100: mol_type = other DNA
  modified_base 1: mod_base = OTHER; note = 2'-O-methyl ribonucleotide
  modified_base 2: mod_base = OTHER; note = 2'-O-methyl ribonucleotide
  modified_base 3: mod_base = OTHER; note = 2'-O-methyl ribonucleotide
  modified_base 21: mod_base = OTHER; note = 2'-O-methyl ribonucleotide
  modified_base 28: mod_base = OTHER; note = 2'-O-methyl ribonucleotide
  modified_base 29: mod_base = OTHER; note = 2'-O-methyl ribonucleotide
  modified_base 30: mod_base = OTHER; note = 2'-O-methyl ribonucleotide
  modified_base 31: mod_base = OTHER; note = 2'-O-methyl ribonucleotide
  modified_base 32: mod_base = OTHER; note = 2'-O-methyl ribonucleotide
  modified_base 34: mod_base = OTHER; note = 2'-O-methyl ribonucleotide
  modified_base 35: mod_base = OTHER; note = 2'-O-methyl ribonucleotide
  modified_base 36: mod_base = OTHER; note = 2'-O-methyl ribonucleotide
  modified_base 37: mod_base = OTHER; note = 2'-O-methyl ribonucleotide
  modified_base 38: mod_base = OTHER; note = 2'-O-methyl ribonucleotide
  modified_base 39: mod_base = OTHER; note = 2'-O-methyl ribonucleotide
  modified_base 40: mod_base = OTHER; note = 2'-O-methyl ribonucleotide
  modified_base 41: mod_base = OTHER; note = 2'-O-methyl ribonucleotide
  modified_base 42: mod_base = OTHER; note = 2'-O-methyl ribonucleotide
  modified_base 46: mod_base = OTHER; note = 2'-O-methyl ribonucleotide
  modified_base 48: mod_base = OTHER; note = 2'-O-methyl ribonucleotide
  modified_base 50: mod_base = OTHER; note = 2'-O-methyl ribonucleotide
  modified_base 52: mod_base = OTHER; note = 2'-O-methyl ribonucleotide
  modified_base 53: mod_base = OTHER; note = 2'-O-methyl ribonucleotide
  modified_base 54: mod_base = OTHER; note = 2'-O-methyl ribonucleotide
  modified_base 55: mod_base = OTHER; note = 2'-O-methyl ribonucleotide
  modified_base 56: mod_base = OTHER; note = 2'-O-methyl ribonucleotide
  modified_base 57: mod_base = OTHER; note = 2'-O-methyl ribonucleotide
  modified_base 60: mod_base = OTHER; note = 2'-O-methyl ribonucleotide
  modified_base 61: mod_base = OTHER; note = 2'-O-methyl ribonucleotide
  modified_base 66: mod_base = OTHER; note = 2'-O-methyl ribonucleotide
  modified_base 67: mod_base = OTHER; note = 2'-O-methyl ribonucleotide
  modified_base 70: mod_base = OTHER; note = 2'-O-methyl ribonucleotide
  modified_base 71: mod_base = OTHER; note = 2'-O-methyl ribonucleotide
  modified_base 72: mod_base = OTHER; note = 2'-O-methyl ribonucleotide
  modified_base 74: mod_base = OTHER; note = 2'-O-methyl ribonucleotide
  modified_base 75: mod_base = OTHER; note = 2'-O-methyl ribonucleotide
  modified_base 76: mod_base = OTHER; note = 2'-O-methyl ribonucleotide
  modified_base 77: mod_base = OTHER; note = 2'-O-methyl ribonucleotide
  modified_base 78: mod_base = OTHER; note = 2'-O-methyl ribonucleotide
  modified_base 79: mod_base = OTHER; note = 2'-O-methyl ribonucleotide
  modified_base 80: mod_base = OTHER; note = 2'-O-methyl ribonucleotide
  modified_base 81: mod_base = OTHER; note = 2'-O-methyl ribonucleotide
  modified_base 83: mod_base = OTHER; note = 2'-O-methyl ribonucleotide
  modified_base 84: mod_base = OTHER; note = 2'-O-methyl ribonucleotide
  modified_base 85: mod_base = OTHER; note = 2'-O-methyl ribonucleotide
  modified_base 86: mod_base = OTHER; note = 2'-O-methyl ribonucleotide
  modified_base 87: mod_base = OTHER; note = 2'-O-methyl ribonucleotide
  modified_base 88: mod_base = OTHER; note = 2'-O-methyl ribonucleotide
  modified_base 89: mod_base = OTHER; note = 2'-O-methyl ribonucleotide
  modified_base 90: mod_base = OTHER; note = 2'-O-methyl ribonucleotide
  modified_base 91: mod_base = OTHER; note = 2'-O-methyl ribonucleotide
  modified_base 92: mod_base = OTHER; note = 2'-O-methyl ribonucleotide
  modified_base 93: mod_base = OTHER; note = 2'-O-methyl ribonucleotide
  modified_base 94: mod_base = OTHER; note = 2'-O-methyl ribonucleotide
  modified_base 95: mod_base = OTHER; note = 2'-O-methyl ribonucleotide
  modified_base 96: mod_base = OTHER; note = 2'-O-methyl ribonucleotide
  modified_base 97: mod_base = OTHER; note = 2'-O-methyl ribonucleotide
  modified_base 98: mod_base = OTHER; note = 2'-O-methyl ribonucleotide
  modified_base 99: mod_base = OTHER; note = 2'-O-methyl ribonucleotide
  modified_base 100: mod_base = OTHER; note = 2'-O-methyl ribonucleotide
  modified_base 10: mod_base = OTHER; note = deoxyuridine
  modified_base 1..4: mod_base = OTHER; note = phosphorothioate linkage
  modified_base 97..100: mod_base = OTHER; note = phosphorothioate linkage
  misc_feature 1: note = RNA
  misc_feature 2: note = RNA
  misc_feature 3: note = RNA
  misc_feature 5: note = RNA
  misc_feature 7: note = RNA
  misc_feature 9: note = RNA
  misc_feature 11: note = RNA
  misc_feature 13: note = RNA
  misc_feature 15: note = RNA
  misc_feature 17: note = RNA
  misc_feature 19: note = RNA
  misc_feature 21: note = RNA
  misc_feature 22: note = RNA
  misc_feature 23: note = RNA
  misc_feature 24: note = RNA
  misc_feature 25: note = RNA
  misc_feature 26: note = RNA
  misc_feature 27: note = RNA
  misc_feature 28: note = RNA
  misc_feature 29: note = RNA
  misc_feature 30: note = RNA
  misc_feature 31: note = RNA
  misc_feature 32: note = RNA
  misc_feature 33: note = RNA
  misc_feature 34: note = RNA
  misc_feature 35: note = RNA
  misc_feature 36: note = RNA
  misc_feature 37: note = RNA
  misc_feature 38: note = RNA
  misc_feature 39: note = RNA
  misc_feature 40: note = RNA
  misc_feature 41: note = RNA
  misc_feature 42: note = RNA
  misc_feature 43: note = RNA
  misc_feature 44: note = RNA
  misc_feature 45: note = RNA
  misc_feature 46: note = RNA
  misc_feature 47: note = RNA
  misc_feature 48: note = RNA
  misc_feature 49: note = RNA
  misc_feature 50: note = RNA
  misc_feature 51: note = RNA
  misc_feature 52: note = RNA
  misc_feature 53: note = RNA
  misc_feature 54: note = RNA
  misc_feature 55: note = RNA
  misc_feature 56: note = RNA
  misc_feature 57: note = RNA
  misc_feature 58: note = RNA
  misc_feature 59: note = RNA
  misc_feature 60: note = RNA
  misc_feature 61: note = RNA
  misc_feature 62: note = RNA
  misc_feature 63: note = RNA
  misc_feature 64: note = RNA
  misc_feature 65: note = RNA
  misc_feature 66: note = RNA
  misc_feature 67: note = RNA
  misc_feature 68: note = RNA
  misc_feature 69: note = RNA
  misc_feature 70: note = RNA
  misc_feature 71: note = RNA
  misc_feature 72: note = RNA
  misc_feature 73: note = RNA
  misc_feature 74: note = RNA
  misc_feature 75: note = RNA
  misc_feature 76: note = RNA
  misc_feature 77: note = RNA
  misc_feature 78: note = RNA
  misc_feature 79: note = RNA
  misc_feature 80: note = RNA
  misc_feature 81: note = RNA
  misc_feature 82: note = RNA
  misc_feature 83: note = RNA
  misc_feature 84: note = RNA
  misc_feature 85: note = RNA
  misc_feature 86: note = RNA
  misc_feature 87: note = RNA
  misc_feature 88: note = RNA
  misc_feature 89: note = RNA
  misc_feature 90: note = RNA
  misc_feature 91: note = RNA
  misc_feature 92: note = RNA
  misc_feature 93: note = RNA
  misc_feature 94: note = RNA
  misc_feature 95: note = RNA
  misc_feature 96: note = RNA
  misc_feature 97: note = RNA
  misc_feature 98: note = RNA
  misc_feature 99: note = RNA
  misc_feature 100: note = RNA
  misc_feature 4: note = DNA
  misc_feature 6: note = DNA
  misc_feature 8: note = DNA
  misc_feature 10: note = DNA
  misc_feature 12: note = DNA
  misc_feature 14: note = DNA
  misc_feature 16: note = DNA
  misc_feature 18: note = DNA
  misc_feature 20: note = DNA

SEQ ID NO: 430 - DNA, 100 bp, synthetic construct; identical to SEQ ID NO: 58
  source 1..100: mol_type = other DNA
  modified_base 1: mod_base = OTHER; note = 2'-O-methyl ribonucleotide
  modified_base 2: mod_base = OTHER; note = 2'-O-methyl ribonucleotide
  modified_base 3: mod_base = OTHER; note = 2'-O-methyl ribonucleotide
  modified_base 21: mod_base = OTHER; note = 2'-O-methyl ribonucleotide
  modified_base 28: mod_base = OTHER; note = 2'-O-methyl ribonucleotide
  modified_base 29: mod_base = OTHER; note = 2'-O-methyl ribonucleotide
  modified_base 30: mod_base = OTHER; note = 2'-O-methyl ribonucleotide
  modified_base 31: mod_base = OTHER; note = 2'-O-methyl ribonucleotide
  modified_base 32: mod_base = OTHER; note = 2'-O-methyl ribonucleotide
  modified_base 34: mod_base = OTHER; note = 2'-O-methyl ribonucleotide
  modified_base 35: mod_base = OTHER; note = 2'-O-methyl ribonucleotide
  modified_base 36: mod_base = OTHER; note = 2'-O-methyl ribonucleotide
  modified_base 37: mod_base = OTHER; note = 2'-O-methyl ribonucleotide
  modified_base 38: mod_base = OTHER; note = 2'-O-methyl ribonucleotide
  modified_base 39: mod_base = OTHER; note = 2'-O-methyl ribonucleotide
  modified_base 40: mod_base = OTHER; note = 2'-O-methyl ribonucleotide
  modified_base 41: mod_base = OTHER; note = 2'-O-methyl ribonucleotide
  modified_base 42: mod_base = OTHER; note = 2'-O-methyl ribonucleotide
  modified_base 46: mod_base = OTHER; note = 2'-O-methyl ribonucleotide
  modified_base 48: mod_base = OTHER; note = 2'-O-methyl ribonucleotide
  modified_base 50: mod_base = OTHER; note = 2'-O-methyl ribonucleotide
  modified_base 52: mod_base = OTHER; note = 2'-O-methyl ribonucleotide
  modified_base 53: mod_base = OTHER; note = 2'-O-methyl ribonucleotide
  modified_base 54: mod_base = OTHER; note = 2'-O-methyl ribonucleotide
  modified_base 55: mod_base = OTHER; note = 2'-O-methyl ribonucleotide
  modified_base 56: mod_base = OTHER; note = 2'-O-methyl ribonucleotide
  modified_base 57: mod_base = OTHER; note = 2'-O-methyl ribonucleotide
  modified_base 60: mod_base = OTHER; note = 2'-O-methyl ribonucleotide
  modified_base 61: mod_base = OTHER; note = 2'-O-methyl ribonucleotide
  modified_base 66: mod_base = OTHER; note = 2'-O-methyl ribonucleotide
  modified_base 67: mod_base = OTHER; note = 2'-O-methyl ribonucleotide
  modified_base 70: mod_base = OTHER; note = 2'-O-methyl ribonucleotide
  modified_base 71: mod_base = OTHER; note = 2'-O-methyl ribonucleotide
  modified_base 72: mod_base = OTHER; note = 2'-O-methyl ribonucleotide
  modified_base 74: mod_base = OTHER; note = 2'-O-methyl ribonucleotide
  modified_base 75: mod_base = OTHER; note = 2'-O-methyl ribonucleotide
  modified_base 76: mod_base = OTHER; note = 2'-O-methyl ribonucleotide
  modified_base 77: mod_base = OTHER; note = 2'-O-methyl ribonucleotide
  modified_base 78: mod_base = OTHER; note = 2'-O-methyl ribonucleotide
  modified_base 79: mod_base = OTHER; note = 2'-O-methyl ribonucleotide
  modified_base 80: mod_base = OTHER; note = 2'-O-methyl ribonucleotide
  modified_base 81: mod_base = OTHER; note = 2'-O-methyl ribonucleotide
  modified_base 83: mod_base = OTHER; note = 2'-O-methyl ribonucleotide
  modified_base 84: mod_base = OTHER; note = 2'-O-methyl ribonucleotide
  modified_base 85: mod_base = OTHER; note = 2'-O-methyl ribonucleotide
  modified_base 86: mod_base = OTHER; note = 2'-O-methyl ribonucleotide
  modified_base 87: mod_base = OTHER; note = 2'-O-methyl ribonucleotide
  modified_base 88: mod_base = OTHER; note = 2'-O-methyl ribonucleotide
  modified_base 89: mod_base = OTHER; note = 2'-O-methyl ribonucleotide
  modified_base 90: mod_base = OTHER; note = 2'-O-methyl ribonucleotide
  modified_base 91: mod_base = OTHER; note = 2'-O-methyl ribonucleotide
  modified_base 92: mod_base = OTHER; note = 2'-O-methyl ribonucleotide
  modified_base 93: mod_base = OTHER; note = 2'-O-methyl ribonucleotide
  modified_base 94: mod_base = OTHER; note = 2'-O-methyl ribonucleotide
  modified_base 95: mod_base = OTHER; note = 2'-O-methyl ribonucleotide
  modified_base 96: mod_base = OTHER; note = 2'-O-methyl ribonucleotide
  modified_base 97: mod_base = OTHER; note = 2'-O-methyl ribonucleotide
  modified_base 98: mod_base = OTHER; note = 2'-O-methyl ribonucleotide
  modified_base 99: mod_base = OTHER; note = 2'-O-methyl ribonucleotide
  modified_base 100: mod_base = OTHER; note = 2'-O-methyl ribonucleotide
  modified_base 9: mod_base = OTHER; note = deoxyuridine
  modified_base 1..4: mod_base = OTHER; note = phosphorothioate linkage
  modified_base 97..100: mod_base = OTHER; note = phosphorothioate linkage
  misc_feature 1: note = RNA
  misc_feature 2: note = RNA
  misc_feature 3: note = RNA
  misc_feature 4: note = RNA
  misc_feature 6: note = RNA
  misc_feature 8: note = RNA
  misc_feature 10: note = RNA
  misc_feature 12: note = RNA
  misc_feature 14: note = RNA
  misc_feature 16: note = RNA
  misc_feature 18: note = RNA
  misc_feature 20: note = RNA
  misc_feature 21: note = RNA
  misc_feature 22: note = RNA
  misc_feature 23: note = RNA
  misc_feature 24: note = RNA
  misc_feature 25: note = RNA
  misc_feature 26: note = RNA
  misc_feature 27: note = RNA
  misc_feature 28: note = RNA
  misc_feature 29: note = RNA
  misc_feature 30: note = RNA
  misc_feature 31: note = RNA
  misc_feature 32: note = RNA
  misc_feature 33: note = RNA
  misc_feature 34: note = RNA
  misc_feature 35: note = RNA
  misc_feature 36: note = RNA
  misc_feature 37: note = RNA
  misc_feature 38: note = RNA
  misc_feature 39: note = RNA
  misc_feature 40: note = RNA
  misc_feature 41: note = RNA
  misc_feature 42: note = RNA
  misc_feature 43: note = RNA
  misc_feature 44: note = RNA
  misc_feature 45: note = RNA
  misc_feature 46: note = RNA
  misc_feature 47: note = RNA
  misc_feature 48: note = RNA
  misc_feature 49: note = RNA
  misc_feature 50: note = RNA
  misc_feature 51: note = RNA
  misc_feature 52: note = RNA
  misc_feature 53: note = RNA
  misc_feature 54: note = RNA
  misc_feature 55: note = RNA
  misc_feature 56: note = RNA
  misc_feature 57: note = RNA
  misc_feature 58: note = RNA
  misc_feature 59: note = RNA
  misc_feature 60: note = RNA
  misc_feature 61: note = RNA
  misc_feature 62: note = RNA
  misc_feature 63: note = RNA
  misc_feature 64: note = RNA
  misc_feature 65: note = RNA
  misc_feature 66: note = RNA
  misc_feature 67: note = RNA
  misc_feature 68: note = RNA
  misc_feature 69: note = RNA
  misc_feature 70: note = RNA
  misc_feature 71: note = RNA
  misc_feature 72: note = RNA
  misc_feature 73: note = RNA
  misc_feature 74: note = RNA
  misc_feature 75: note = RNA
  misc_feature 76: note = RNA
  misc_feature 77: note = RNA
  misc_feature 78: note = RNA
  misc_feature 79: note = RNA
  misc_feature 80: note = RNA
  misc_feature 81: note = RNA
  misc_feature 82: note = RNA
  misc_feature 83: note = RNA
  misc_feature 84: note = RNA
  misc_feature 85: note = RNA
  misc_feature 86: note = RNA
  misc_feature 87: note = RNA
  misc_feature 88: note = RNA
  misc_feature 89: note = RNA
  misc_feature 90: note = RNA
  misc_feature 91: note = RNA
  misc_feature 92: note = RNA
  misc_feature 93: note = RNA
  misc_feature 94: note = RNA
  misc_feature 95: note = RNA
  misc_feature 96: note = RNA
  misc_feature 97: note = RNA
  misc_feature 98: note = RNA
  misc_feature 99: note = RNA
  misc_feature 100: note = RNA
  misc_feature 5: note = DNA
  misc_feature 7: note = DNA
  misc_feature 9: note = DNA
  misc_feature 11: note = DNA
  misc_feature 13: note = DNA
  misc_feature 15: note = DNA
  misc_feature 17: note = DNA
  misc_feature 19: note = DNA

SEQ ID NO: 431 - DNA, 100 bp, synthetic construct; identical to SEQ ID NO: 58
  source 1..100: mol_type = other DNA
  modified_base 1: mod_base = OTHER; note = 2'-O-methyl ribonucleotide
  modified_base 2: mod_base = OTHER; note = 2'-O-methyl ribonucleotide
  modified_base 3: mod_base = OTHER; note = 2'-O-methyl ribonucleotide
  modified_base 21: mod_base = OTHER; note = 2'-O-methyl ribonucleotide
  modified_base 28: mod_base = OTHER; note = 2'-O-methyl ribonucleotide
  modified_base 29: mod_base = OTHER; note = 2'-O-methyl ribonucleotide
  modified_base 30: mod_base = OTHER; note = 2'-O-methyl ribonucleotide
  modified_base 31: mod_base = OTHER; note = 2'-O-methyl ribonucleotide
  modified_base 32: mod_base = OTHER; note = 2'-O-methyl ribonucleotide
  modified_base 34: mod_base = OTHER; note = 2'-O-methyl ribonucleotide
  modified_base 35: mod_base = OTHER; note = 2'-O-methyl ribonucleotide
  modified_base 36: mod_base = OTHER; note = 2'-O-methyl ribonucleotide
  modified_base 37: mod_base = OTHER; note = 2'-O-methyl ribonucleotide
  modified_base 38: mod_base = OTHER; note = 2'-O-methyl ribonucleotide
  modified_base 39: mod_base = OTHER; note = 2'-O-methyl ribonucleotide
  modified_base 40: mod_base = OTHER; note = 2'-O-methyl ribonucleotide
  modified_base 41: mod_base = OTHER; note = 2'-O-methyl ribonucleotide
  modified_base 42: mod_base = OTHER; note = 2'-O-methyl ribonucleotide
  modified_base 46: mod_base = OTHER; note = 2'-O-methyl ribonucleotide
  modified_base 48: mod_base = OTHER; note = 2'-O-methyl ribonucleotide
  modified_base 50: mod_base = OTHER; note = 2'-O-methyl ribonucleotide
  modified_base 52: mod_base = OTHER; note = 2'-O-methyl ribonucleotide
  modified_base 53: mod_base = OTHER; note = 2'-O-methyl ribonucleotide
  modified_base 54: mod_base = OTHER; note = 2'-O-methyl ribonucleotide
  modified_base 55: mod_base = OTHER; note = 2'-O-methyl ribonucleotide
  modified_base 56: mod_base = OTHER; note = 2'-O-methyl ribonucleotide
  modified_base 57: mod_base = OTHER; note = 2'-O-methyl ribonucleotide
  modified_base 60: mod_base = OTHER; note = 2'-O-methyl ribonucleotide
  modified_base 61: mod_base = OTHER; note = 2'-O-methyl ribonucleotide
  modified_base 66: mod_base = OTHER; note = 2'-O-methyl ribonucleotide
  modified_base 67: mod_base = OTHER; note = 2'-O-methyl ribonucleotide
  modified_base 70: mod_base = OTHER; note = 2'-O-methyl ribonucleotide
  modified_base 71: mod_base = OTHER; note = 2'-O-methyl ribonucleotide
  modified_base 72: mod_base = OTHER; note = 2'-O-methyl ribonucleotide
  modified_base 74: mod_base = OTHER; note = 2'-O-methyl ribonucleotide
  modified_base 75: mod_base = OTHER; note = 2'-O-methyl ribonucleotide
  modified_base 76: mod_base = OTHER; note = 2'-O-methyl ribonucleotide
  modified_base 77: mod_base = OTHER; note = 2'-O-methyl ribonucleotide
  modified_base 78: mod_base = OTHER; note = 2'-O-methyl ribonucleotide
  modified_base 79: mod_base = OTHER; note = 2'-O-methyl ribonucleotide
  modified_base 80: mod_base = OTHER; note = 2'-O-methyl ribonucleotide
  modified_base 81: mod_base = OTHER; note = 2'-O-methyl ribonucleotide
  modified_base 83: mod_base = OTHER; note = 2'-O-methyl ribonucleotide
  modified_base 84: mod_base = OTHER; note = 2'-O-methyl ribonucleotide
  modified_base 85: mod_base = OTHER; note = 2'-O-methyl ribonucleotide
  modified_base 86: mod_base = OTHER; note = 2'-O-methyl ribonucleotide
  modified_base 87: mod_base = OTHER; note = 2'-O-methyl ribonucleotide
  modified_base 88: mod_base = OTHER; note = 2'-O-methyl ribonucleotide
  modified_base 89: mod_base = OTHER; note = 2'-O-methyl ribonucleotide
  modified_base 90: mod_base = OTHER; note = 2'-O-methyl ribonucleotide
  modified_base 91: mod_base = OTHER; note = 2'-O-methyl ribonucleotide
  modified_base 92: mod_base = OTHER; note = 2'-O-methyl ribonucleotide
  modified_base 93: mod_base = OTHER; note = 2'-O-methyl ribonucleotide
  modified_base 94: mod_base = OTHER; note = 2'-O-methyl ribonucleotide
  modified_base 95: mod_base = OTHER; note = 2'-O-methyl ribonucleotide
  modified_base 96: mod_base = OTHER; note = 2'-O-methyl ribonucleotide
  modified_base 97: mod_base = OTHER; note = 2'-O-methyl ribonucleotide
  modified_base 98: mod_base = OTHER; note = 2'-O-methyl ribonucleotide
  modified_base 99: mod_base = OTHER; note = 2'-O-methyl ribonucleotide
  modified_base 100: mod_base = OTHER; note = 2'-O-methyl ribonucleotide
  modified_base 1..4: mod_base = OTHER; note = phosphorothioate linkage
  modified_base 97..100: mod_base = OTHER; note = phosphorothioate linkage
  misc_feature 1: note = RNA
  misc_feature 2: note = RNA
  misc_feature 3: note = RNA
  misc_feature 4: note = RNA
  misc_feature 6: note = RNA
  misc_feature 7: note = RNA
  misc_feature 8: note = RNA
  misc_feature 9: note = RNA
  misc_feature 10: note = RNA
  misc_feature 11: note = RNA
  misc_feature 12: note = RNA
  misc_feature 13: note = RNA
  misc_feature 14: note = RNA
  misc_feature 16: note = RNA
  misc_feature 17: note = RNA
  misc_feature 18: note = RNA
  misc_feature 19: note = RNA
  misc_feature 20: note = RNA
  misc_feature 21: note = RNA
  misc_feature 22: note = RNA
  misc_feature 23: note = RNA
  misc_feature 24: note = RNA
  misc_feature 25: note = RNA
  misc_feature 26: note = RNA
  misc_feature 27: note = RNA
  misc_feature 28: note = RNA
  misc_feature 29: note = RNA
  misc_feature 30: note = RNA
  misc_feature 31: note = RNA
  misc_feature 32: note = RNA
  misc_feature 33: note = RNA
  misc_feature 34: note = RNA
  misc_feature 35: note = RNA
  misc_feature 36: note = RNA
  misc_feature 37: note = RNA
  misc_feature 38: note = RNA
  misc_feature 39: note = RNA
  misc_feature 40: note = RNA
  misc_feature 41: note = RNA
  misc_feature 42: note = RNA
  misc_feature 43: note = RNA
  misc_feature 44: note = RNA
  misc_feature 45: note = RNA
  misc_feature 46: note = RNA
  misc_feature 47: note = RNA
  misc_feature 48: note = RNA
  misc_feature 49: note = RNA
  misc_feature 50: note = RNA
  misc_feature 51: note = RNA
  misc_feature 52: note = RNA
  misc_feature 53: note = RNA
  misc_feature 54: note = RNA
  misc_feature 55: note = RNA
  misc_feature 56: note = RNA
  misc_feature 57: note = RNA
  misc_feature 58: note = RNA
  misc_feature 59: note = RNA
  misc_feature 60: note = RNA
  misc_feature 61: note = RNA
  misc_feature 62: note = RNA
  misc_feature 63: note = RNA
  misc_feature 64: note = RNA
  misc_feature 65: note = RNA
  misc_feature 66: note = RNA
  misc_feature 67: note = RNA
  misc_feature 68: note = RNA
  misc_feature 69: note = RNA
  misc_feature 70: note = RNA
  misc_feature 71: note = RNA
  misc_feature 72: note = RNA
  misc_feature 73: note = RNA
  misc_feature 74: note = RNA
  misc_feature 75: note = RNA
  misc_feature 76: note = RNA
  misc_feature 77: note = RNA
  misc_feature 78: note = RNA
  misc_feature 79: note = RNA
  misc_feature 80: note = RNA
  misc_feature 81: note = RNA
  misc_feature 82: note = RNA
  misc_feature 83: note = RNA
  misc_feature 84: note = RNA
  misc_feature 85: note = RNA
  misc_feature 86: note = RNA
  misc_feature 87: note = RNA
  misc_feature 88: note = RNA
  misc_feature 89: note = RNA
  misc_feature 90: note = RNA
  misc_feature 91: note = RNA
  misc_feature 92: note = RNA
  misc_feature 93: note = RNA
  misc_feature 94: note = RNA
  misc_feature 95: note = RNA
  misc_feature 96: note = RNA
  misc_feature 97: note = RNA
  misc_feature 98: note = RNA
  misc_feature 99: note = RNA
  misc_feature 100: note = RNA
  misc_feature 5: note = DNA
  misc_feature 15: note = DNA

SEQ ID NO: 432 - DNA, 100 bp, synthetic construct; identical to SEQ ID NO: 58
  source 1..100: mol_type = other DNA
  modified_base 1: mod_base = OTHER; note = 2'-O-methyl ribonucleotide
  modified_base 2: mod_base = OTHER; note = 2'-O-methyl ribonucleotide
  modified_base 3: mod_base = OTHER; note = 2'-O-methyl ribonucleotide
  modified_base 21: mod_base = OTHER; note = 2'-O-methyl ribonucleotide
  modified_base 28: mod_base = OTHER; note = 2'-O-methyl ribonucleotide
  modified_base 29: mod_base = OTHER; note = 2'-O-methyl ribonucleotide
  modified_base 30: mod_base = OTHER; note = 2'-O-methyl ribonucleotide
  modified_base 31: mod_base = OTHER; note = 2'-O-methyl ribonucleotide
  modified_base 32: mod_base = OTHER; note = 2'-O-methyl ribonucleotide
  modified_base 34: mod_base = OTHER; note = 2'-O-methyl ribonucleotide
  modified_base 35: mod_base = OTHER; note = 2'-O-methyl ribonucleotide
  modified_base 36: mod_base = OTHER; note = 2'-O-methyl ribonucleotide
  modified_base 37: mod_base = OTHER; note = 2'-O-methyl ribonucleotide
  modified_base 38: mod_base = OTHER; note = 2'-O-methyl ribonucleotide
  modified_base 39: mod_base = OTHER; note = 2'-O-methyl ribonucleotide
  modified_base 40: mod_base = OTHER; note = 2'-O-methyl ribonucleotide
  modified_base 41: mod_base = OTHER; note = 2'-O-methyl ribonucleotide
  modified_base 42: mod_base = OTHER; note = 2'-O-methyl ribonucleotide
  modified_base 46: mod_base = OTHER; note = 2'-O-methyl ribonucleotide
  modified_base 48: mod_base = OTHER; note = 2'-O-methyl ribonucleotide
  modified_base 50: mod_base = OTHER; note = 2'-O-methyl ribonucleotide
  modified_base 52: mod_base = OTHER; note = 2'-O-methyl ribonucleotide
  modified_base 53: mod_base = OTHER; note = 2'-O-methyl ribonucleotide
  modified_base 54: mod_base = OTHER; note = 2'-O-methyl ribonucleotide
  modified_base 55: mod_base = OTHER; note = 2'-O-methyl ribonucleotide
  modified_base 56: mod_base = OTHER; note = 2'-O-methyl ribonucleotide
  modified_base 57: mod_base = OTHER; note = 2'-O-methyl ribonucleotide
  modified_base 60: mod_base = OTHER; note = 2'-O-methyl ribonucleotide
  modified_base 61: mod_base = OTHER; note = 2'-O-methyl ribonucleotide
  modified_base 66: mod_base = OTHER; note = 2'-O-methyl ribonucleotide
  modified_base 67: mod_base = OTHER; note = 2'-O-methyl ribonucleotide
  modified_base 70: mod_base = OTHER; note = 2'-O-methyl ribonucleotide
  modified_base 71: mod_base = OTHER; note = 2'-O-methyl ribonucleotide
  modified_base 72: mod_base = OTHER; note = 2'-O-methyl ribonucleotide
  modified_base 74: mod_base = OTHER; note = 2'-O-methyl ribonucleotide
  modified_base 75: mod_base = OTHER; note = 2'-O-methyl ribonucleotide
  modified_base 76: mod_base = OTHER; note = 2'-O-methyl ribonucleotide
  modified_base 77: mod_base = OTHER; note = 2'-O-methyl ribonucleotide
  modified_base 78: mod_base = OTHER; note = 2'-O-methyl ribonucleotide
  modified_base 79: mod_base = OTHER; note = 2'-O-methyl ribonucleotide
  modified_base 80: mod_base = OTHER; note = 2'-O-methyl ribonucleotide
  modified_base 81: mod_base = OTHER; note = 2'-O-methyl ribonucleotide
  modified_base 83: mod_base = OTHER; note = 2'-O-methyl ribonucleotide
  modified_base 84: mod_base = OTHER; note = 2'-O-methyl ribonucleotide
  modified_base 85: mod_base = OTHER; note = 2'-O-methyl ribonucleotide
  modified_base 86: mod_base = OTHER; note = 2'-O-methyl ribonucleotide
  modified_base 87: mod_base = OTHER; note = 2'-O-methyl ribonucleotide
  modified_base 88: mod_base = OTHER; note = 2'-O-methyl ribonucleotide
  modified_base 89: mod_base = OTHER; note = 2'-O-methyl ribonucleotide
  modified_base 90: mod_base = OTHER; note = 2'-O-methyl ribonucleotide
  modified_base 91: mod_base = OTHER; note = 2'-O-methyl ribonucleotide
  modified_base 92: mod_base = OTHER; note = 2'-O-methyl ribonucleotide
  modified_base 93: mod_base = OTHER; note = 2'-O-methyl ribonucleotide
  modified_base 94: mod_base = OTHER; note = 2'-O-methyl ribonucleotide
  modified_base 95: mod_base = OTHER; note = 2'-O-methyl ribonucleotide
  modified_base 96: mod_base = OTHER; note = 2'-O-methyl ribonucleotide
  modified_base 97: mod_base = OTHER; note = 2'-O-methyl ribonucleotide
  modified_base 98: mod_base = OTHER; note = 2'-O-methyl ribonucleotide
  modified_base 99: mod_base = OTHER; note = 2'-O-methyl ribonucleotide
  modified_base 100: mod_base = OTHER; note = 2'-O-methyl ribonucleotide
  modified_base 1..4: mod_base = OTHER; note = phosphorothioate linkage
  modified_base 97..100: mod_base = OTHER; note = phosphorothioate linkage
  misc_feature 1: note = RNA
  misc_feature 2: note = RNA
  misc_feature 3: note = RNA
  misc_feature 4: note = RNA
  misc_feature 5: note = RNA
  misc_feature 7: note = RNA
  misc_feature 8: note = RNA
  misc_feature 9: note = RNA
  misc_feature 10: note = RNA
  misc_feature 11: note = RNA
  misc_feature 12: note = RNA
  misc_feature 13: note = RNA
  misc_feature 14: note = RNA
  misc_feature 15: note = RNA
  misc_feature 17: note = RNA
  misc_feature 18: note = RNA
  misc_feature 19: note = RNA
  misc_feature 20: note = RNA
  misc_feature 21: note = RNA
  misc_feature 22: note = RNA
  misc_feature 23: note = RNA
  misc_feature 24: note = RNA
  misc_feature 25: note = RNA
  misc_feature 26: note = RNA
  misc_feature 27: note = RNA
  misc_feature 28: note = RNA
  misc_feature 29: note = RNA
  misc_feature 30: note = RNA
  misc_feature 31: note = RNA
  misc_feature 32: note = RNA
  misc_feature 33: note = RNA
  misc_feature 34: note = RNA
  misc_feature 35: note = RNA
  misc_feature 36: note = RNA
  misc_feature 37: note = RNA
  misc_feature 38: note = RNA
  misc_feature 39: note = RNA
  misc_feature 40: note = RNA
  misc_feature 41: note = RNA
  misc_feature 42: note = RNA
  misc_feature 43: note = RNA
  misc_feature 44: note = RNA
  misc_feature 45: note = RNA
  misc_feature 46: note = RNA
  misc_feature 47: note = RNA
  misc_feature 48: note = RNA
  misc_feature 49: note = RNA
  misc_feature 50: note = RNA
  misc_feature 51: note = RNA
  misc_feature 52: note = RNA
  misc_feature 53: note = RNA
  misc_feature 54: note = RNA
  misc_feature 55: note = RNA
  misc_feature 56: note = RNA
  misc_feature 57: note = RNA
  misc_feature 58: note = RNA
  misc_feature 59: note = RNA
  misc_feature 60: note = RNA
  misc_feature 61: note = RNA
  misc_feature 62: note = RNA
  misc_feature 63: note = RNA
  misc_feature 64: note = RNA
  misc_feature 65: note = RNA
  misc_feature 66: note = RNA
  misc_feature 67: note = RNA
  misc_feature 68: note = RNA
  misc_feature 69: note = RNA
  misc_feature 70: note = RNA
  misc_feature 71: note = RNA
  misc_feature 72: note = RNA
  misc_feature 73: note = RNA
  misc_feature 74: note = RNA
  misc_feature 75: note = RNA
  misc_feature 76: note = RNA
  misc_feature 77: note = RNA
  misc_feature 78: note = RNA
  misc_feature 79: note = RNA
  misc_feature 80: note = RNA
  misc_feature 81: note = RNA
  misc_feature 82: note = RNA
  misc_feature 83: note = RNA
  misc_feature 84: note = RNA
  misc_feature 85: note = RNA
  misc_feature 86: note = RNA
  misc_feature 87: note = RNA
  misc_feature 88: note = RNA
  misc_feature 89: note = RNA
  misc_feature 90: note = RNA
  misc_feature 91: note = RNA
  misc_feature 92: note = RNA
  misc_feature 93: note = RNA
  misc_feature 94: note = RNA
  misc_feature 95: note = RNA
  misc_feature 96: note = RNA
  misc_feature 97: note = RNA
  misc_feature 98: note = RNA
  misc_feature 99: note = RNA
  misc_feature 100: note = RNA
  misc_feature 6: note = DNA
  misc_feature 16: note = DNA

SEQ ID NO: 433 - DNA, 100 bp, synthetic construct; identical to SEQ ID NO: 58
  source 1..100: mol_type = other DNA
  modified_base 1: mod_base = OTHER; note = 2'-O-methyl ribonucleotide
  modified_base 2: mod_base = OTHER; note = 2'-O-methyl ribonucleotide
  modified_base 3: mod_base = OTHER; note = 2'-O-methyl ribonucleotide
  modified_base 21: mod_base = OTHER; note = 2'-O-methyl ribonucleotide
  modified_base 28: mod_base = OTHER; note = 2'-O-methyl ribonucleotide
  modified_base 29: mod_base = OTHER; note = 2'-O-methyl ribonucleotide
  modified_base 30: mod_base = OTHER; note = 2'-O-methyl ribonucleotide
  modified_base 31: mod_base = OTHER; note = 2'-O-methyl ribonucleotide
  modified_base 32: mod_base = OTHER; note = 2'-O-methyl ribonucleotide
  modified_base 34: mod_base = OTHER; note = 2'-O-methyl ribonucleotide
  modified_base 35: mod_base = OTHER; note = 2'-O-methyl ribonucleotide
  modified_base 36: mod_base = OTHER; note = 2'-O-methyl ribonucleotide
  modified_base 37: mod_base = OTHER; note = 2'-O-methyl ribonucleotide
  modified_base 38: mod_base = OTHER; note = 2'-O-methyl ribonucleotide
  modified_base 39: mod_base = OTHER; note = 2'-O-methyl ribonucleotide
  modified_base 40: mod_base = OTHER; note = 2'-O-methyl ribonucleotide
  modified_base 41: mod_base = OTHER; note = 2'-O-methyl ribonucleotide
  modified_base 42: mod_base = OTHER; note = 2'-O-methyl ribonucleotide
  modified_base 46: mod_base = OTHER; note = 2'-O-methyl ribonucleotide
  modified_base 48: mod_base = OTHER; note = 2'-O-methyl ribonucleotide
  modified_base 50: mod_base = OTHER; note = 2'-O-methyl ribonucleotide
  modified_base 52: mod_base = OTHER; note = 2'-O-methyl ribonucleotide
  modified_base 53: mod_base = OTHER; note = 2'-O-methyl ribonucleotide
  modified_base 54: mod_base = OTHER; note = 2'-O-methyl ribonucleotide
  modified_base 55: mod_base = OTHER; note = 2'-O-methyl ribonucleotide
  modified_base 56: mod_base = OTHER; note = 2'-O-methyl ribonucleotide
  modified_base 57: mod_base = OTHER; note = 2'-O-methyl ribonucleotide
  modified_base 60: mod_base = OTHER; note = 2'-O-methyl ribonucleotide
  modified_base 61: mod_base = OTHER; note = 2'-O-methyl ribonucleotide
  modified_base 66: mod_base = OTHER; note = 2'-O-methyl ribonucleotide
  modified_base 67: mod_base = OTHER; note = 2'-O-methyl ribonucleotide
  modified_base 70: mod_base = OTHER; note = 2'-O-methyl ribonucleotide
  modified_base 71: mod_base = OTHER; note = 2'-O-methyl ribonucleotide
  modified_base 72: mod_base = OTHER; note = 2'-O-methyl ribonucleotide
  modified_base 74: mod_base = OTHER; note = 2'-O-methyl ribonucleotide
  modified_base 75: mod_base = OTHER; note = 2'-O-methyl ribonucleotide
  modified_base 76: mod_base = OTHER; note = 2'-O-methyl ribonucleotide
  modified_base 77: mod_base = OTHER; note = 2'-O-methyl ribonucleotide
  modified_base 78: mod_base = OTHER; note = 2'-O-methyl ribonucleotide
  modified_base 79: mod_base = OTHER; note = 2'-O-methyl ribonucleotide
  modified_base 80: mod_base = OTHER; note = 2'-O-methyl ribonucleotide
  modified_base 81: mod_base = OTHER; note = 2'-O-methyl ribonucleotide
  modified_base 83: mod_base = OTHER; note = 2'-O-methyl ribonucleotide
  modified_base 84: mod_base = OTHER; note = 2'-O-methyl ribonucleotide
  modified_base 85: mod_base = OTHER; note = 2'-O-methyl ribonucleotide
  modified_base 86: mod_base = OTHER; note = 2'-O-methyl ribonucleotide
  modified_base 87: mod_base = OTHER; note = 2'-O-methyl ribonucleotide
  modified_base 88: mod_base = OTHER; note = 2'-O-methyl ribonucleotide
  modified_base 89: mod_base = OTHER; note = 2'-O-methyl ribonucleotide
  modified_base 90: mod_base = OTHER; note = 2'-O-methyl ribonucleotide
  modified_base 91: mod_base = OTHER; note = 2'-O-methyl ribonucleotide
  modified_base 92: mod_base = OTHER; note = 2'-O-methyl ribonucleotide
  modified_base 93: mod_base = OTHER; note = 2'-O-methyl ribonucleotide
  modified_base 94: mod_base = OTHER; note = 2'-O-methyl ribonucleotide
  modified_base 95: mod_base = OTHER; note = 2'-O-methyl ribonucleotide
  modified_base 96: mod_base = OTHER; note = 2'-O-methyl ribonucleotide
  modified_base 97: mod_base = OTHER; note = 2'-O-methyl ribonucleotide
  modified_base 98: mod_base = OTHER; note = 2'-O-methyl ribonucleotide
  modified_base 99: mod_base = OTHER; note = 2'-O-methyl ribonucleotide
  modified_base 100: mod_base = OTHER; note = 2'-O-methyl ribonucleotide
  modified_base 10: mod_base = OTHER; note = deoxyuridine
  modified_base 1..4: mod_base = OTHER; note = phosphorothioate linkage
  modified_base 97..100: mod_base = OTHER; note = phosphorothioate linkage
  misc_feature 1: note = RNA
  misc_feature 2: note = RNA
  misc_feature 3: note = RNA
  misc_feature 4: note = RNA
  misc_feature 5: note = RNA
  misc_feature 6: note = RNA
  misc_feature 7: note = RNA
  misc_feature 8: note = RNA
  misc_feature 9: note = RNA
  misc_feature 11: note = RNA
  misc_feature 12: note = RNA
  misc_feature 14: note = RNA
  misc_feature 15: note = RNA
  misc_feature 16: note = RNA
  misc_feature 17: note = RNA
  misc_feature 19: note = RNA
  misc_feature 20: note = RNA
  misc_feature 21: note = RNA
  misc_feature 22: note = RNA
  misc_feature 23: note = RNA
  misc_feature 24: note = RNA
  misc_feature 25: note = RNA
  misc_feature 26: note = RNA
  misc_feature 27: note = RNA
  misc_feature 28: note = RNA
  misc_feature 29: note = RNA
  misc_feature 30: note = RNA
  misc_feature 31: note = RNA
  misc_feature 32: note = RNA
  misc_feature 33: note = RNA
  misc_feature 34: note = RNA
  misc_feature 35: note = RNA
  misc_feature 36: note = RNA
  misc_feature 37: note = RNA
  misc_feature 38: note = RNA
  misc_feature 39: note = RNA
  misc_feature 40: note = RNA
  misc_feature 41: note = RNA
  misc_feature 42: note = RNA
  misc_feature 43: note = RNA
  misc_feature 44: note = RNA
  misc_feature 45: note = RNA
  misc_feature 46: note = RNA
  misc_feature 47: note = RNA
  misc_feature 48: note = RNA
  misc_feature 49: note = RNA
  misc_feature 50: note = RNA
  misc_feature 51: note = RNA
  misc_feature 52: note = RNA
  misc_feature 53: note = RNA
  misc_feature 54: note = RNA
  misc_feature 55: note = RNA
  misc_feature 56: note = RNA
  misc_feature 57: note = RNA
  misc_feature 58: note = RNA
  misc_feature 59: note = RNA
  misc_feature 60: note = RNA
  misc_feature 61: note = RNA
  misc_feature 62: note = RNA
  misc_feature 63: note = RNA
  misc_feature 64: note = RNA
  misc_feature 65: note = RNA
  misc_feature 66: note = RNA
  misc_feature 67: note = RNA
  misc_feature 68: note = RNA
  misc_feature 69: note = RNA
  misc_feature 70: note = RNA
  misc_feature 71: note = RNA
  misc_feature 72: note = RNA
  misc_feature 73: note = RNA
  misc_feature 74: note = RNA
  misc_feature 75: note = RNA
  misc_feature 76: note = RNA
  misc_feature 77: note = RNA
  misc_feature 78: note = RNA
  misc_feature 79: note = RNA
  misc_feature 80: note = RNA
  misc_feature 81: note = RNA
  misc_feature 82: note = RNA
  misc_feature 83: note = RNA
  misc_feature 84: note = RNA
  misc_feature 85: note = RNA
  misc_feature 86: note = RNA
  misc_feature 87: note = RNA
  misc_feature 88: note = RNA
  misc_feature 89: note = RNA
  misc_feature 90: note = RNA
  misc_feature 91: note = RNA
  misc_feature 92: note = RNA
  misc_feature 93: note = RNA
  misc_feature 94: note = RNA
  misc_feature 95: note = RNA
  misc_feature 96: note = RNA
  misc_feature 97: note = RNA
  misc_feature 98: note = RNA
  misc_feature 99: note = RNA
  misc_feature 100: note = RNA
  misc_feature 10: note = DNA
  misc_feature 13: note = DNA
  misc_feature 18: note = DNA

SEQ ID NO: 434 - DNA, 100 bp, synthetic construct; identical to SEQ ID NO: 58
  source 1..100: mol_type = other DNA
  modified_base 1: mod_base = OTHER; note = 2'-O-methyl ribonucleotide
  modified_base 2: mod_base = OTHER; note = 2'-O-methyl ribonucleotide
  modified_base 3: mod_base = OTHER; note = 2'-O-methyl ribonucleotide
  modified_base 21: mod_base = OTHER; note = 2'-O-methyl ribonucleotide
  modified_base 28: mod_base = OTHER; note = 2'-O-methyl ribonucleotide
  modified_base 29: mod_base = OTHER; note = 2'-O-methyl ribonucleotide
  modified_base 30: mod_base = OTHER; note = 2'-O-methyl ribonucleotide
  modified_base 31: mod_base = OTHER; note = 2'-O-methyl ribonucleotide
  modified_base 32: mod_base = OTHER; note = 2'-O-methyl ribonucleotide
  modified_base 34: mod_base = OTHER; note = 2'-O-methyl ribonucleotide
  modified_base 35: mod_base = OTHER; note = 2'-O-methyl ribonucleotide
  modified_base 36: mod_base = OTHER; note = 2'-O-methyl ribonucleotide
  modified_base 37: mod_base = OTHER; note = 2'-O-methyl ribonucleotide
  modified_base 38: mod_base = OTHER; note = 2'-O-methyl ribonucleotide
  modified_base 39: mod_base = OTHER; note = 2'-O-methyl ribonucleotide
  modified_base 40: mod_base = OTHER; note = 2'-O-methyl ribonucleotide
  modified_base 41: mod_base = OTHER; note = 2'-O-methyl ribonucleotide
  modified_base 42: mod_base = OTHER; note = 2'-O-methyl ribonucleotide
  modified_base 46: mod_base = OTHER; note = 2'-O-methyl ribonucleotide
  modified_base 48: mod_base = OTHER; note = 2'-O-methyl ribonucleotide
  modified_base 50: mod_base = OTHER; note = 2'-O-methyl ribonucleotide
  modified_base 52: mod_base = OTHER; note = 2'-O-methyl ribonucleotide
  modified_base 53: mod_base = OTHER; note = 2'-O-methyl ribonucleotide
  modified_base 54: mod_base = OTHER; note = 2'-O-methyl ribonucleotide
  modified_base 55: mod_base = OTHER; note = 2'-O-methyl ribonucleotide
  modified_base 56: mod_base = OTHER; note = 2'-O-methyl ribonucleotide
  modified_base 57: mod_base = OTHER; note = 2'-O-methyl ribonucleotide
  modified_base 60: mod_base = OTHER; note = 2'-O-methyl ribonucleotide
  modified_base 61: mod_base = OTHER; note = 2'-O-methyl ribonucleotide
  modified_base 66: mod_base = OTHER; note = 2'-O-methyl ribonucleotide
  modified_base 67: mod_base = OTHER; note = 2'-O-methyl ribonucleotide
  modified_base 70: mod_base = OTHER; note = 2'-O-methyl ribonucleotide
  modified_base 71: mod_base = OTHER; note = 2'-O-methyl ribonucleotide
  modified_base 72: mod_base = OTHER; note = 2'-O-methyl ribonucleotide
  modified_base 74: mod_base = OTHER; note = 2'-O-methyl ribonucleotide
  modified_base 75: mod_base = OTHER; note = 2'-O-methyl ribonucleotide
  modified_base 76: mod_base = OTHER; note = 2'-O-methyl ribonucleotide
  modified_base 77: mod_base = OTHER; note = 2'-O-methyl ribonucleotide
  modified_base 78: mod_base = OTHER; note = 2'-O-methyl ribonucleotide
  modified_base 79: mod_base = OTHER; note = 2'-O-methyl ribonucleotide
  modified_base 80: mod_base = OTHER; note = 2'-O-methyl ribonucleotide
  modified_base 81: mod_base = OTHER; note = 2'-O-methyl ribonucleotide
  modified_base 83: mod_base = OTHER; note = 2'-O-methyl ribonucleotide
  modified_base 84: mod_base = OTHER; note = 2'-O-methyl ribonucleotide
  modified_base 85: mod_base = OTHER; note = 2'-O-methyl ribonucleotide
  modified_base 86: mod_base = OTHER; note = 2'-O-methyl ribonucleotide
  modified_base 87: mod_base = OTHER; note = 2'-O-methyl ribonucleotide
  modified_base 88: mod_base = OTHER; note = 2'-O-methyl ribonucleotide
  modified_base 89: mod_base = OTHER; note = 2'-O-methyl ribonucleotide
  modified_base 90: mod_base = OTHER; note = 2'-O-methyl ribonucleotide
  modified_base 91: mod_base = OTHER; note = 2'-O-methyl ribonucleotide
  modified_base 92: mod_base = OTHER; note = 2'-O-methyl ribonucleotide
  modified_base 93: mod_base = OTHER; note = 2'-O-methyl ribonucleotide
  modified_base 94: mod_base = OTHER; note = 2'-O-methyl ribonucleotide
  modified_base 95: mod_base = OTHER; note = 2'-O-methyl ribonucleotide
  modified_base 96: mod_base = OTHER; note = 2'-O-methyl ribonucleotide
  modified_base 97: mod_base = OTHER; note = 2'-O-methyl ribonucleotide
  modified_base 98: mod_base = OTHER; note = 2'-O-methyl ribonucleotide
  modified_base 99: mod_base = OTHER; note = 2'-O-methyl ribonucleotide
  modified_base 100: mod_base = OTHER; note = 2'-O-methyl ribonucleotide
  modified_base 1..4: mod_base = OTHER; note = phosphorothioate linkage
  modified_base 97..100: mod_base = OTHER; note = phosphorothioate linkage
  misc_feature 1: note = RNA
  misc_feature 2: note = RNA
  misc_feature 3: note = RNA
  misc_feature 4: note = RNA
  misc_feature 5: note = RNA
  misc_feature 6: note = RNA
  misc_feature 7: note = RNA
  misc_feature 8: note = RNA
  misc_feature 9: note = RNA
  misc_feature 10: note = RNA
  misc_feature 12: note = RNA
  misc_feature 13: note = RNA
  misc_feature 15: note = RNA
  misc_feature 16: note = RNA
  misc_feature 17: note = RNA
  misc_feature 18: note = RNA
  misc_feature 20: note = RNA
  misc_feature 21: note = RNA
  misc_feature 22: note = RNA
  misc_feature 23: note = RNA
  misc_feature 24: note = RNA
  misc_feature 25: note = RNA
  misc_feature 26: note = RNA
  misc_feature 27: note = RNA
  misc_feature 28: note = RNA
  misc_feature 29: note = RNA
  misc_feature 30: note = RNA
  misc_feature 31: note = RNA
  misc_feature 32: note = RNA
  misc_feature 33: note = RNA
  misc_feature 34: note = RNA
  misc_feature 35: note = RNA
  misc_feature 36: note = RNA
  misc_feature 37: note = RNA
  misc_feature 38: note = RNA
  misc_feature 39: note = RNA
  misc_feature 40: note = RNA
  misc_feature 41: note = RNA
  misc_feature 42: note = RNA
  misc_feature 43: note = RNA
  misc_feature 44: note = RNA
  misc_feature 45: note = RNA
  misc_feature 46: note = RNA
  misc_feature 47: note = RNA
  misc_feature 48: note = RNA
  misc_feature 49: note = RNA
  misc_feature 50: note = RNA
  misc_feature 51: note = RNA
  misc_feature 52: note = RNA
  misc_feature 53: note = RNA
  misc_feature 54: note = RNA
  misc_feature 55: note = RNA
  misc_feature 56: note = RNA
  misc_feature 57: note = RNA
  misc_feature 58: note = RNA
  misc_feature 59: note = RNA
  misc_feature 60: note = RNA
  misc_feature 61: note = RNA
  misc_feature 62: note = RNA
  misc_feature 63: note = RNA
  misc_feature 64: note = RNA
  misc_feature 65: note = RNA
  misc_feature 66: note = RNA
  misc_feature 67: note = RNA
  misc_feature 68: note = RNA
  misc_feature 69: note = RNA
  misc_feature 70: note = RNA
  misc_feature 71: note = RNA
  misc_feature 72: note = RNA
  misc_feature 73: note = RNA
  misc_feature 74: note = RNA
  misc_feature 75: note = RNA
  misc_feature 76: note = RNA
  misc_feature 77: note = RNA
  misc_feature 78: note = RNA
  misc_feature 79: note = RNA
  misc_feature 80: note = RNA
  misc_feature 81: note = RNA
  misc_feature 82: note = RNA
  misc_feature 83: note = RNA
  misc_feature 84: note = RNA
  misc_feature 85: note = RNA
  misc_feature 86: note = RNA
  misc_feature 87: note = RNA
  misc_feature 88: note = RNA
  misc_feature 89: note = RNA
  misc_feature 90: note = RNA
  misc_feature 91: note = RNA
  misc_feature 92: note = RNA
  misc_feature 93: note = RNA
  misc_feature 94: note = RNA
  misc_feature 95: note = RNA
  misc_feature 96: note = RNA
  misc_feature 97: note = RNA
  misc_feature 98: note = RNA
  misc_feature 99: note = RNA
  misc_feature 100: note = RNA
  misc_feature 11: note = DNA
  misc_feature 14: note = DNA
  misc_feature 19: note = DNA

SEQ ID NO: 435 - DNA, 100 bp, synthetic construct; identical to SEQ ID NO: 58
  source 1..100: mol_type = other DNA
  modified_base 1: mod_base = OTHER; note = 2'-O-methyl ribonucleotide
  modified_base 2: mod_base = OTHER; note = 2'-O-methyl ribonucleotide
  modified_base 3: mod_base = OTHER; note = 2'-O-methyl ribonucleotide
  modified_base 21: mod_base = OTHER; note = 2'-O-methyl ribonucleotide
  modified_base 28: mod_base = OTHER; note = 2'-O-methyl ribonucleotide
  modified_base 29: mod_base = OTHER; note = 2'-O-methyl ribonucleotide
  modified_base 30: mod_base = OTHER; note = 2'-O-methyl ribonucleotide
  modified_base 31: mod_base = OTHER; note = 2'-O-methyl ribonucleotide
  modified_base 32: mod_base = OTHER; note = 2'-O-methyl ribonucleotide
  modified_base 34: mod_base = OTHER; note = 2'-O-methyl ribonucleotide
  modified_base 35: mod_base = OTHER; note = 2'-O-methyl ribonucleotide
  modified_base 36: mod_base = OTHER; note = 2'-O-methyl ribonucleotide
  modified_base 37: mod_base = OTHER; note = 2'-O-methyl ribonucleotide
  modified_base 38: mod_base = OTHER; note = 2'-O-methyl ribonucleotide
  modified_base 39: mod_base = OTHER; note = 2'-O-methyl ribonucleotide
  modified_base 40: mod_base = OTHER; note = 2'-O-methyl ribonucleotide
  modified_base 41: mod_base = OTHER; note = 2'-O-methyl ribonucleotide
  modified_base 42: mod_base = OTHER; note = 2'-O-methyl ribonucleotide
  modified_base 46: mod_base = OTHER; note = 2'-O-methyl ribonucleotide
  modified_base 48: mod_base = OTHER; note = 2'-O-methyl ribonucleotide
  modified_base 50: mod_base = OTHER; note = 2'-O-methyl ribonucleotide
  modified_base 52: mod_base = OTHER; note = 2'-O-methyl ribonucleotide
  modified_base 53: mod_base = OTHER; note = 2'-O-methyl ribonucleotide
  modified_base 54: mod_base = OTHER; note = 2'-O-methyl ribonucleotide
  modified_base 55: mod_base = OTHER; note = 2'-O-methyl ribonucleotide
  modified_base 56: mod_base = OTHER; note = 2'-O-methyl ribonucleotide
  modified_base 57: mod_base = OTHER; note = 2'-O-methyl ribonucleotide
  modified_base 60: mod_base = OTHER; note = 2'-O-methyl ribonucleotide
  modified_base 61: mod_base = OTHER; note = 2'-O-methyl ribonucleotide
  modified_base 66: mod_base = OTHER; note = 2'-O-methyl ribonucleotide
  modified_base 67: mod_base = OTHER; note = 2'-O-methyl ribonucleotide
  modified_base 70: mod_base = OTHER; note = 2'-O-methyl ribonucleotide
  modified_base 71: mod_base = OTHER; note = 2'-O-methyl ribonucleotide
  modified_base 72: mod_base = OTHER; note = 2'-O-methyl ribonucleotide
  modified_base 74: mod_base = OTHER; note = 2'-O-methyl ribonucleotide
  modified_base 75: mod_base = OTHER; note = 2'-O-methyl ribonucleotide
  modified_base 76: mod_base = OTHER; note = 2'-O-methyl ribonucleotide
  modified_base 77: mod_base = OTHER; note = 2'-O-methyl ribonucleotide
  modified_base 78: mod_base = OTHER; note = 2'-O-methyl ribonucleotide
  modified_base 79: mod_base = OTHER; note = 2'-O-methyl ribonucleotide
  modified_base 80: mod_base = OTHER; note = 2'-O-methyl ribonucleotide
  modified_base 81: mod_base = OTHER; note = 2'-O-methyl ribonucleotide
  modified_base 83: mod_base = OTHER; note = 2'-O-methyl ribonucleotide
  modified_base 84: mod_base = OTHER; note = 2'-O-methyl ribonucleotide
  modified_base 85: mod_base = OTHER; note = 2'-O-methyl ribonucleotide
  modified_base 86: mod_base = OTHER; note = 2'-O-methyl ribonucleotide
  modified_base 87: mod_base = OTHER; note = 2'-O-methyl ribonucleotide
  modified_base 88: mod_base = OTHER; note = 2'-O-methyl ribonucleotide
  modified_base 89: mod_base = OTHER; note = 2'-O-methyl ribonucleotide
  modified_base 90: mod_base = OTHER; note = 2'-O-methyl ribonucleotide
  modified_base 91: mod_base = OTHER; note = 2'-O-methyl ribonucleotide
  modified_base 92: mod_base = OTHER; note = 2'-O-methyl ribonucleotide
  modified_base 93: mod_base = OTHER; note = 2'-O-methyl ribonucleotide
  modified_base 94: mod_base = OTHER; note = 2'-O-methyl ribonucleotide
  modified_base 95: mod_base = OTHER; note = 2'-O-methyl ribonucleotide
  modified_base 96: mod_base = OTHER; note = 2'-O-methyl ribonucleotide
  modified_base 97: mod_base = OTHER; note = 2'-O-methyl ribonucleotide
  modified_base 98: mod_base = OTHER; note = 2'-O-methyl ribonucleotide
  modified_base 99: mod_base = OTHER; note = 2'-O-methyl ribonucleotide
  modified_base 100: mod_base = OTHER; note = 2'-O-methyl ribonucleotide
  modified_base 9: mod_base = OTHER; note = deoxyuridine
  modified_base 10: mod_base = OTHER; note = deoxyuridine
  modified_base 1..4: mod_base = OTHER; note = phosphorothioate linkage
  modified_base 97..100: mod_base = OTHER; note = phosphorothioate linkage
  misc_feature 1: note = RNA
  misc_feature 2: note = RNA
  misc_feature 3: note = RNA
  misc_feature 7: note = RNA
  misc_feature 8: note = RNA
  misc_feature 11: note = RNA
  misc_feature 12: note = RNA
  misc_feature 14: note = RNA
  misc_feature 15: note = RNA
  misc_feature 16: note = RNA
  misc_feature 18: note = RNA
  misc_feature 19: note = RNA
  misc_feature 21: note = RNA
  misc_feature 22: note = RNA
  misc_feature 23: note = RNA
  misc_feature 24: note = RNA
  misc_feature 25: note = RNA
  misc_feature 26: note = RNA
  misc_feature 27: note = RNA
  misc_feature 28: note = RNA
  misc_feature 29: note = RNA
  misc_feature 30: note = RNA
  misc_feature 31: note = RNA
  misc_feature 32: note = RNA
  misc_feature 33: note = RNA
  misc_feature 34: note = RNA
  misc_feature 35: note = RNA
  misc_feature 36: note = RNA
  misc_feature 37: note = RNA
  misc_feature 38: note = RNA
  misc_feature 39: note = RNA
  misc_feature 40: note = RNA
  misc_feature 41: note = RNA
  misc_feature 42: note = RNA
  misc_feature 43: note = RNA
  misc_feature 44: note = RNA
  misc_feature 45: note = RNA
  misc_feature 46: note = RNA
  misc_feature 47: note = RNA
  misc_feature 48: note = RNA
  misc_feature 49: note = RNA
  misc_feature 50: note = RNA
  misc_feature 51: note = RNA
  misc_feature 52: note = RNA
  misc_feature 53: note = RNA
  misc_feature 54: note = RNA
  misc_feature 55: note = RNA
  misc_feature 56: note = RNA
  misc_feature 57: note = RNA
  misc_feature 58: note = RNA
  misc_feature 59: note = RNA
  misc_feature 60: note = RNA
  misc_feature 61: note = RNA
  misc_feature 62: note = RNA
  misc_feature 63: note = RNA
  misc_feature 64: note = RNA
  misc_feature 65: note = RNA
  misc_feature 66: note = RNA
  misc_feature 67: note = RNA
  misc_feature 68: note = RNA
  misc_feature 69: note = RNA
  misc_feature 70: note = RNA
  misc_feature 71: note = RNA
  misc_feature 72: note = RNA
  misc_feature 73: note = RNA
  misc_feature 74: note = RNA
  misc_feature 75: note = RNA
  misc_feature 76: note = RNA
  misc_feature 77: note = RNA
  misc_feature 78: note = RNA
  misc_feature 79: note = RNA
  misc_feature 80: note = RNA
  misc_feature 81: note = RNA
  misc_feature 82: note = RNA
  misc_feature 83: note = RNA
  misc_feature 84: note = RNA
  misc_feature 85: note = RNA
  misc_feature 86: note = RNA
  misc_feature 87: note = RNA
  misc_feature 88: note = RNA
  misc_feature 89: note = RNA
  misc_feature 90: note = RNA
  misc_feature 91: note = RNA
  misc_feature 92: note = RNA
  misc_feature 93: note = RNA
  misc_feature 94: note = RNA
  misc_feature 95: note = RNA
  misc_feature 96: note = RNA
  misc_feature 97: note = RNA
  misc_feature 98: note = RNA
  misc_feature 99: note = RNA
  misc_feature 100: note = RNA
  misc_feature 4: note = DNA
  misc_feature 5: note = DNA
  misc_feature 6: note = DNA
  misc_feature 9: note = DNA
  misc_feature 10: note = DNA
  misc_feature 13: note = DNA
  misc_feature 17: note = DNA
  misc_feature 20: note = DNA

SEQ ID NO: 436 - RNA, 102 nt, synthetic construct; identical to SEQ ID NO: 12
  source 1..102: mol_type = other RNA
  modified_base 1: mod_base = OTHER; note = 2'-O-methyl ribonucleotide
  modified_base 2: mod_base = OTHER; note = 2'-O-methyl ribonucleotide
  modified_base 3: mod_base = OTHER; note = 2'-O-methyl ribonucleotide
  modified_base 20: mod_base = OTHER; note = 2'-O-methyl ribonucleotide
  modified_base 27: mod_base = OTHER; note = 2'-O-methyl ribonucleotide
  modified_base 28: mod_base = OTHER; note = 2'-O-methyl ribonucleotide
  modified_base 29: mod_base = OTHER; note = 2'-O-methyl ribonucleotide
  modified_base 30: mod_base = OTHER; note = 2'-O-methyl ribonucleotide
  modified_base 31: mod_base = OTHER; note = 2'-O-methyl ribonucleotide
  modified_base 33: mod_base = OTHER; note = 2'-O-methyl ribonucleotide
  modified_base 34: mod_base = OTHER; note = 2'-O-methyl ribonucleotide
  modified_base 35: mod_base = OTHER; note = 2'-O-methyl ribonucleotide
  modified_base 36: mod_base = OTHER; note = 2'-O-methyl ribonucleotide
  modified_base 37: mod_base = OTHER; note = 2'-O-methyl ribonucleotide
  modified_base 38: mod_base = OTHER; note = 2'-O-methyl ribonucleotide
  modified_base 39: mod_base = OTHER; note = 2'-O-methyl ribonucleotide
  modified_base 40: mod_base = OTHER; note = 2'-O-methyl ribonucleotide
  modified_base 41: mod_base = OTHER; note = 2'-O-methyl ribonucleotide
  modified_base 45: mod_base = OTHER; note = 2'-O-methyl ribonucleotide
  modified_base 47: mod_base = OTHER; note = 2'-O-methyl ribonucleotide
  modified_base 49: mod_base = OTHER; note = 2'-O-methyl ribonucleotide
  modified_base 51: mod_base = OTHER; note = 2'-O-methyl ribonucleotide
  modified_base 52: mod_base = OTHER; note = 2'-O-methyl ribonucleotide
  modified_base 53: mod_base = OTHER; note = 2'-O-methyl ribonucleotide
  modified_base 54: mod_base = OTHER; note = 2'-O-methyl ribonucleotide
  modified_base 55: mod_base = OTHER; note = 2'-O-methyl ribonucleotide
  modified_base 56: mod_base = OTHER; note = 2'-O-methyl ribonucleotide
  modified_base 59: mod_base = OTHER; note = 2'-O-methyl ribonucleotide
  modified_base 60: mod_base = OTHER; note = 2'-O-methyl ribonucleotide
  modified_base 65: mod_base = OTHER; note = 2'-O-methyl ribonucleotide
  modified_base 66: mod_base = OTHER; note = 2'-O-methyl ribonucleotide
  modified_base 69: mod_base = OTHER; note = 2'-O-methyl ribonucleotide
  modified_base 70: mod_base = OTHER; note = 2'-O-methyl ribonucleotide
  modified_base 71: mod_base = OTHER; note = 2'-O-methyl ribonucleotide
  modified_base 73: mod_base = OTHER; note = 2'-O-methyl ribonucleotide
  modified_base 74: mod_base = OTHER; note = 2'-O-methyl ribonucleotide
  modified_base 75: mod_base = OTHER; note = 2'-O-methyl ribonucleotide
  modified_base 76: mod_base = OTHER; note = 2'-O-methyl ribonucleotide
  modified_base 77: mod_base = OTHER; note = 2'-O-methyl ribonucleotide
  modified_base 78: mod_base = OTHER; note = 2'-O-methyl ribonucleotide
  modified_base 79: mod_base = OTHER; note = 2'-O-methyl ribonucleotide
  modified_base 80: mod_base = OTHER; note = 2'-O-methyl ribonucleotide
  modified_base 82: mod_base = OTHER; note = 2'-O-methyl ribonucleotide
  modified_base 83: mod_base = OTHER; note = 2'-O-methyl ribonucleotide
  modified_base 84: mod_base = OTHER; note = 2'-O-methyl ribonucleotide
  modified_base 85: mod_base = OTHER; note = 2'-O-methyl ribonucleotide
  modified_base 86: mod_base = OTHER; note = 2'-O-methyl ribonucleotide
  modified_base 87: mod_base = OTHER; note = 2'-O-methyl ribonucleotide
  modified_base 88: mod_base = OTHER; note = 2'-O-methyl ribonucleotide
  modified_base 89: mod_base = OTHER; note = 2'-O-methyl ribonucleotide
  modified_base 90: mod_base = OTHER; note = 2'-O-methyl ribonucleotide
  modified_base 91: mod_base = OTHER; note = 2'-O-methyl ribonucleotide
  modified_base 92: mod_base = OTHER; note = 2'-O-methyl ribonucleotide
  modified_base 93: mod_base = OTHER; note = 2'-O-methyl ribonucleotide
  modified_base 94: mod_base = OTHER; note = 2'-O-methyl ribonucleotide
  modified_base 95: mod_base = OTHER; note = 2'-O-methyl ribonucleotide
  modified_base 96: mod_base = OTHER; note = 2'-O-methyl ribonucleotide
  modified_base 97: mod_base = OTHER; note = 2'-O-methyl ribonucleotide
  modified_base 98: mod_base = OTHER; note = 2'-O-methyl ribonucleotide
  modified_base 99: mod_base = OTHER; note = 2'-O-methyl ribonucleotide
  modified_base 100: mod_base = OTHER; note = 2'-O-methyl ribonucleotide
  modified_base 101: mod_base = OTHER; note = 2'-O-methyl ribonucleotide
  modified_base 102: mod_base = OTHER; note = 2'-O-methyl ribonucleotide
  modified_base 1..4: mod_base = OTHER; note = phosphorothioate linkage
  modified_base 97..99: mod_base = OTHER; note = phosphorothioate linkage

SEQ ID NO: 437 - RNA, 99 nt, synthetic construct
  source 1..99: mol_type = other RNA
  modified_base 1: mod_base = OTHER; note = 2'-O-methyl ribonucleotide
  modified_base 2: mod_base = OTHER; note = 2'-O-methyl ribonucleotide
  modified_base 20: mod_base = OTHER; note = 2'-O-methyl ribonucleotide
  modified_base 27: mod_base = OTHER; note = 2'-O-methyl ribonucleotide
  modified_base 28: mod_base = OTHER; note = 2'-O-methyl ribonucleotide
  modified_base 29: mod_base = OTHER; note = 2'-O-methyl ribonucleotide
  modified_base 30: mod_base = OTHER; note = 2'-O-methyl ribonucleotide
  modified_base 31: mod_base = OTHER; note = 2'-O-methyl ribonucleotide
  modified_base 33: mod_base = OTHER; note = 2'-O-methyl ribonucleotide
  modified_base 34: mod_base = OTHER; note = 2'-O-methyl ribonucleotide
  modified_base 35: mod_base = OTHER; note = 2'-O-methyl ribonucleotide
  modified_base 36: mod_base = OTHER; note = 2'-O-methyl ribonucleotide
  modified_base 37: mod_base = OTHER; note = 2'-O-methyl ribonucleotide
  modified_base 38: mod_base = OTHER; note = 2'-O-methyl ribonucleotide
  modified_base 39: mod_base = OTHER; note = 2'-O-methyl ribonucleotide
  modified_base 40: mod_base = OTHER; note = 2'-O-methyl ribonucleotide
  modified_base 41: mod_base = OTHER; note = 2'-O-methyl ribonucleotide
  modified_base 45: mod_base = OTHER; note = 2'-O-methyl ribonucleotide
  modified_base 47: mod_base = OTHER; note = 2'-O-methyl ribonucleotide
  modified_base 49: mod_base = OTHER; note = 2'-O-methyl ribonucleotide
  modified_base 51: mod_base = OTHER; note = 2'-O-methyl ribonucleotide
  modified_base 52: mod_base = OTHER; note = 2'-O-methyl ribonucleotide
  modified_base 53: mod_base = OTHER; note = 2'-O-methyl ribonucleotide
  modified_base 54: mod_base = OTHER; note = 2'-O-methyl ribonucleotide
  modified_base 55: mod_base = OTHER; note = 2'-O-methyl ribonucleotide
  modified_base 56: mod_base = OTHER; note = 2'-O-methyl ribonucleotide
  modified_base 59: mod_base = OTHER; note = 2'-O-methyl ribonucleotide
  modified_base 60: mod_base = OTHER; note = 2'-O-methyl ribonucleotide
  modified_base 65: mod_base = OTHER; note = 2'-O-methyl ribonucleotide
  modified_base 66: mod_base = OTHER; note = 2'-O-methyl ribonucleotide
  modified_base 69: mod_base = OTHER; note = 2'-O-methyl ribonucleotide
  modified_base 70: mod_base = OTHER; note = 2'-O-methyl ribonucleotide
  modified_base 71: mod_base = OTHER; note = 2'-O-methyl ribonucleotide
  modified_base 73: mod_base = OTHER; note = 2'-O-methyl ribonucleotide
  modified_base 74: mod_base = OTHER; note = 2'-O-methyl ribonucleotide
  modified_base 75: mod_base = OTHER; note = 2'-O-methyl ribonucleotide
  modified_base 76: mod_base = OTHER; note = 2'-O-methyl ribonucleotide
  modified_base 77: mod_base = OTHER; note = 2'-O-methyl ribonucleotide
  modified_base 78: mod_base = OTHER; note = 2'-O-methyl ribonucleotide
  modified_base 79: mod_base = OTHER; note = 2'-O-methyl ribonucleotide
  modified_base 80: mod_base = OTHER; note = 2'-O-methyl ribonucleotide
  modified_base 82: mod_base = OTHER; note = 2'-O-methyl ribonucleotide
  modified_base 83: mod_base = OTHER; note = 2'-O-methyl ribonucleotide
  modified_base 84: mod_base = OTHER; note = 2'-O-methyl ribonucleotide
  modified_base 85: mod_base = OTHER; note = 2'-O-methyl ribonucleotide
  modified_base 86: mod_base = OTHER; note = 2'-O-methyl ribonucleotide
  modified_base 87: mod_base = OTHER; note = 2'-O-methyl ribonucleotide
  modified_base 88: mod_base = OTHER; note = 2'-O-methyl ribonucleotide
  modified_base 89: mod_base = OTHER; note = 2'-O-methyl ribonucleotide
  modified_base 90: mod_base = OTHER; note = 2'-O-methyl ribonucleotide
  modified_base 91: mod_base = OTHER; note = 2'-O-methyl ribonucleotide
  modified_base 92: mod_base = OTHER; note = 2'-O-methyl ribonucleotide
  modified_base 93: mod_base = OTHER; note = 2'-O-methyl ribonucleotide
  modified_base 94: mod_base = OTHER; note = 2'-O-methyl ribonucleotide
  modified_base 95: mod_base = OTHER; note = 2'-O-methyl ribonucleotide
  modified_base 96: mod_base = OTHER; note = 2'-O-methyl ribonucleotide
  modified_base 97: mod_base = OTHER; note = 2'-O-methyl ribonucleotide
  modified_base 98: mod_base = OTHER; note = 2'-O-methyl ribonucleotide
  modified_base 99: mod_base = OTHER; note = 2'-O-methyl ribonucleotide
  modified_base 1..3: mod_base = OTHER; note = phosphorothioate linkage
  modified_base 96..99: mod_base = OTHER; note = phosphorothioate linkage
ccgcaccttggcgcagcgggttttagagctagaaatagcaagttaaaataaggctagtccgttatcaacttgaaaaagtggcaccgagtcggtgctttt

SEQ ID NO: 438 - RNA, 103 nt, synthetic construct
  source 1..103: mol_type = other RNA
  modified_base 1: mod_base = OTHER; note = 2'-O-methyl ribonucleotide
  modified_base 2: mod_base = OTHER; note = 2'-O-methyl ribonucleotide
  modified_base 3: mod_base = OTHER; note = 2'-O-methyl ribonucleotide
  modified_base 21: mod_base = OTHER; note = 2'-O-methyl ribonucleotide
  modified_base 28: mod_base = OTHER; note = 2'-O-methyl ribonucleotide
  modified_base 29: mod_base = OTHER; note = 2'-O-methyl ribonucleotide
  modified_base 30: mod_base = OTHER; note = 2'-O-methyl ribonucleotide
  modified_base 31: mod_base = OTHER; note = 2'-O-methyl ribonucleotide
  modified_base 32: mod_base = OTHER; note = 2'-O-methyl ribonucleotide
  modified_base 34: mod_base = OTHER; note = 2'-O-methyl ribonucleotide
  modified_base 35: mod_base = OTHER; note = 2'-O-methyl ribonucleotide
  modified_base 36: mod_base = OTHER; note = 2'-O-methyl ribonucleotide
  modified_base 37: mod_base = OTHER; note = 2'-O-methyl ribonucleotide
  modified_base 38: mod_base = OTHER; note = 2'-O-methyl ribonucleotide
  modified_base 39: mod_base = OTHER; note = 2'-O-methyl ribonucleotide
  modified_base 40: mod_base = OTHER; note = 2'-O-methyl ribonucleotide
  modified_base 41: mod_base = OTHER; note = 2'-O-methyl ribonucleotide
  modified_base 42: mod_base = OTHER; note = 2'-O-methyl ribonucleotide
  modified_base 46: mod_base = OTHER; note = 2'-O-methyl ribonucleotide
  modified_base 48: mod_base = OTHER; note = 2'-O-methyl ribonucleotide
  modified_base 50: mod_base = OTHER; note = 2'-O-methyl ribonucleotide
  modified_base 52: mod_base = OTHER; note = 2'-O-methyl ribonucleotide
  modified_base 53: mod_base = OTHER; note = 2'-O-methyl ribonucleotide
  modified_base 54: mod_base = OTHER; note = 2'-O-methyl ribonucleotide
  modified_base 55: mod_base = OTHER; note = 2'-O-methyl ribonucleotide
  modified_base 56: mod_base = OTHER; note = 2'-O-methyl ribonucleotide
  modified_base 57: mod_base = OTHER; note = 2'-O-methyl ribonucleotide
  modified_base 60: mod_base = OTHER; note = 2'-O-methyl ribonucleotide
  modified_base 61: mod_base = OTHER; note = 2'-O-methyl ribonucleotide
  modified_base 66: mod_base = OTHER; note = 2'-O-methyl ribonucleotide
  modified_base 67: mod_base = OTHER; note = 2'-O-methyl ribonucleotide
  modified_base 70: mod_base = OTHER; note = 2'-O-methyl ribonucleotide
  modified_base 71: mod_base = OTHER; note = 2'-O-methyl ribonucleotide
  modified_base 72: mod_base = OTHER; note = 2'-O-methyl ribonucleotide
  modified_base 74: mod_base = OTHER; note = 2'-O-methyl ribonucleotide
  modified_base 75: mod_base = OTHER; note = 2'-O-methyl ribonucleotide
  modified_base 76: mod_base = OTHER; note = 2'-O-methyl ribonucleotide
  modified_base 77: mod_base = OTHER; note = 2'-O-methyl ribonucleotide
  modified_base 78: mod_base = OTHER; note = 2'-O-methyl ribonucleotide
  modified_base 79: mod_base = OTHER; note = 2'-O-methyl ribonucleotide
  modified_base 80: mod_base = OTHER; note = 2'-O-methyl ribonucleotide
  modified_base 81: mod_base = OTHER; note = 2'-O-methyl ribonucleotide
  modified_base 83: mod_base = OTHER; note = 2'-O-methyl ribonucleotide
  modified_base 84: mod_base = OTHER; note = 2'-O-methyl ribonucleotide
  modified_base 85: mod_base = OTHER; note = 2'-O-methyl ribonucleotide
  modified_base 86: mod_base = OTHER; note = 2'-O-methyl ribonucleotide
  modified_base 87: mod_base = OTHER; note = 2'-O-methyl ribonucleotide
  modified_base 88: mod_base = OTHER; note = 2'-O-methyl ribonucleotide
  modified_base 89: mod_base = OTHER; note = 2'-O-methyl ribonucleotide
  modified_base 90: mod_base = OTHER; note = 2'-O-methyl ribonucleotide
  modified_base 91: mod_base = OTHER; note = 2'-O-methyl ribonucleotide
  modified_base 92: mod_base = OTHER; note = 2'-O-methyl ribonucleotide
  modified_base 93: mod_base = OTHER; note = 2'-O-methyl ribonucleotide
  modified_base 94: mod_base = OTHER; note = 2'-O-methyl ribonucleotide
  modified_base 95: mod_base = OTHER; note = 2'-O-methyl ribonucleotide
  modified_base 96: mod_base = OTHER; note = 2'-O-methyl ribonucleotide
  modified_base 97: mod_base = OTHER; note = 2'-O-methyl ribonucleotide
  modified_base 98: mod_base = OTHER; note = 2'-O-methyl ribonucleotide
  modified_base 99: mod_base = OTHER; note = 2'-O-methyl ribonucleotide
  modified_base 100: mod_base = OTHER; note = 2'-O-methyl ribonucleotide
  modified_base 103: mod_base = OTHER; note = 2'-O-methyl ribonucleotide
  modified_base 1..4: mod_base = OTHER; note = phosphorothioate linkage
  modified_base 97..100: mod_base = OTHER; note = phosphorothioate linkage
aagatacctgaataaccctcgttttagagctagaaatagcaagttaaaataaggctagtccgttatcaacttgaaaaagtggcaccgagtcggtgcttttttt

SEQ ID NO: 439 - RNA, 100 nt, synthetic construct
  source 1..100: mol_type = other RNA
  modified_base 1: mod_base = OTHER; note = 2'-O-methyl ribonucleotide
  modified_base 2: mod_base = OTHER; note = 2'-O-methyl ribonucleotide
  modified_base 3: mod_base = OTHER; note = 2'-O-methyl ribonucleotide
  modified_base 21: mod_base = OTHER; note = 2'-O-methyl ribonucleotide
  modified_base 28: mod_base = OTHER; note = 2'-O-methyl ribonucleotide
  modified_base 29: mod_base = OTHER; note = 2'-O-methyl ribonucleotide
  modified_base 30: mod_base = OTHER; note = 2'-O-methyl ribonucleotide
  modified_base 31: mod_base = OTHER; note = 2'-O-methyl ribonucleotide
  modified_base 32: mod_base = OTHER; note = 2'-O-methyl ribonucleotide
  modified_base 34: mod_base = OTHER; note = 2'-O-methyl ribonucleotide
  modified_base 35: mod_base = OTHER; note = 2'-O-methyl ribonucleotide
  modified_base 36: mod_base = OTHER; note = 2'-O-methyl ribonucleotide
  modified_base 37: mod_base = OTHER; note = 2'-O-methyl ribonucleotide
  modified_base 38: mod_base = OTHER; note = 2'-O-methyl ribonucleotide
  modified_base 39: mod_base = OTHER; note = 2'-O-methyl ribonucleotide
  modified_base 40: mod_base = OTHER; note = 2'-O-methyl ribonucleotide
  modified_base 41: mod_base = OTHER; note = 2'-O-methyl ribonucleotide
  modified_base 42: mod_base = OTHER; note = 2'-O-methyl ribonucleotide
  modified_base 46: mod_base = OTHER; note = 2'-O-methyl ribonucleotide
  modified_base 48: mod_base = OTHER; note = 2'-O-methyl ribonucleotide
  modified_base 50: mod_base = OTHER; note = 2'-O-methyl ribonucleotide
  modified_base 52: mod_base = OTHER; note = 2'-O-methyl ribonucleotide
  modified_base 53: mod_base = OTHER; note = 2'-O-methyl ribonucleotide
  modified_base 54: mod_base = OTHER; note = 2'-O-methyl ribonucleotide
  modified_base 55: mod_base = OTHER; note = 2'-O-methyl ribonucleotide
  modified_base 56: mod_base = OTHER; note = 2'-O-methyl ribonucleotide
  modified_base 57: mod_base = OTHER; note = 2'-O-methyl ribonucleotide
  modified_base 60: mod_base = OTHER; note = 2'-O-methyl ribonucleotide
  modified_base 61: mod_base = OTHER; note = 2'-O-methyl ribonucleotide
  modified_base 66: mod_base = OTHER; note = 2'-O-methyl ribonucleotide
  modified_base 67: mod_base = OTHER; note = 2'-O-methyl ribonucleotide
  modified_base 70: mod_base = OTHER; note = 2'-O-methyl ribonucleotide
  modified_base 71: mod_base = OTHER; note = 2'-O-methyl ribonucleotide
  modified_base 72: mod_base = OTHER; note = 2'-O-methyl ribonucleotide
  modified_base 74: mod_base = OTHER; note = 2'-O-methyl ribonucleotide
  modified_base 75: mod_base = OTHER; note = 2'-O-methyl ribonucleotide
  modified_base 76: mod_base = OTHER; note = 2'-O-methyl ribonucleotide
  modified_base 77: mod_base = OTHER; note = 2'-O-methyl ribonucleotide
  modified_base 78: mod_base = OTHER; note = 2'-O-methyl ribonucleotide
  modified_base 79: mod_base = OTHER; note = 2'-O-methyl ribonucleotide
  modified_base 80: mod_base = OTHER; note = 2'-O-methyl ribonucleotide
  modified_base 81: mod_base = OTHER; note = 2'-O-methyl ribonucleotide
  modified_base 83: mod_base = OTHER; note = 2'-O-methyl ribonucleotide
  modified_base 84: mod_base = OTHER; note = 2'-O-methyl ribonucleotide
  modified_base 85: mod_base = OTHER; note = 2'-O-methyl ribonucleotide
  modified_base 86: mod_base = OTHER; note = 2'-O-methyl ribonucleotide
  modified_base 87: mod_base = OTHER; note = 2'-O-methyl ribonucleotide
  modified_base 88: mod_base = OTHER; note = 2'-O-methyl ribonucleotide
  modified_base 89: mod_base = OTHER; note = 2'-O-methyl ribonucleotide
  modified_base 90: mod_base = OTHER; note = 2'-O-methyl ribonucleotide
  modified_base 91: mod_base = OTHER; note = 2'-O-methyl ribonucleotide
  modified_base 92: mod_base = OTHER; note = 2'-O-methyl ribonucleotide
  modified_base 93: mod_base = OTHER; note = 2'-O-methyl ribonucleotide
  modified_base 94: mod_base = OTHER; note = 2'-O-methyl ribonucleotide
  modified_base 95: mod_base = OTHER; note = 2'-O-methyl ribonucleotide
  modified_base 96: mod_base = OTHER; note = 2'-O-methyl ribonucleotide
  modified_base 97: mod_base = OTHER; note = 2'-O-methyl ribonucleotide
  modified_base 98: mod_base = OTHER; note = 2'-O-methyl ribonucleotide
  modified_base 99: mod_base = OTHER; note = 2'-O-methyl ribonucleotide
  modified_base 100: mod_base = OTHER; note = 2'-O-methyl ribonucleotide
  modified_base 3: mod_base = OTHER; note = inosine
  modified_base 1..4: mod_base = OTHER; note = phosphorothioate linkage
  modified_base 97..100: mod_base = OTHER; note = phosphorothioate linkage
aanatacctgaataaccctcgttttagagctagaaatagcaagttaaaataaggctagtccgttatcaacttgaaaaagtggcaccgagtcggtgctttt

SEQ ID NO: 440 - RNA, 100 nt, synthetic construct
  source 1..100: mol_type = other RNA
  modified_base 1: mod_base = OTHER; note = 2'-O-methyl ribonucleotide
  modified_base 2: mod_base = OTHER; note = 2'-O-methyl ribonucleotide
  modified_base 3: mod_base = OTHER; note = 2'-O-methyl ribonucleotide
  modified_base 21: mod_base = OTHER; note = 2'-O-methyl ribonucleotide
  modified_base 28: mod_base = OTHER; note = 2'-O-methyl ribonucleotide
  modified_base 29: mod_base = OTHER; note = 2'-O-methyl ribonucleotide
  modified_base 30: mod_base = OTHER; note = 2'-O-methyl ribonucleotide
  modified_base 31: mod_base = OTHER; note = 2'-O-methyl ribonucleotide
  modified_base 32: mod_base = OTHER; note = 2'-O-methyl ribonucleotide
  modified_base 34: mod_base = OTHER; note = 2'-O-methyl ribonucleotide
  modified_base 35: mod_base = OTHER; note = 2'-O-methyl ribonucleotide
  modified_base 36: mod_base = OTHER; note = 2'-O-methyl ribonucleotide
  modified_base 37: mod_base = OTHER; note = 2'-O-methyl ribonucleotide
  modified_base 38: mod_base = OTHER; note = 2'-O-methyl ribonucleotide
  modified_base 39: mod_base = OTHER; note = 2'-O-methyl ribonucleotide
  modified_base 40: mod_base = OTHER; note = 2'-O-methyl ribonucleotide
  modified_base 41: mod_base = OTHER; note = 2'-O-methyl ribonucleotide
  modified_base 42: mod_base = OTHER; note = 2'-O-methyl ribonucleotide
  modified_base 46: mod_base = OTHER; note = 2'-O-methyl ribonucleotide
  modified_base 48: mod_base = OTHER; note = 2'-O-methyl ribonucleotide
  modified_base 50: mod_base = OTHER; note = 2'-O-methyl ribonucleotide
  modified_base 52: mod_base = OTHER; note = 2'-O-methyl ribonucleotide
  modified_base 53: mod_base = OTHER; note = 2'-O-methyl ribonucleotide
  modified_base 54: mod_base = OTHER; note = 2'-O-methyl ribonucleotide
  modified_base 55: mod_base = OTHER; note = 2'-O-methyl ribonucleotide
  modified_base 56: mod_base = OTHER; note = 2'-O-methyl ribonucleotide
  modified_base 57: mod_base = OTHER; note = 2'-O-methyl ribonucleotide
  modified_base 60: mod_base = OTHER; note = 2'-O-methyl ribonucleotide
  modified_base 61: mod_base = OTHER; note = 2'-O-methyl ribonucleotide
  modified_base 66: mod_base = OTHER; note = 2'-O-methyl ribonucleotide
  modified_base 67: mod_base = OTHER; note = 2'-O-methyl ribonucleotide
  modified_base 70: mod_base = OTHER; note = 2'-O-methyl ribonucleotide
  modified_base 71: mod_base = OTHER; note = 2'-O-methyl ribonucleotide
  modified_base 72: mod_base = OTHER; note = 2'-O-methyl ribonucleotide
  modified_base 74: mod_base = OTHER; note = 2'-O-methyl ribonucleotide
  modified_base 75: mod_base = OTHER; note = 2'-O-methyl ribonucleotide
  modified_base 76: mod_base = OTHER; note = 2'-O-methyl ribonucleotide
  modified_base 77: mod_base = OTHER; note = 2'-O-methyl ribonucleotide
  modified_base 78: mod_base = OTHER; note = 2'-O-methyl ribonucleotide
  modified_base 79: mod_base = OTHER; note = 2'-O-methyl ribonucleotide
  modified_base 80: mod_base = OTHER; note = 2'-O-methyl ribonucleotide
  modified_base 81: mod_base = OTHER; note = 2'-O-methyl ribonucleotide
  modified_base 83: mod_base = OTHER; note = 2'-O-methyl ribonucleotide
  modified_base 84: mod_base = OTHER; note = 2'-O-methyl ribonucleotide
  modified_base 85: mod_base = OTHER; note = 2'-O-methyl ribonucleotide
  modified_base 86: mod_base = OTHER; note = 2'-O-methyl ribonucleotide
  modified_base 87: mod_base = OTHER; note = 2'-O-methyl ribonucleotide
  modified_base 88: mod_base = OTHER; note = 2'-O-methyl ribonucleotide
  modified_base 89: mod_base = OTHER; note = 2'-O-methyl ribonucleotide
  modified_base 90: mod_base = OTHER; note = 2'-O-methyl ribonucleotide
  modified_base 91: mod_base = OTHER; note = 2'-O-methyl ribonucleotide
  modified_base 92: mod_base = OTHER; note = 2'-O-methyl ribonucleotide
  modified_base 93: mod_base = OTHER; note = 2'-O-methyl ribonucleotide
  modified_base 94: mod_base = OTHER; note = 2'-O-methyl ribonucleotide
  modified_base 95: mod_base = OTHER; note = 2'-O-methyl ribonucleotide
  modified_base 96: mod_base = OTHER; note = 2'-O-methyl ribonucleotide
  modified_base 97: mod_base = OTHER; note = 2'-O-methyl ribonucleotide
  modified_base 98: mod_base = OTHER; note = 2'-O-methyl ribonucleotide
  modified_base 99: mod_base = OTHER; note = 2'-O-methyl ribonucleotide
  modified_base 100: mod_base = OTHER; note = 2'-O-methyl ribonucleotide
  modified_base 3: mod_base = OTHER; note = inosine
  modified_base 10: mod_base = OTHER; note = inosine
  modified_base 1..4: mod_base = OTHER; note = phosphorothioate linkage
  modified_base 97..100: mod_base = OTHER; note = phosphorothioate linkage
aanatacctnaataaccctcgttttagagctagaaatagcaagttaaaataaggctagtccgttatcaacttgaaaaagtggcaccgagtcggtgctttt

SEQ ID NO: 441 - RNA, 100 nt, synthetic construct
  source 1..100: mol_type = other RNA
  modified_base 1: mod_base = OTHER; note = 2'-O-methyl ribonucleotide
  modified_base 2: mod_base = OTHER; note = 2'-O-methyl ribonucleotide
  modified_base 3: mod_base = OTHER; note = 2'-O-methyl ribonucleotide
  modified_base 21: mod_base = OTHER; note = 2'-O-methyl ribonucleotide
  modified_base 28: mod_base = OTHER; note = 2'-O-methyl ribonucleotide
  modified_base 29: mod_base = OTHER; note = 2'-O-methyl ribonucleotide
  modified_base 30: mod_base = OTHER; note = 2'-O-methyl ribonucleotide
  modified_base 31: mod_base = OTHER; note = 2'-O-methyl ribonucleotide
  modified_base 32: mod_base = OTHER; note = 2'-O-methyl ribonucleotide
  modified_base 34: mod_base = OTHER; note = 2'-O-methyl ribonucleotide
  modified_base 35: mod_base = OTHER; note = 2'-O-methyl ribonucleotide
  modified_base 36: mod_base = OTHER; note = 2'-O-methyl ribonucleotide
  modified_base 37: mod_base = OTHER; note = 2'-O-methyl ribonucleotide
  modified_base 38: mod_base = OTHER; note = 2'-O-methyl ribonucleotide
  modified_base 39: mod_base = OTHER; note = 2'-O-methyl ribonucleotide
  modified_base 40: mod_base = OTHER; note = 2'-O-methyl ribonucleotide
  modified_base 41: mod_base = OTHER; note = 2'-O-methyl ribonucleotide
  modified_base 42: mod_base = OTHER; note = 2'-O-methyl ribonucleotide
  modified_base 46: mod_base = OTHER; note = 2'-O-methyl ribonucleotide
  modified_base 48: mod_base = OTHER; note = 2'-O-methyl ribonucleotide
  modified_base 50: mod_base = OTHER; note = 2'-O-methyl ribonucleotide
  modified_base 52: mod_base = OTHER; note = 2'-O-methyl ribonucleotide
  modified_base 53: mod_base = OTHER; note = 2'-O-methyl ribonucleotide
  modified_base 54: mod_base = OTHER; note = 2'-O-methyl ribonucleotide
  modified_base 55: mod_base = OTHER; note = 2'-O-methyl ribonucleotide
  modified_base 56: mod_base = OTHER; note = 2'-O-methyl ribonucleotide
  modified_base 57: mod_base = OTHER; note = 2'-O-methyl ribonucleotide
  modified_base 60: mod_base = OTHER; note = 2'-O-methyl ribonucleotide
  modified_base 61: mod_base = OTHER; note = 2'-O-methyl ribonucleotide
  modified_base 66: mod_base = OTHER; note = 2'-O-methyl ribonucleotide
  modified_base 67: mod_base = OTHER; note = 2'-O-methyl ribonucleotide
  modified_base 70: mod_base = OTHER; note = 2'-O-methyl ribonucleotide
  modified_base 71: mod_base = OTHER; note = 2'-O-methyl ribonucleotide
  modified_base 72: mod_base = OTHER; note = 2'-O-methyl ribonucleotide
  modified_base 74: mod_base = OTHER; note = 2'-O-methyl ribonucleotide
  modified_base 75: mod_base = OTHER; note = 2'-O-methyl ribonucleotide
  modified_base 76: mod_base = OTHER; note = 2'-O-methyl ribonucleotide
  modified_base 77: mod_base = OTHER; note = 2'-O-methyl ribonucleotide
  modified_base 78: mod_base = OTHER; note = 2'-O-methyl ribonucleotide
  modified_base 79: mod_base = OTHER; note = 2'-O-methyl ribonucleotide
  modified_base 80: mod_base = OTHER; note = 2'-O-methyl ribonucleotide
  modified_base 81: mod_base = OTHER; note = 2'-O-methyl ribonucleotide
  modified_base 83: mod_base = OTHER; note = 2'-O-methyl ribonucleotide
  modified_base 84: mod_base = OTHER; note = 2'-O-methyl ribonucleotide
  modified_base 85: mod_base = OTHER; note = 2'-O-methyl ribonucleotide
  modified_base 86: mod_base = OTHER; note = 2'-O-methyl ribonucleotide
  modified_base 87: mod_base = OTHER; note = 2'-O-methyl ribonucleotide
  modified_base 88: mod_base = OTHER; note = 2'-O-methyl ribonucleotide
  modified_base 89: mod_base = OTHER; note = 2'-O-methyl ribonucleotide
  modified_base 90: mod_base = OTHER; note = 2'-O-methyl ribonucleotide
  modified_base 91: mod_base = OTHER; note = 2'-O-methyl ribonucleotide
  modified_base 92: mod_base = OTHER; note = 2'-O-methyl ribonucleotide
  modified_base 93: mod_base = OTHER; note = 2'-O-methyl ribonucleotide
  modified_base 94: mod_base = OTHER; note = 2'-O-methyl ribonucleotide
  modified_base 95: mod_base = OTHER; note = 2'-O-methyl ribonucleotide
  modified_base 96: mod_base = OTHER; note = 2'-O-methyl ribonucleotide
  modified_base 97: mod_base = OTHER; note = 2'-O-methyl ribonucleotide
  modified_base 98: mod_base = OTHER; note = 2'-O-methyl ribonucleotide
  modified_base 99: mod_base = OTHER; note = 2'-O-methyl ribonucleotide
  modified_base 100: mod_base = OTHER; note = 2'-O-methyl ribonucleotide
  modified_base 10: mod_base = OTHER; note = inosine
  modified_base 1..4: mod_base = OTHER; note = phosphorothioate linkage
  modified_base 97..100: mod_base = OTHER; note = phosphorothioate linkage
aagatacctnaataaccctcgttttagagctagaaatagcaagttaaaataaggctagtccgttatcaacttgaaaaagtggcaccgagtcggtgctttt

SEQ ID NO: 442 - RNA, 99 nt, synthetic construct
  source 1..99: mol_type = other RNA
  modified_base 1: mod_base = OTHER; note = 2'-O-methyl ribonucleotide
  modified_base 2: mod_base = OTHER; note = 2'-O-methyl ribonucleotide
  modified_base 3: mod_base = OTHER; note = 2'-O-methyl ribonucleotide
  modified_base 20: mod_base = OTHER; note = 2'-O-methyl ribonucleotide
  modified_base 27: mod_base = OTHER; note = 2'-O-methyl ribonucleotide
  modified_base 28: mod_base = OTHER; note = 2'-O-methyl ribonucleotide
  modified_base 29: mod_base = OTHER; note = 2'-O-methyl ribonucleotide
  modified_base 30: mod_base = OTHER; note = 2'-O-methyl ribonucleotide
  modified_base 31: mod_base = OTHER; note = 2'-O-methyl ribonucleotide
  modified_base 33: mod_base = OTHER; note = 2'-O-methyl ribonucleotide
  modified_base 34: mod_base = OTHER; note = 2'-O-methyl ribonucleotide
  modified_base 35: mod_base = OTHER; note = 2'-O-methyl ribonucleotide
  modified_base 36: mod_base = OTHER; note = 2'-O-methyl ribonucleotide
  modified_base 37: mod_base = OTHER; note = 2'-O-methyl ribonucleotide
  modified_base 38: mod_base = OTHER; note = 2'-O-methyl ribonucleotide
  modified_base 39: mod_base = OTHER; note = 2'-O-methyl ribonucleotide
  modified_base 40: mod_base = OTHER; note = 2'-O-methyl ribonucleotide
  modified_base 41: mod_base = OTHER; note = 2'-O-methyl ribonucleotide
  modified_base 45: mod_base = OTHER; note = 2'-O-methyl ribonucleotide
  modified_base 47: mod_base = OTHER; note = 2'-O-methyl ribonucleotide
  modified_base 49: mod_base = OTHER; note = 2'-O-methyl ribonucleotide
  modified_base 51: mod_base = OTHER; note = 2'-O-methyl ribonucleotide
  modified_base 52: mod_base = OTHER; note = 2'-O-methyl ribonucleotide
  modified_base 53: mod_base = OTHER; note = 2'-O-methyl ribonucleotide
  modified_base 54: mod_base = OTHER; note = 2'-O-methyl ribonucleotide
  modified_base 55: mod_base = OTHER; note = 2'-O-methyl ribonucleotide
  modified_base 56: mod_base = OTHER; note = 2'-O-methyl ribonucleotide
  modified_base 59: mod_base = OTHER; note = 2'-O-methyl ribonucleotide
  modified_base 60: mod_base = OTHER; note = 2'-O-methyl ribonucleotide
  modified_base 65: mod_base = OTHER; note = 2'-O-methyl ribonucleotide
  modified_base 66: mod_base = OTHER; note = 2'-O-methyl ribonucleotide
  modified_base 69: mod_base = OTHER; note = 2'-O-methyl ribonucleotide
  modified_base 70: mod_base = OTHER; note = 2'-O-methyl ribonucleotide
  modified_base 71: mod_base = OTHER; note = 2'-O-methyl ribonucleotide
  modified_base 73: mod_base = OTHER; note = 2'-O-methyl ribonucleotide
  modified_base 74: mod_base = OTHER; note = 2'-O-methyl ribonucleotide
  modified_base 75: mod_base = OTHER; note = 2'-O-methyl ribonucleotide
  modified_base 76: mod_base = OTHER; note = 2'-O-methyl ribonucleotide
  modified_base 77: mod_base = OTHER; note = 2'-O-methyl ribonucleotide
  modified_base 78: mod_base = OTHER; note = 2'-O-methyl ribonucleotide
  modified_base 79: mod_base = OTHER; note = 2'-O-methyl ribonucleotide
  modified_base 80: mod_base = OTHER; note = 2'-O-methyl ribonucleotide
  modified_base 82: mod_base = OTHER; note = 2'-O-methyl ribonucleotide
  modified_base 83: mod_base = OTHER; note = 2'-O-methyl ribonucleotide
  modified_base 84: mod_base = OTHER; note = 2'-O-methyl ribonucleotide
  modified_base 85: mod_base = OTHER; note = 2'-O-methyl ribonucleotide
  modified_base 86: mod_base = OTHER; note = 2'-O-methyl ribonucleotide
  modified_base 87: mod_base = OTHER; note = 2'-O-methyl ribonucleotide
  modified_base 88: mod_base = OTHER; note = 2'-O-methyl ribonucleotide
  modified_base 89: mod_base = OTHER; note = 2'-O-methyl ribonucleotide
  modified_base 90: mod_base = OTHER; note = 2'-O-methyl ribonucleotide
  modified_base 91: mod_base = OTHER; note = 2'-O-methyl ribonucleotide
  modified_base 92: mod_base = OTHER; note = 2'-O-methyl ribonucleotide
  modified_base 93: mod_base = OTHER; note = 2'-O-methyl ribonucleotide
  modified_base 94: mod_base = OTHER; note = 2'-O-methyl ribonucleotide
  modified_base 95: mod_base = OTHER; note = 2'-O-methyl ribonucleotide
  modified_base 96: mod_base = OTHER; note = 2'-O-methyl ribonucleotide
  modified_base 97: mod_base = OTHER; note = 2'-O-methyl ribonucleotide
  modified_base 98: mod_base = OTHER; note = 2'-O-methyl ribonucleotide
  modified_base 99: mod_base = OTHER; note = 2'-O-methyl ribonucleotide
  modified_base 1..4: mod_base = OTHER; note = phosphorothioate linkage
  modified_base 96..99: mod_base = OTHER; note = phosphorothioate linkage
agatacctgaataaccctcgttttagagctagaaatagcaagttaaaataaggctagtccgttatcaacttgaaaaagtggcaccgagtcggtgctttt

SEQ ID NO: 443 - RNA, 98 nt, synthetic construct
  source 1..98: mol_type = other RNA
  modified_base 1: mod_base = OTHER; note = 2'-O-methyl ribonucleotide
  modified_base 2: mod_base = OTHER; note = 2'-O-methyl ribonucleotide
  modified_base 19: mod_base = OTHER; note = 2'-O-methyl ribonucleotide
  modified_base 26: mod_base = OTHER; note = 2'-O-methyl ribonucleotide
  modified_base 27: mod_base = OTHER; note = 2'-O-methyl ribonucleotide
  modified_base 28: mod_base = OTHER; note = 2'-O-methyl ribonucleotide
  modified_base 29: mod_base = OTHER; note = 2'-O-methyl ribonucleotide
  modified_base 30: mod_base = OTHER; note = 2'-O-methyl ribonucleotide
  modified_base 32: mod_base = OTHER; note = 2'-O-methyl ribonucleotide
  modified_base 33: mod_base = OTHER; note = 2'-O-methyl ribonucleotide
  modified_base 34: mod_base = OTHER; note = 2'-O-methyl ribonucleotide
  modified_base 35: mod_base = OTHER; note = 2'-O-methyl ribonucleotide
  modified_base 36: mod_base = OTHER; note = 2'-O-methyl ribonucleotide
  modified_base 37: mod_base = OTHER; note = 2'-O-methyl ribonucleotide
  modified_base 38: mod_base = OTHER; note = 2'-O-methyl ribonucleotide
  modified_base 39: mod_base = OTHER; note = 2'-O-methyl ribonucleotide
  modified_base 40: mod_base = OTHER; note = 2'-O-methyl ribonucleotide
  modified_base 44: mod_base = OTHER; note = 2'-O-methyl ribonucleotide
  modified_base 46: mod_base = OTHER; note = 2'-O-methyl ribonucleotide
  modified_base 48: mod_base = OTHER; note = 2'-O-methyl ribonucleotide
  modified_base 50: mod_base = OTHER; note = 2'-O-methyl ribonucleotide
  modified_base 51: mod_base = OTHER; note = 2'-O-methyl ribonucleotide
  modified_base 52: mod_base = OTHER; note = 2'-O-methyl ribonucleotide
  modified_base 53: mod_base = OTHER; note = 2'-O-methyl ribonucleotide
  modified_base 54: mod_base = OTHER; note = 2'-O-methyl ribonucleotide
  modified_base 55: mod_base = OTHER; note = 2'-O-methyl ribonucleotide
  modified_base 58: mod_base = OTHER; note = 2'-O-methyl ribonucleotide
  modified_base 59: mod_base = OTHER; note = 2'-O-methyl ribonucleotide
  modified_base 64: mod_base = OTHER; note = 2'-O-methyl ribonucleotide
  modified_base 65: mod_base = OTHER; note = 2'-O-methyl ribonucleotide
  modified_base 68: mod_base = OTHER; note = 2'-O-methyl ribonucleotide
  modified_base 69: mod_base = OTHER; note = 2'-O-methyl ribonucleotide
  modified_base 70: mod_base = OTHER; note = 2'-O-methyl ribonucleotide
  modified_base 72: mod_base = OTHER; note = 2'-O-methyl ribonucleotide
  modified_base 73: mod_base = OTHER; note = 2'-O-methyl ribonucleotide
  modified_base 74: mod_base = OTHER; note = 2'-O-methyl ribonucleotide
  modified_base 75: mod_base = OTHER; note = 2'-O-methyl ribonucleotide
  modified_base 76: mod_base = OTHER; note = 2'-O-methyl ribonucleotide
  modified_base 77: mod_base = OTHER; note = 2'-O-methyl ribonucleotide
  modified_base 78: mod_base = OTHER; note = 2'-O-methyl ribonucleotide
  modified_base 79: mod_base = OTHER; note = 2'-O-methyl ribonucleotide
  modified_base 81: mod_base = OTHER; note = 2'-O-methyl ribonucleotide
  modified_base 82: mod_base = OTHER; note = 2'-O-methyl ribonucleotide
  modified_base 83: mod_base = OTHER; note = 2'-O-methyl ribonucleotide
  modified_base 84: mod_base = OTHER; note = 2'-O-methyl ribonucleotide
  modified_base 85: mod_base = OTHER; note = 2'-O-methyl ribonucleotide
  modified_base 86: mod_base = OTHER; note = 2'-O-methyl ribonucleotide
  modified_base 87: mod_base = OTHER; note = 2'-O-methyl ribonucleotide
  modified_base 88: mod_base = OTHER; note = 2'-O-methyl ribonucleotide
  modified_base 89: mod_base = OTHER; note = 2'-O-methyl ribonucleotide
  modified_base 90: mod_base = OTHER; note = 2'-O-methyl ribonucleotide
  modified_base 91: mod_base = OTHER; note = 2'-O-methyl ribonucleotide
  modified_base 92: mod_base = OTHER; note = 2'-O-methyl ribonucleotide
  modified_base 93: mod_base = OTHER; note = 2'-O-methyl ribonucleotide
  modified_base 94: mod_base = OTHER; note = 2'-O-methyl ribonucleotide
  modified_base 95: mod_base = OTHER; note = 2'-O-methyl ribonucleotide
  modified_base 96: mod_base = OTHER; note = 2'-O-methyl ribonucleotide
  modified_base 97: mod_base = OTHER; note = 2'-O-methyl ribonucleotide
  modified_base 98: mod_base = OTHER; note = 2'-O-methyl ribonucleotide
  modified_base 1..3: mod_base = OTHER; note = phosphorothioate linkage
  modified_base 95..98: mod_base = OTHER; note = phosphorothioate linkage
gatacctgaataaccctcgttttagagctagaaatagcaagttaaaataaggctagtccgttatcaacttgaaaaagtggcaccgagtcggtgctttt

SEQ ID NO: 444 - RNA, 97 nt, synthetic construct
  source 1..97: mol_type = other RNA
  modified_base 1: mod_base = OTHER; note = 2'-O-methyl ribonucleotide
  modified_base 2: mod_base = OTHER; note = 2'-O-methyl ribonucleotide
  modified_base 18: mod_base = OTHER; note = 2'-O-methyl ribonucleotide
  modified_base 25: mod_base = OTHER; note = 2'-O-methyl ribonucleotide
  modified_base 26: mod_base = OTHER; note = 2'-O-methyl ribonucleotide
  modified_base 27: mod_base = OTHER; note = 2'-O-methyl ribonucleotide
  modified_base 28: mod_base = OTHER; note = 2'-O-methyl ribonucleotide
  modified_base 29: mod_base = OTHER; note = 2'-O-methyl ribonucleotide
  modified_base 31: mod_base = OTHER; note = 2'-O-methyl ribonucleotide
  modified_base 32: mod_base = OTHER; note = 2'-O-methyl ribonucleotide
  modified_base 33: mod_base = OTHER; note = 2'-O-methyl ribonucleotide
  modified_base 34: mod_base = OTHER; note = 2'-O-methyl ribonucleotide
  modified_base 35: mod_base = OTHER; note = 2'-O-methyl ribonucleotide
  modified_base 36: mod_base = OTHER; note = 2'-O-methyl ribonucleotide
  modified_base 37: mod_base = OTHER; note = 2'-O-methyl ribonucleotide
  modified_base 38: mod_base = OTHER; note = 2'-O-methyl ribonucleotide
  modified_base 39: mod_base = OTHER; note = 2'-O-methyl ribonucleotide
  modified_base 43: mod_base = OTHER; note = 2'-O-methyl ribonucleotide
  modified_base 45: mod_base = OTHER; note = 2'-O-methyl ribonucleotide
  modified_base 47: mod_base = OTHER; note = 2'-O-methyl ribonucleotide
  modified_base 49: mod_base = OTHER; note = 2'-O-methyl ribonucleotide
  modified_base 50: mod_base = OTHER; note = 2'-O-methyl ribonucleotide
  modified_base 51: mod_base = OTHER; note = 2'-O-methyl ribonucleotide
  modified_base 52: mod_base = OTHER; note = 2'-O-methyl ribonucleotide
  modified_base 53: mod_base = OTHER; note = 2'-O-methyl ribonucleotide
  modified_base 54: mod_base = OTHER; note = 2'-O-methyl ribonucleotide
  modified_base 57: mod_base = OTHER; note = 2'-O-methyl ribonucleotide
  modified_base 58: mod_base = OTHER; note = 2'-O-methyl ribonucleotide
  modified_base 63: mod_base = OTHER; note = 2'-O-methyl ribonucleotide
  modified_base 64: mod_base = OTHER; note = 2'-O-methyl ribonucleotide
  modified_base 67: mod_base = OTHER; note = 2'-O-methyl ribonucleotide
  modified_base 68: mod_base = OTHER; note = 2'-O-methyl ribonucleotide
  modified_base 69: mod_base = OTHER; note = 2'-O-methyl ribonucleotide
  modified_base 71: mod_base = OTHER; note = 2'-O-methyl ribonucleotide
  modified_base 72: mod_base = OTHER; note = 2'-O-methyl ribonucleotide
  modified_base 73: mod_base = OTHER; note = 2'-O-methyl ribonucleotide
  modified_base 74: mod_base = OTHER; note = 2'-O-methyl ribonucleotide
  modified_base 75: mod_base = OTHER; note = 2'-O-methyl ribonucleotide
  modified_base 76: mod_base = OTHER; note = 2'-O-methyl ribonucleotide
  modified_base 77: mod_base = OTHER; note = 2'-O-methyl ribonucleotide
  modified_base 78: mod_base = OTHER; note = 2'-O-methyl ribonucleotide
  modified_base 80: mod_base = OTHER; note = 2'-O-methyl ribonucleotide
  modified_base 81: mod_base = OTHER; note = 2'-O-methyl ribonucleotide
  modified_base 82: mod_base = OTHER; note = 2'-O-methyl ribonucleotide
  modified_base 83: mod_base = OTHER; note = 2'-O-methyl ribonucleotide
  modified_base 84: mod_base = OTHER; note = 2'-O-methyl ribonucleotide
  modified_base 85: mod_base = OTHER; note = 2'-O-methyl ribonucleotide
  modified_base 86: mod_base = OTHER; note = 2'-O-methyl ribonucleotide
  modified_base 87: mod_base = OTHER; note = 2'-O-methyl ribonucleotide
  modified_base 88: mod_base = OTHER; note = 2'-O-methyl ribonucleotide
  modified_base 89: mod_base = OTHER; note = 2'-O-methyl ribonucleotide
  modified_base 90: mod_base = OTHER; note = 2'-O-methyl ribonucleotide
  modified_base 91: mod_base = OTHER; note = 2'-O-methyl ribonucleotide
  modified_base 92: mod_base = OTHER; note = 2'-O-methyl ribonucleotide
  modified_base 93: mod_base = OTHER; note = 2'-O-methyl ribonucleotide
  modified_base 94: mod_base = OTHER; note = 2'-O-methyl ribonucleotide
  modified_base 95: mod_base = OTHER; note = 2'-O-methyl ribonucleotide
  modified_base 96: mod_base = OTHER; note = 2'-O-methyl ribonucleotide
  modified_base 97: mod_base = OTHER; note = 2'-O-methyl ribonucleotide
  modified_base 1..3: mod_base = OTHER; note = phosphorothioate linkage
  modified_base 94..97: mod_base = OTHER; note = phosphorothioate linkage
atacctgaataaccctcgttttagagctagaaatagcaagttaaaataaggctagtccgttatcaacttgaaaaagtggcaccgagtcggtgctttt

SEQ ID NO: 445 - RNA, 103 nt, synthetic construct
  source 1..103: mol_type = other RNA
  modified_base 1: mod_base = OTHER; note = 2'-O-methyl ribonucleotide
  modified_base 2: mod_base = OTHER; note = 2'-O-methyl ribonucleotide
  modified_base 3: mod_base = OTHER; note = 2'-O-methyl ribonucleotide
  modified_base 21: mod_base = OTHER; note = 2'-O-methyl ribonucleotide
  modified_base 28: mod_base = OTHER; note = 2'-O-methyl ribonucleotide
  modified_base 29: mod_base = OTHER; note = 2'-O-methyl ribonucleotide
  modified_base 30: mod_base = OTHER; note = 2'-O-methyl ribonucleotide
  modified_base 31: mod_base = OTHER; note = 2'-O-methyl ribonucleotide
  modified_base 32: mod_base = OTHER; note = 2'-O-methyl ribonucleotide
  modified_base 34: mod_base = OTHER; note = 2'-O-methyl ribonucleotide
  modified_base 35: mod_base = OTHER; note = 2'-O-methyl ribonucleotide
  modified_base 36: mod_base = OTHER; note = 2'-O-methyl ribonucleotide
  modified_base 37: mod_base = OTHER; note = 2'-O-methyl ribonucleotide
  modified_base 38: mod_base = OTHER; note = 2'-O-methyl ribonucleotide
  modified_base 39: mod_base = OTHER; note = 2'-O-methyl ribonucleotide
  modified_base 40: mod_base = OTHER; note = 2'-O-methyl ribonucleotide
  modified_base 41: mod_base = OTHER; note = 2'-O-methyl ribonucleotide
  modified_base 42: mod_base = OTHER; note = 2'-O-methyl ribonucleotide
  modified_base 46: mod_base = OTHER; note = 2'-O-methyl ribonucleotide
  modified_base 48: mod_base = OTHER; note = 2'-O-methyl ribonucleotide
  modified_base 50: mod_base = OTHER; note = 2'-O-methyl ribonucleotide
  modified_base 52: mod_base = OTHER; note = 2'-O-methyl ribonucleotide
  modified_base 53: mod_base = OTHER; note = 2'-O-methyl ribonucleotide
  modified_base 54: mod_base = OTHER; note = 2'-O-methyl ribonucleotide
  modified_base 55: mod_base = OTHER; note = 2'-O-methyl ribonucleotide
  modified_base 56: mod_base = OTHER; note = 2'-O-methyl ribonucleotide
  modified_base 57: mod_base = OTHER; note = 2'-O-methyl ribonucleotide
  modified_base 60: mod_base = OTHER; note = 2'-O-methyl ribonucleotide
  modified_base 61: mod_base = OTHER; note = 2'-O-methyl ribonucleotide
  modified_base 66: mod_base = OTHER; note = 2'-O-methyl ribonucleotide
  modified_base 67: mod_base = OTHER; note = 2'-O-methyl ribonucleotide
  modified_base 70: mod_base = OTHER; note = 2'-O-methyl ribonucleotide
  modified_base 71: mod_base = OTHER; note = 2'-O-methyl ribonucleotide
  modified_base 72: mod_base = OTHER; note = 2'-O-methyl ribonucleotide
  modified_base 74: mod_base = OTHER; note = 2'-O-methyl ribonucleotide
  modified_base 75: mod_base = OTHER; note = 2'-O-methyl ribonucleotide
  modified_base 76: mod_base = OTHER; note = 2'-O-methyl ribonucleotide
  modified_base 77: mod_base = OTHER; note = 2'-O-methyl ribonucleotide
  modified_base 78: mod_base = OTHER; note = 2'-O-methyl ribonucleotide
  modified_base 79: mod_base = OTHER; note = 2'-O-methyl ribonucleotide
  modified_base 80: mod_base = OTHER; note = 2'-O-methyl ribonucleotide
  modified_base 81: mod_base = OTHER; note = 2'-O-methyl ribonucleotide
  modified_base 82: mod_base = OTHER; note = 2'-O-methyl ribonucleotide
  modified_base 83: mod_base = OTHER; note = 2'-O-methyl ribonucleotide
  modified_base 84: mod_base = OTHER; note = 2'-O-methyl ribonucleotide
  modified_base 85: mod_base = OTHER; note = 2'-O-methyl ribonucleotide
  modified_base 86: mod_base = OTHER; note = 2'-O-methyl ribonucleotide
  modified_base 87: mod_base = OTHER; note = 2'-O-methyl ribonucleotide
  modified_base 88: mod_base = OTHER; note = 2'-O-methyl ribonucleotide
  modified_base 89: mod_base = OTHER; note = 2'-O-methyl ribonucleotide
  modified_base 90: mod_base = OTHER; note = 2'-O-methyl ribonucleotide
  modified_base 91: mod_base = OTHER; note = 2'-O-methyl ribonucleotide
  modified_base 92: mod_base = OTHER; note = 2'-O-methyl ribonucleotide
  modified_base 93: mod_base = OTHER; note = 2'-O-methyl ribonucleotide
  modified_base 94: mod_base = OTHER; note = 2'-O-methyl ribonucleotide
  modified_base 95: mod_base = OTHER; note = 2'-O-methyl ribonucleotide
  modified_base 96: mod_base = OTHER; note = 2'-O-methyl ribonucleotide
  modified_base 97: mod_base = OTHER; note = 2'-O-methyl ribonucleotide
  modified_base 98: mod_base = OTHER; note = 2'-O-methyl ribonucleotide
  modified_base 99: mod_base = OTHER; note = 2'-O-methyl ribonucleotide
  modified_base 100: mod_base = OTHER; note = 2'-O-methyl ribonucleotide
  modified_base 103: mod_base = OTHER; note = 2'-O-methyl ribonucleotide
  modified_base 1..4: mod_base = OTHER; note = phosphorothioate linkage
  modified_base 97..100: mod_base = OTHER; note = phosphorothioate linkage
aagatacctgaataactctcgttttagagctagaaatagcaagttaaaataaggctagtccgttatcaacttgaaaaagtggcaccgagtcggtgcttttttt

SEQ ID NO: 446 - RNA, 100 nt, synthetic construct
  source 1..100: mol_type = other RNA
  modified_base 1: mod_base = OTHER; note = 2'-O-methyl ribonucleotide
  modified_base 2: mod_base = OTHER; note = 2'-O-methyl ribonucleotide
  modified_base 3: mod_base = OTHER; note = 2'-O-methyl ribonucleotide
  modified_base 29: mod_base = OTHER; note = 2'-O-methyl ribonucleotide
  modified_base 30: mod_base = OTHER; note = 2'-O-methyl ribonucleotide
  modified_base 31: mod_base = OTHER; note = 2'-O-methyl ribonucleotide
  modified_base 32: mod_base = OTHER; note = 2'-O-methyl ribonucleotide
  modified_base 33: mod_base = OTHER; note = 2'-O-methyl ribonucleotide
  modified_base 34: mod_base = OTHER; note = 2'-O-methyl ribonucleotide
  modified_base 35: mod_base = OTHER; note = 2'-O-methyl ribonucleotide
  modified_base 36: mod_base = OTHER; note = 2'-O-methyl ribonucleotide
  modified_base 37: mod_base = OTHER; note = 2'-O-methyl ribonucleotide
  modified_base 38: mod_base = OTHER; note = 2'-O-methyl ribonucleotide
  modified_base 39: mod_base = OTHER; note = 2'-O-methyl ribonucleotide
  modified_base 40: mod_base = OTHER; note = 2'-O-methyl ribonucleotide
  modified_base 69: mod_base = OTHER; note = 2'-O-methyl ribonucleotide
  modified_base 70: mod_base = OTHER; note = 2'-O-methyl ribonucleotide
  modified_base 71: mod_base = OTHER; note = 2'-O-methyl ribonucleotide
  modified_base 72: mod_base = OTHER; note = 2'-O-methyl ribonucleotide
  modified_base 73: mod_base = OTHER; note = 2'-O-methyl ribonucleotide
  modified_base 74: mod_base = OTHER; note = 2'-O-methyl ribonucleotide
  modified_base 75: mod_base = OTHER; note = 2'-O-methyl ribonucleotide
  modified_base 76: mod_base = OTHER; note = 2'-O-methyl ribonucleotide
  modified_base 77: mod_base = OTHER; note = 2'-O-methyl ribonucleotide
  modified_base 78: mod_base = OTHER; note = 2'-O-methyl ribonucleotide
  modified_base 79: mod_base = OTHER; note = 2'-O-methyl ribonucleotide
  modified_base 80: mod_base = OTHER; note = 2'-O-methyl ribonucleotide
  modified_base 81: mod_base = OTHER; note = 2'-O-methyl ribonucleotide
  modified_base 82: mod_base = OTHER; note = 2'-O-methyl ribonucleotide
  modified_base 83: mod_base = OTHER; note = 2'-O-methyl ribonucleotide
  modified_base 84: mod_base = OTHER; note = 2'-O-methyl ribonucleotide
  modified_base 85: mod_base = OTHER; note = 2'-O-methyl ribonucleotide
  modified_base 86: mod_base = OTHER; note = 2'-O-methyl ribonucleotide
  modified_base 87: mod_base = OTHER; note = 2'-O-methyl ribonucleotide
  modified_base 88: mod_base = OTHER; note = 2'-O-methyl ribonucleotide
  modified_base 89: mod_base = OTHER; note = 2'-O-methyl ribonucleotide
  modified_base 90: mod_base = OTHER; note = 2'-O-methyl ribonucleotide
  modified_base 91: mod_base = OTHER; note = 2'-O-methyl ribonucleotide
  modified_base 92: mod_base = OTHER; note = 2'-O-methyl ribonucleotide
  modified_base 93: mod_base = OTHER; note = 2'-O-methyl ribonucleotide
  modified_base 94: mod_base = OTHER; note = 2'-O-methyl ribonucleotide
  modified_base 95: mod_base = OTHER; note = 2'-O-methyl ribonucleotide
  modified_base 96: mod_base = OTHER; note = 2'-O-methyl ribonucleotide
  modified_base 97: mod_base = OTHER; note = 2'-O-methyl ribonucleotide
  modified_base 98: mod_base = OTHER; note = 2'-O-methyl ribonucleotide
  modified_base 99: mod_base = OTHER; note = 2'-O-methyl ribonucleotide
  modified_base 100: mod_base = OTHER; note = 2'-O-methyl ribonucleotide
  modified_base 1..4: mod_base = OTHER; note = phosphorothioate linkage
  modified_base 97..100: mod_base = OTHER; note = phosphorothioate linkage
ggctgatgaggccgcacatggttttagagctagaaatagcaagttaaaataaggctagtccgttatcaacttgaaaaagtggcaccgagtcggtgctttt

SEQ ID NO: 447 - RNA, 103 nt, synthetic construct
  source 1..103: mol_type = other RNA
  modified_base 1: mod_base = OTHER; note = 2'-O-methyl ribonucleotide
  modified_base 2: mod_base = OTHER; note = 2'-O-methyl ribonucleotide
  modified_base 3: mod_base = OTHER; note = 2'-O-methyl ribonucleotide
  modified_base 21: mod_base = OTHER; note = 2'-O-methyl ribonucleotide
  modified_base 28: mod_base = OTHER; note = 2'-O-methyl ribonucleotide
  modified_base 29: mod_base = OTHER; note = 2'-O-methyl ribonucleotide
  modified_base 30: mod_base = OTHER; note = 2'-O-methyl ribonucleotide
  modified_base 31: mod_base = OTHER; note = 2'-O-methyl ribonucleotide
  modified_base 32: mod_base = OTHER; note = 2'-O-methyl ribonucleotide
  modified_base 34: mod_base = OTHER; note = 2'-O-methyl ribonucleotide
  modified_base 35: mod_base = OTHER; note = 2'-O-methyl ribonucleotide
  modified_base 36: mod_base = OTHER; note = 2'-O-methyl ribonucleotide
  modified_base 37: mod_base = OTHER; note = 2'-O-methyl ribonucleotide
  modified_base 38: mod_base = OTHER; note = 2'-O-methyl ribonucleotide
  modified_base 39: mod_base = OTHER; note = 2'-O-methyl ribonucleotide
  modified_base 40: mod_base = OTHER; note = 2'-O-methyl ribonucleotide
  modified_base 41: mod_base = OTHER; note = 2'-O-methyl ribonucleotide
  modified_base 42: mod_base = OTHER; note = 2'-O-methyl ribonucleotide
  modified_base 46: mod_base = OTHER; note = 2'-O-methyl ribonucleotide
  modified_base 48: mod_base = OTHER; note = 2'-O-methyl ribonucleotide
  modified_base 50: mod_base = OTHER; note = 2'-O-methyl ribonucleotide
  modified_base 52: mod_base = OTHER; note = 2'-O-methyl ribonucleotide
  modified_base 53: mod_base = OTHER; note = 2'-O-methyl ribonucleotide
  modified_base 54: mod_base = OTHER; note = 2'-O-methyl ribonucleotide
  modified_base 55: mod_base = OTHER; note = 2'-O-methyl ribonucleotide
  modified_base 56: mod_base = OTHER; note = 2'-O-methyl ribonucleotide
  modified_base 57: mod_base = OTHER; note = 2'-O-methyl ribonucleotide
  modified_base 60: mod_base = OTHER; note = 2'-O-methyl ribonucleotide
  modified_base 61: mod_base = OTHER; note = 2'-O-methyl ribonucleotide
  modified_base 66: mod_base = OTHER; note = 2'-O-methyl ribonucleotide
  modified_base 67: mod_base = OTHER; note = 2'-O-methyl ribonucleotide
  modified_base 70: mod_base = OTHER; note = 2'-O-methyl ribonucleotide
  modified_base 71: mod_base = OTHER; note = 2'-O-methyl ribonucleotide
  modified_base 72: mod_base = OTHER; note = 2'-O-methyl ribonucleotide
  modified_base 74: mod_base = OTHER; note = 2'-O-methyl ribonucleotide
  modified_base 75: mod_base = OTHER; note = 2'-O-methyl ribonucleotide
  modified_base 76: mod_base = OTHER; note = 2'-O-methyl ribonucleotide
  modified_base 77: mod_base = OTHER; note = 2'-O-methyl ribonucleotide
  modified_base 78: mod_base = OTHER; note = 2'-O-methyl ribonucleotide
  modified_base 79: mod_base = OTHER; note = 2'-O-methyl ribonucleotide
  modified_base 80: mod_base = OTHER; note = 2'-O-methyl ribonucleotide
  modified_base 81: mod_base = OTHER; note = 2'-O-methyl ribonucleotide
  modified_base 83: mod_base = OTHER; note = 2'-O-methyl ribonucleotide
  modified_base 84: mod_base = OTHER; note = 2'-O-methyl ribonucleotide
  modified_base 85: mod_base = OTHER; note = 2'-O-methyl ribonucleotide
  modified_base 86: mod_base = OTHER; note = 2'-O-methyl ribonucleotide
  modified_base 87: mod_base = OTHER; note = 2'-O-methyl ribonucleotide
  modified_base 88: mod_base = OTHER; note = 2'-O-methyl ribonucleotide
  modified_base 89: mod_base = OTHER; note = 2'-O-methyl ribonucleotide
  modified_base 90: mod_base = OTHER; note = 2'-O-methyl ribonucleotide
  modified_base 91: mod_base = OTHER; note = 2'-O-methyl ribonucleotide
  modified_base 92: mod_base = OTHER; note = 2'-O-methyl ribonucleotide
  modified_base 93: mod_base = OTHER; note = 2'-O-methyl ribonucleotide
  modified_base 94: mod_base = OTHER; note = 2'-O-methyl ribonucleotide
  modified_base 95: mod_base = OTHER; note = 2'-O-methyl ribonucleotide
  modified_base 96: mod_base = OTHER; note = 2'-O-methyl ribonucleotide
  modified_base 97: mod_base = OTHER; note = 2'-O-methyl ribonucleotide
  modified_base 98: mod_base = OTHER; note = 2'-O-methyl ribonucleotide
  modified_base 99: mod_base = OTHER; note = 2'-O-methyl ribonucleotide
  modified_base 100: mod_base = OTHER; note = 2'-O-methyl ribonucleotide
  modified_base 101: mod_base = OTHER; note = 2'-O-methyl ribonucleotide
  modified_base 102: mod_base = OTHER; note = 2'-O-methyl ribonucleotide
  modified_base 103: mod_base = OTHER; note = 2'-O-methyl ribonucleotide
  modified_base 1..4: mod_base = OTHER; note = phosphorothioate linkage
  modified_base 97..100: mod_base = OTHER; note = phosphorothioate linkage
tcagctccaggcggtcctgggttttagagctagaaatagcaagttaaaataaggctagtccgttatcaacttgaaaaagtggcaccgagtcggtgcttttttt

SEQ ID NO: 448 - RNA, 103 nt, synthetic construct; identical to SEQ ID NO: 447
  source 1..103: mol_type = other RNA
  modified_base 1: mod_base = OTHER; note = 2'-O-methyl ribonucleotide
  modified_base 2: mod_base = OTHER; note = 2'-O-methyl ribonucleotide
  modified_base 3: mod_base = OTHER; note = 2'-O-methyl ribonucleotide
  modified_base 21: mod_base = OTHER; note = 2'-O-methyl ribonucleotide
  modified_base 28: mod_base = OTHER; note = 2'-O-methyl ribonucleotide
  modified_base 29: mod_base = OTHER; note = 2'-O-methyl ribonucleotide
  modified_base 30: mod_base = OTHER; note = 2'-O-methyl ribonucleotide
  modified_base 31: mod_base = OTHER; note = 2'-O-methyl ribonucleotide
  modified_base 32: mod_base = OTHER; note = 2'-O-methyl ribonucleotide
  modified_base 34: mod_base = OTHER; note = 2'-O-methyl ribonucleotide
  modified_base 35: mod_base = OTHER; note = 2'-O-methyl ribonucleotide
  modified_base 36: mod_base = OTHER; note = 2'-O-methyl ribonucleotide
  modified_base 37: mod_base = OTHER; note = 2'-O-methyl ribonucleotide
  modified_base 38: mod_base = OTHER; note = 2'-O-methyl ribonucleotide
  modified_base 39: mod_base = OTHER; note = 2'-O-methyl ribonucleotide
  modified_base 40: mod_base = OTHER; note = 2'-O-methyl ribonucleotide
  modified_base 41: mod_base = OTHER; note = 2'-O-methyl ribonucleotide
  modified_base 42: mod_base = OTHER; note = 2'-O-methyl ribonucleotide
  modified_base 46: mod_base = OTHER; note = 2'-O-methyl ribonucleotide
  modified_base 48: mod_base = OTHER; note = 2'-O-methyl ribonucleotide
  modified_base 50: mod_base = OTHER; note = 2'-O-methyl ribonucleotide
  modified_base 52: mod_base = OTHER; note = 2'-O-methyl ribonucleotide
  modified_base 53: mod_base = OTHER; note = 2'-O-methyl ribonucleotide
  modified_base 54: mod_base = OTHER; note = 2'-O-methyl ribonucleotide
  modified_base 55: mod_base = OTHER; note = 2'-O-methyl ribonucleotide
  modified_base 56: mod_base = OTHER; note = 2'-O-methyl ribonucleotide
  modified_base 57: mod_base = OTHER; note = 2'-O-methyl ribonucleotide
  modified_base 60: mod_base = OTHER; note = 2'-O-methyl ribonucleotide
  modified_base 61: mod_base = OTHER; note = 2'-O-methyl ribonucleotide
  modified_base 66: mod_base = OTHER; note = 2'-O-methyl ribonucleotide
  modified_base 67: mod_base = OTHER; note = 2'-O-methyl ribonucleotide
  modified_base 70: mod_base = OTHER; note = 2'-O-methyl ribonucleotide
  modified_base 71: mod_base = OTHER; note = 2'-O-methyl ribonucleotide
  modified_base 72: mod_base = OTHER; note = 2'-O-methyl ribonucleotide
  modified_base 74: mod_base = OTHER; note = 2'-O-methyl ribonucleotide
  modified_base 75: mod_base = OTHER; note = 2'-O-methyl ribonucleotide
  modified_base 76: mod_base = OTHER; note = 2'-O-methyl ribonucleotide
  modified_base 77: mod_base = OTHER; note = 2'-O-methyl ribonucleotide
  modified_base 78: mod_base = OTHER; note = 2'-O-methyl ribonucleotide
  modified_base 79: mod_base = OTHER; note = 2'-O-methyl ribonucleotide
  modified_base 80: mod_base = OTHER; note = 2'-O-methyl ribonucleotide
  modified_base 81: mod_base = OTHER; note = 2'-O-methyl ribonucleotide
  modified_base 83: mod_base = OTHER; note = 2'-O-methyl ribonucleotide
  modified_base 84: mod_base = OTHER; note = 2'-O-methyl ribonucleotide
  modified_base 85: mod_base = OTHER; note = 2'-O-methyl ribonucleotide
  modified_base 86: mod_base = OTHER; note = 2'-O-methyl ribonucleotide
  modified_base 87: mod_base = OTHER; note = 2'-O-methyl ribonucleotide
  modified_base 88: mod_base = OTHER; note = 2'-O-methyl ribonucleotide
  modified_base 89: mod_base = OTHER; note = 2'-O-methyl ribonucleotide
  modified_base 90: mod_base = OTHER; note = 2'-O-methyl ribonucleotide
  modified_base 91: mod_base = OTHER; note = 2'-O-methyl ribonucleotide
  modified_base 92: mod_base = OTHER; note = 2'-O-methyl ribonucleotide
  modified_base 93: mod_base = OTHER; note = 2'-O-methyl ribonucleotide
  modified_base 94: mod_base = OTHER; note = 2'-O-methyl ribonucleotide
  modified_base 95: mod_base = OTHER; note = 2'-O-methyl ribonucleotide
  modified_base 96: mod_base = OTHER; note = 2'-O-methyl ribonucleotide
  modified_base 97: mod_base = OTHER; note = 2'-O-methyl ribonucleotide
  modified_base 98: mod_base = OTHER; note = 2'-O-methyl ribonucleotide
  modified_base 99: mod_base = OTHER; note = 2'-O-methyl ribonucleotide
  modified_base 100: mod_base = OTHER; note = 2'-O-methyl ribonucleotide
  modified_base 101: mod_base = OTHER; note = 2'-O-methyl ribonucleotide
  modified_base 102: mod_base = OTHER; note = 2'-O-methyl ribonucleotide
  modified_base 103: mod_base = OTHER; note = 2'-O-methyl ribonucleotide
  modified_base 1..4: mod_base = OTHER; note = phosphorothioate linkage
  modified_base 45..46: mod_base = OTHER; note = phosphorothioate linkage
  modified_base 97..100: mod_base = OTHER; note = phosphorothioate linkage

SEQ ID NO: 449 - RNA, 103 nt, synthetic construct; identical to SEQ ID NO: 447
  source 1..103: mol_type = other RNA
  modified_base 1: mod_base = OTHER; note = 2'-O-methyl ribonucleotide
  modified_base 2: mod_base = OTHER; note = 2'-O-methyl ribonucleotide
  modified_base 3: mod_base = OTHER; note = 2'-O-methyl ribonucleotide
  modified_base 21: mod_base = OTHER; note = 2'-O-methyl ribonucleotide
  modified_base 28: mod_base = OTHER; note = 2'-O-methyl ribonucleotide
  modified_base 29: mod_base = OTHER; note = 2'-O-methyl ribonucleotide
  modified_base 30: mod_base = OTHER; note = 2'-O-methyl ribonucleotide
  modified_base 31: mod_base = OTHER; note = 2'-O-methyl ribonucleotide
  modified_base 32: mod_base = OTHER; note = 2'-O-methyl ribonucleotide
  modified_base 34: mod_base = OTHER; note = 2'-O-methyl ribonucleotide
  modified_base 35: mod_base = OTHER; note = 2'-O-methyl ribonucleotide
  modified_base 36: mod_base = OTHER; note = 2'-O-methyl ribonucleotide
  modified_base 37: mod_base = OTHER; note = 2'-O-methyl ribonucleotide
  modified_base 38: mod_base = OTHER; note = 2'-O-methyl ribonucleotide
  modified_base 39: mod_base = OTHER; note = 2'-O-methyl ribonucleotide
  modified_base 40: mod_base = OTHER; note = 2'-O-methyl ribonucleotide
  modified_base 41: mod_base = OTHER; note = 2'-O-methyl ribonucleotide
  modified_base 42: mod_base = OTHER; note = 2'-O-methyl ribonucleotide
  modified_base 46: mod_base = OTHER; note = 2'-O-methyl ribonucleotide
  modified_base 48: mod_base = OTHER; note = 2'-O-methyl ribonucleotide
  modified_base 50: mod_base = OTHER; note = 2'-O-methyl ribonucleotide
  modified_base 52: mod_base = OTHER; note = 2'-O-methyl ribonucleotide
  modified_base 53: mod_base = OTHER; note = 2'-O-methyl ribonucleotide
  modified_base 54: mod_base = OTHER; note = 2'-O-methyl ribonucleotide
  modified_base 55: mod_base = OTHER; note = 2'-O-methyl ribonucleotide
  modified_base 56: mod_base = OTHER; note = 2'-O-methyl ribonucleotide
  modified_base 57: mod_base = OTHER; note = 2'-O-methyl ribonucleotide
  modified_base 60: mod_base = OTHER; note = 2'-O-methyl ribonucleotide
  modified_base 61: mod_base = OTHER; note = 2'-O-methyl ribonucleotide
  modified_base 66: mod_base = OTHER; note = 2'-O-methyl ribonucleotide
  modified_base 67: mod_base = OTHER; note = 2'-O-methyl ribonucleotide
  modified_base 70: mod_base = OTHER; note = 2'-O-methyl ribonucleotide
  modified_base 71: mod_base = OTHER; note = 2'-O-methyl ribonucleotide
  modified_base 72: mod_base = OTHER; note = 2'-O-methyl ribonucleotide
  modified_base 74: mod_base = OTHER; note = 2'-O-methyl ribonucleotide
  modified_base 75: mod_base = OTHER; note = 2'-O-methyl ribonucleotide
  modified_base 76: mod_base = OTHER; note = 2'-O-methyl ribonucleotide
  modified_base 77: mod_base = OTHER; note = 2'-O-methyl ribonucleotide
  modified_base 78: mod_base = OTHER; note = 2'-O-methyl ribonucleotide
  modified_base 79: mod_base = OTHER; note = 2'-O-methyl ribonucleotide
  modified_base 80: mod_base = OTHER; note = 2'-O-methyl ribonucleotide
  modified_base 81: mod_base = OTHER; note = 2'-O-methyl ribonucleotide
  modified_base 83: mod_base = OTHER; note = 2'-O-methyl ribonucleotide
  modified_base 84: mod_base = OTHER; note = 2'-O-methyl ribonucleotide
  modified_base 85: mod_base = OTHER; note = 2'-O-methyl ribonucleotide
  modified_base 86: mod_base = OTHER; note = 2'-O-methyl ribonucleotide
  modified_base 87: mod_base = OTHER; note = 2'-O-methyl ribonucleotide
  modified_base 88: mod_base = OTHER; note = 2'-O-methyl ribonucleotide
  modified_base 89: mod_base = OTHER; note = 2'-O-methyl ribonucleotide
  modified_base 90: mod_base = OTHER; note = 2'-O-methyl ribonucleotide
  modified_base 91: mod_base = OTHER; note = 2'-O-methyl ribonucleotide
  modified_base 92: mod_base = OTHER; note = 2'-O-methyl ribonucleotide
  modified_base 93: mod_base = OTHER; note = 2'-O-methyl ribonucleotide
  modified_base 94: mod_base = OTHER; note = 2'-O-methyl ribonucleotide
  modified_base 95: mod_base = OTHER; note = 2'-O-methyl ribonucleotide
  modified_base 96: mod_base = OTHER; note = 2'-O-methyl ribonucleotide
  modified_base 97: mod_base = OTHER; note = 2'-O-methyl ribonucleotide
  modified_base 98: mod_base = OTHER; note = 2'-O-methyl ribonucleotide
  modified_base 99: mod_base = OTHER; note = 2'-O-methyl ribonucleotide
  modified_base 100: mod_base = OTHER; note = 2'-O-methyl ribonucleotide
  modified_base 101: mod_base = OTHER; note = 2'-O-methyl ribonucleotide
  modified_base 102: mod_base = OTHER; note = 2'-O-methyl ribonucleotide
  modified_base 103: mod_base = OTHER; note = 2'-O-methyl ribonucleotide
  modified_base 1..4: mod_base = OTHER; note = phosphorothioate linkage
  modified_base 64..65: mod_base = OTHER; note = phosphorothioate linkage
  modified_base 97..100: mod_base = OTHER; note = phosphorothioate linkage

SEQ ID NO: 450 - RNA, 100 nt, synthetic construct; identical to SEQ ID NO: 339
  source 1..100: mol_type = other RNA
  modified_base 1: mod_base = OTHER; note = 2'-O-methyl ribonucleotide
  modified_base 2: mod_base = OTHER; note = 2'-O-methyl ribonucleotide
  modified_base 3: mod_base = OTHER; note = 2'-O-methyl ribonucleotide
  modified_base 21: mod_base = OTHER; note = 2'-O-methyl ribonucleotide
  modified_base 28: mod_base = OTHER; note = 2'-O-methyl ribonucleotide
  modified_base 29: mod_base = OTHER; note = 2'-O-methyl ribonucleotide
  modified_base 30: mod_base = OTHER; note = 2'-O-methyl ribonucleotide
  modified_base 31: mod_base = OTHER; note = 2'-O-methyl ribonucleotide
  modified_base 32: mod_base = OTHER; note = 2'-O-methyl ribonucleotide
  modified_base 33: mod_base = OTHER; note = 2'-O-methyl ribonucleotide
  modified_base 34: mod_base = OTHER; note = 2'-O-methyl ribonucleotide
  modified_base 35: mod_base = OTHER; note = 2'-O-methyl ribonucleotide
  modified_base 36: mod_base = OTHER; note = 2'-O-methyl ribonucleotide
  modified_base 37: mod_base = OTHER; note = 2'-O-methyl ribonucleotide
  modified_base 38: mod_base = OTHER; note = 2'-O-methyl ribonucleotide
  modified_base 39: mod_base = OTHER; note = 2'-O-methyl ribonucleotide
  modified_base 40: mod_base = OTHER; note = 2'-O-methyl ribonucleotide
  modified_base 41: mod_base = OTHER; note = 2'-O-methyl ribonucleotide
  modified_base 42: mod_base = OTHER; note = 2'-O-methyl ribonucleotide
  modified_base 46: mod_base = OTHER; note = 2'-O-methyl ribonucleotide
  modified_base 48: mod_base = OTHER; note = 2'-O-methyl ribonucleotide
  modified_base 50: mod_base = OTHER; note = 2'-O-methyl ribonucleotide
  modified_base 52: mod_base = OTHER; note = 2'-O-methyl ribonucleotide
  modified_base 53: mod_base = OTHER; note = 2'-O-methyl ribonucleotide
  modified_base 54: mod_base = OTHER; note = 2'-O-methyl ribonucleotide
  modified_base 55: mod_base = OTHER; note = 2'-O-methyl ribonucleotide
  modified_base 56: mod_base = OTHER; note = 2'-O-methyl ribonucleotide
  modified_base 57: mod_base = OTHER; note = 2'-O-methyl ribonucleotide
  modified_base 60: mod_base = OTHER; note = 2'-O-methyl ribonucleotide
  modified_base 61: mod_base = OTHER; note = 2'-O-methyl ribonucleotide
  modified_base 66: mod_base = OTHER; note = 2'-O-methyl ribonucleotide
  modified_base 67: mod_base = OTHER; note = 2'-O-methyl ribonucleotide
  modified_base 70: mod_base = OTHER; note = 2'-O-methyl ribonucleotide
  modified_base 71: mod_base = OTHER; note = 2'-O-methyl ribonucleotide
  modified_base 72: mod_base = OTHER; note = 2'-O-methyl ribonucleotide
  modified_base 73: mod_base = OTHER; note = 2'-O-methyl ribonucleotide
  modified_base 74: mod_base = OTHER; note = 2'-O-methyl ribonucleotide
  modified_base 75: mod_base = OTHER; note = 2'-O-methyl ribonucleotide
  modified_base 76: mod_base = OTHER; note = 2'-O-methyl ribonucleotide
  modified_base 77: mod_base = OTHER; note = 2'-O-methyl ribonucleotide
  modified_base 78: mod_base = OTHER; note = 2'-O-methyl ribonucleotide
  modified_base 79: mod_base = OTHER; note = 2'-O-methyl ribonucleotide
  modified_base 80: mod_base = OTHER; note = 2'-O-methyl ribonucleotide
  modified_base 81: mod_base = OTHER; note = 2'-O-methyl ribonucleotide
  modified_base 83: mod_base = OTHER; note = 2'-O-methyl ribonucleotide
  modified_base 84: mod_base = OTHER; note = 2'-O-methyl ribonucleotide
  modified_base 85: mod_base = OTHER; note = 2'-O-methyl ribonucleotide
  modified_base 86: mod_base = OTHER; note = 2'-O-methyl ribonucleotide
  modified_base 87: mod_base = OTHER; note = 2'-O-methyl ribonucleotide
  modified_base 88: mod_base = OTHER; note = 2'-O-methyl ribonucleotide
  modified_base 89: mod_base = OTHER; note = 2'-O-methyl ribonucleotide
  modified_base 90: mod_base = OTHER; note = 2'-O-methyl ribonucleotide
  modified_base 91: mod_base = OTHER; note = 2'-O-methyl ribonucleotide
  modified_base 92: mod_base = OTHER; note = 2'-O-methyl ribonucleotide
  modified_base 93: mod_base = OTHER; note = 2'-O-methyl ribonucleotide
  modified_base 94: mod_base = OTHER; note = 2'-O-methyl ribonucleotide
  modified_base 95: mod_base = OTHER; note = 2'-O-methyl ribonucleotide
  modified_base 96: mod_base = OTHER; note = 2'-O-methyl ribonucleotide
  modified_base 97: mod_base = OTHER; note = 2'-O-methyl ribonucleotide
  modified_base 98: mod_base = OTHER; note = 2'-O-methyl ribonucleotide
  modified_base 99: mod_base = OTHER; note = 2'-O-methyl ribonucleotide
  modified_base 100: mod_base = OTHER; note = 2'-O-methyl ribonucleotide
  modified_base 5: mod_base = OTHER; note = cytidine phosphonoacetate
  modified_base 1..4: mod_base = OTHER; note = phosphorothioate linkage
  modified_base 97..100: mod_base = OTHER; note = phosphorothioate linkage

SEQ ID NO: 451 - RNA, 100 nt, synthetic construct; identical to SEQ ID NO: 339
  source 1..100: mol_type = other RNA
  modified_base 1: mod_base = OTHER; note = 2'-O-methyl ribonucleotide
  modified_base 2: mod_base = OTHER; note = 2'-O-methyl ribonucleotide
  modified_base 3: mod_base = OTHER; note = 2'-O-methyl ribonucleotide
  modified_base 21: mod_base = OTHER; note = 2'-O-methyl ribonucleotide
  modified_base 28: mod_base = OTHER; note = 2'-O-methyl ribonucleotide
  modified_base 29: mod_base = OTHER; note = 2'-O-methyl ribonucleotide
  modified_base 30: mod_base = OTHER; note = 2'-O-methyl ribonucleotide
  modified_base 31: mod_base = OTHER; note = 2'-O-methyl ribonucleotide
  modified_base 32: mod_base = OTHER; note = 2'-O-methyl ribonucleotide
  modified_base 33: mod_base = OTHER; note = 2'-O-methyl ribonucleotide
  modified_base 34: mod_base = OTHER; note = 2'-O-methyl ribonucleotide
  modified_base 35: mod_base = OTHER; note = 2'-O-methyl ribonucleotide
  modified_base 36: mod_base = OTHER; note = 2'-O-methyl ribonucleotide
  modified_base 37: mod_base = OTHER; note = 2'-O-methyl ribonucleotide
  modified_base 38: mod_base = OTHER; note = 2'-O-methyl ribonucleotide
  modified_base 39: mod_base = OTHER; note = 2'-O-methyl ribonucleotide
  modified_base 40: mod_base = OTHER; note = 2'-O-methyl ribonucleotide
  modified_base 41: mod_base = OTHER; note = 2'-O-methyl ribonucleotide
  modified_base 42: mod_base = OTHER; note = 2'-O-methyl ribonucleotide
  modified_base 46: mod_base = OTHER; note = 2'-O-methyl ribonucleotide
  modified_base 48: mod_base = OTHER; note = 2'-O-methyl ribonucleotide
  modified_base 50: mod_base = OTHER; note = 2'-O-methyl ribonucleotide
  modified_base 52: mod_base = OTHER; note = 2'-O-methyl ribonucleotide
  modified_base 53: mod_base = OTHER; note = 2'-O-methyl ribonucleotide
  modified_base 54: mod_base = OTHER; note = 2'-O-methyl ribonucleotide
  modified_base 55: mod_base = OTHER; note = 2'-O-methyl ribonucleotide
  modified_base 56: mod_base = OTHER; note = 2'-O-methyl ribonucleotide
  modified_base 57: mod_base = OTHER; note = 2'-O-methyl ribonucleotide
  modified_base 60: mod_base = OTHER; note = 2'-O-methyl ribonucleotide
  modified_base 61: mod_base = OTHER; note = 2'-O-methyl ribonucleotide
  modified_base 66: mod_base = OTHER; note = 2'-O-methyl ribonucleotide
  modified_base 67: mod_base = OTHER; note = 2'-O-methyl ribonucleotide
  modified_base 70: mod_base = OTHER; note = 2'-O-methyl ribonucleotide
  modified_base 71: mod_base = OTHER; note = 2'-O-methyl ribonucleotide
  modified_base 72: mod_base = OTHER; note = 2'-O-methyl ribonucleotide
  modified_base 73: mod_base = OTHER; note = 2'-O-methyl ribonucleotide
  modified_base 74: mod_base = OTHER; note = 2'-O-methyl ribonucleotide
  modified_base 75: mod_base = OTHER; note = 2'-O-methyl ribonucleotide
  modified_base 76: mod_base = OTHER; note = 2'-O-methyl ribonucleotide
  modified_base 77: mod_base = OTHER; note = 2'-O-methyl ribonucleotide
  modified_base 78: mod_base = OTHER; note = 2'-O-methyl ribonucleotide
  modified_base 79: mod_base = OTHER; note = 2'-O-methyl ribonucleotide
  modified_base 80: mod_base = OTHER; note = 2'-O-methyl ribonucleotide
  modified_base 81: mod_base = OTHER; note = 2'-O-methyl ribonucleotide
  modified_base 83: mod_base = OTHER; note = 2'-O-methyl ribonucleotide
  modified_base 84: mod_base = OTHER; note = 2'-O-methyl ribonucleotide
  modified_base 85: mod_base = OTHER; note = 2'-O-methyl ribonucleotide
  modified_base 86: mod_base = OTHER; note = 2'-O-methyl ribonucleotide
  modified_base 87: mod_base = OTHER; note = 2'-O-methyl ribonucleotide
  modified_base 88: mod_base = OTHER; note = 2'-O-methyl ribonucleotide
  modified_base 89: mod_base = OTHER; note = 2'-O-methyl ribonucleotide
  modified_base 90: mod_base = OTHER; note = 2'-O-methyl ribonucleotide
  modified_base 91: mod_base = OTHER; note = 2'-O-methyl ribonucleotide
  modified_base 92: mod_base = OTHER; note = 2'-O-methyl ribonucleotide
  modified_base 93: mod_base = OTHER; note = 2'-O-methyl ribonucleotide
  modified_base 94: mod_base = OTHER; note = 2'-O-methyl ribonucleotide
  modified_base 95: mod_base = OTHER; note = 2'-O-methyl ribonucleotide
  modified_base 96: mod_base = OTHER; note = 2'-O-methyl ribonucleotide
  modified_base 97: mod_base = OTHER; note = 2'-O-methyl ribonucleotide
  modified_base 98: mod_base = OTHER; note = 2'-O-methyl ribonucleotide
  modified_base 99: mod_base = OTHER; note = 2'-O-methyl ribonucleotide
  modified_base 100: mod_base = OTHER; note = 2'-O-methyl ribonucleotide
  modified_base 11: mod_base = OTHER; note = guanosine phosphonoacetate
  modified_base 1..4: mod_base = OTHER; note = phosphorothioate linkage
  modified_base 97..100: mod_base = OTHER; note = phosphorothioate linkage

SEQ ID NO: 452 - RNA, 100 nt, synthetic construct
  source 1..100: mol_type = other RNA
  modified_base 1: mod_base = OTHER; note = 2'-O-methyl ribonucleotide
  modified_base 2: mod_base = OTHER; note = 2'-O-methyl ribonucleotide
  modified_base 3: mod_base = OTHER; note = 2'-O-methyl ribonucleotide
  modified_base 98: mod_base = OTHER; note = 2'-O-methyl ribonucleotide
  modified_base 99: mod_base = OTHER; note = 2'-O-methyl ribonucleotide
  modified_base 100: mod_base = OTHER; note = 2'-O-methyl ribonucleotide
  modified_base 1..4: mod_base = OTHER; note = phosphorothioate linkage
  modified_base 97..100: mod_base = OTHER; note = phosphorothioate linkage
cgcctgccagcgcctggcgagttttagagctagaaatagcaagttaaaataaggctagtccgttatcaacttgaaaaagtggcaccgagtcggtgctttt

SEQ ID NO: 453 - DNA, 22 bp, Homo sapiens
  source 1..22: mol_type = genomic DNA
ctagcacctgccccagcggtgg

SEQ ID NO: 454 - DNA, 23 bp, Homo sapiens
  source 1..23: mol_type = genomic DNA
tccctaccctggcacagcagggg

SEQ ID NO: 455 - DNA, 23 bp, Homo sapiens
  source 1..23: mol_type = genomic DNA
cccacactcagacgcagcgaggg

SEQ ID NO: 456 - DNA, 21 bp, Homo sapiens
  source 1..21: mol_type = genomic DNA
cccgcactggagcagcaggga

SEQ ID NO: 457 - DNA, 24 bp, Homo sapiens
  source 1..24: mol_type = genomic DNA
cttgcaccttggtagcagctgggg

SEQ ID NO: 458 - DNA, 23 bp, Homo sapiens
  source 1..23: mol_type = genomic DNA
ctggcaccatggcccagcagtgg

SEQ ID NO: 459 - DNA, 23 bp, Homo sapiens
  source 1..23: mol_type = genomic DNA
actgcatcttagtgcagaggtgg

SEQ ID NO: 460 - DNA, 23 bp, Homo sapiens
  source 1..23: mol_type = genomic DNA
tccacaccttggcgcactggaag

SEQ ID NO: 461 - DNA, 23 bp, Homo sapiens
  source 1..23: mol_type = genomic DNA
cattcaccttgtcacagctgggg

SEQ ID NO: 462 - DNA, 23 bp, Homo sapiens
  source 1..23: mol_type = genomic DNA
accgcaccattgcacagcctagg

SEQ ID NO: 463 - DNA, 24 bp, Homo sapiens
  source 1..24: mol_type = genomic DNA
gccgcaccatgggcacagcgggga

SEQ ID NO: 464 - DNA, 22 bp, Homo sapiens
  source 1..22: mol_type = genomic DNA
cccatacctggcacagcggtgg

SEQ ID NO: 465 - DNA, 22 bp, Homo sapiens
  source 1..22: mol_type = genomic DNA
caagcacctggctcagaggtgg

SEQ ID NO: 466 - DNA, 22 bp, Homo sapiens
  source 1..22: mol_type = genomic DNA
accgcacctggcacagtggaag

SEQ ID NO: 467 - DNA, 23 bp, Homo sapiens
  source 1..23: mol_type = genomic DNA
ccccacccttggcacagagcagg

SEQ ID NO: 468 - DNA, 22 bp, Homo sapiens
  source 1..22: mol_type = genomic DNA
ccagcacctagcgcagagctgg

SEQ ID NO: 469 - DNA, 22 bp, Homo sapiens
  source 1..22: mol_type = genomic DNA
cccgcacctacctcagcagggg

SEQ ID NO: 470 - DNA, 23 bp, Homo sapiens
  source 1..23: mol_type = genomic DNA
cccgcaccccaccgcagcggggg

SEQ ID NO: 471 - DNA, 23 bp, Homo sapiens
  source 1..23: mol_type = genomic DNA
tctttaccttggagcagctgagg

SEQ ID NO: 472 - DNA, 23 bp, Homo sapiens
  source 1..23: mol_type = genomic DNA
cccgcaccacagtgcaccggggg

SEQ ID NO: 473 - DNA, 23 bp, Homo sapiens
  source 1..23: mol_type = genomic DNA
cctccacaatggcgcaggggcgg

SEQ ID NO: 474 - DNA, 22 bp, Homo sapiens
  source 1..22: mol_type = genomic DNA
ccagcacctggcacagaagagg

SEQ ID NO: 475 - DNA, 23 bp, Homo sapiens
  source 1..23: mol_type = genomic DNA
accgcaccaaggtgcataggagg

SEQ ID NO: 476 - DNA, 22 bp, Homo sapiens
  source 1..22: mol_type = genomic DNA
ccagcacttgccccagcagagg

SEQ ID NO: 477 - DNA, 23 bp, Homo sapiens
  source 1..23: mol_type = genomic DNA
ctcccaccctggcccagcggggg

SEQ ID NO: 478 - DNA, 23 bp, Homo sapiens
  source 1..23: mol_type = genomic DNA
acagcaccttggcccagaggcga

SEQ ID NO: 479 - DNA, 23 bp, Homo sapiens
  source 1..23: mol_type = genomic DNA
acggcaccttgggctagcggggg

SEQ ID NO: 480 - DNA, 23 bp, Homo sapiens
  source 1..23: mol_type = genomic DNA
cccgcacccagctgcagccgagg

SEQ ID NO: 481 - DNA, 22 bp, Homo sapiens
  source 1..22: mol_type = genomic DNA
ccagcacctggtgcagagtagg

SEQ ID NO: 482 - DNA, 23 bp, Homo sapiens
  source 1..23: mol_type = genomic DNA
cccacacctgggcccagtggagg

SEQ ID NO: 483 - DNA, 22 bp, Homo sapiens
  source 1..22: mol_type = genomic DNA
ccagcacctggtgcagcttagg

SEQ ID NO: 484 - DNA, 23 bp, Homo sapiens
  source 1..23: mol_type = genomic DNA
tccacacaatggcacagcagagg

SEQ ID NO: 485 - DNA, 22 bp, Homo sapiens
  source 1..22: mol_type = genomic DNA
cccgcacctggctcagagggtc

SEQ ID NO: 486 - DNA, 24 bp, Homo sapiens
  source 1..24: mol_type = genomic DNA
cgggcaccatggcagcagcggagg

SEQ ID NO: 487 - DNA, 23 bp, Homo sapiens
  source 1..23: mol_type = genomic DNA
cccacaccatggcccagtgagag

SEQ ID NO: 488 - DNA, 22 bp, Homo sapiens
  source 1..22: mol_type = genomic DNA
ccagcacctggcacagtgaagg

SEQ ID NO: 489 - DNA, 23 bp, Homo sapiens
  source 1..23: mol_type = genomic DNA
cccacacatggccacagcagtgg

SEQ ID NO: 490 - DNA, 23 bp, Homo sapiens
  source 1..23: mol_type = genomic DNA
ctggcaccttagcacagaggagg

SEQ ID NO: 491 - DNA, 23 bp, Homo sapiens
  source 1..23: mol_type = genomic DNA
cccgcaccagagcgcagggggag

SEQ ID NO: 492 - DNA, 22 bp, Homo sapiens
  source 1..22: mol_type = genomic DNA
gccacacctggcccagcagggg

SEQ ID NO: 493 - DNA, 23 bp, Homo sapiens
  source 1..23: mol_type = genomic DNA
cccgcaccagggcgcagatggag

SEQ ID NO: 494 - DNA, 23 bp, Homo sapiens
  source 1..23: mol_type = genomic DNA
tccacacctcagcacagcagagg

SEQ ID NO: 495 - DNA, 23 bp, Homo sapiens
  source 1..23: mol_type = genomic DNA
accgcaccttggcccagtgctgg

SEQ ID NO: 496 - DNA, 22 bp, Homo sapiens
  source 1..22: mol_type = genomic DNA
accgcagctggcgcagcatggg

SEQ ID NO: 497 - DNA, 22 bp, Homo sapiens
  source 1..22: mol_type = genomic DNA
cccgcatttgcctcagcggtgg

SEQ ID NO: 498 - DNA, 22 bp, Homo sapiens
  source 1..22: mol_type = genomic DNA
ccagcacttggcacagcagtgg

SEQ ID NO: 499 - DNA, 24 bp, Homo sapiens
  source 1..24: mol_type = genomic DNA
cccacaccttggtgtcagcggagg

SEQ ID NO: 500 - DNA, 22 bp, Homo sapiens
  source 1..22: mol_type = genomic DNA
cctgcacccggagcagcagggg

SEQ ID NO: 501 - DNA, 23 bp, Homo sapiens
  source 1..23: mol_type = genomic DNA
cctccaccttggcccagtggagg

SEQ ID NO: 502 - DNA, 23 bp, Homo sapiens
  source 1..23: mol_type = genomic DNA
ctcccaccctggcgcagaggagg

SEQ ID NO: 503 - DNA, 22 bp, Homo sapiens
  source 1..22: mol_type = genomic DNA
tcagcacctggtgcagaggagg

SEQ ID NO: 504 - DNA, 23 bp, Homo sapiens
  source 1..23: mol_type = genomic DNA
cgagcaccatggcgcagccccgg

SEQ ID NO: 505 - DNA, 22 bp, Homo sapiens
  source 1..22: mol_type = genomic DNA
cccgcacttggagcagccggcg

SEQ ID NO: 506 - DNA, 23 bp, Homo sapiens
  source 1..23: mol_type = genomic DNA
ggagcaccttgacccagcagagg

SEQ ID NO: 507 - DNA, 22 bp, Homo sapiens
  source 1..22: mol_type = genomic DNA
ccagcacttagcccagcagcgg

SEQ ID NO: 508 - DNA, 23 bp, Homo sapiens
  source 1..23: mol_type = genomic DNA
cccgcacctcggcacagctaggg

SEQ ID NO: 509 - DNA, 23 bp, Homo sapiens
  source 1..23: mol_type = genomic DNA
gccccatcttggcccagcggagg

SEQ ID NO: 510 - DNA, 23 bp, Homo sapiens
  source 1..23: mol_type = genomic DNA
ctagaaccatggtgcagaggggg

SEQ ID NO: 511 - DNA, 23 bp, Homo sapiens
  source 1..23: mol_type = genomic DNA
atcccacctcggcacagctgggg

SEQ ID NO: 512 - DNA, 23 bp, Homo sapiens
  source 1..23: mol_type = genomic DNA
cccgcaccgtggtacagcctgtg

SEQ ID NO: 513 - DNA, 22 bp, Homo sapiens
  source 1..22: mol_type = genomic DNA
cccgcaccaggcccagctggcg

SEQ ID NO: 514 - DNA, 23 bp, Homo sapiens
  source 1..23: mol_type = genomic DNA
cccacaccttggtgcagctctgt

SEQ ID NO: 515 - DNA, 22 bp, Homo sapiens
  source 1..22: mol_type = genomic DNA
accacacctgtcccagcggagg

SEQ ID NO: 516 - DNA, 23 bp, Homo sapiens
  source 1..23: mol_type = genomic DNA
cacactacttggcacagaggagg

SEQ ID NO: 517 - DNA, 22 bp, Homo sapiens
  source 1..22: mol_type = genomic DNA
accgcactcagagcagcggagg

SEQ ID NO: 518 - DNA, 22 bp, Homo sapiens
  source 1..22: mol_type = genomic DNA
tccgcacttggctcagcggggc

SEQ ID NO: 519 - DNA, 23 bp, Homo sapiens
  source 1..23: mol_type = genomic DNA
ccccgcactcggagcagcggcgg

SEQ ID NO: 520 - DNA, 24 bp, Homo sapiens
  source 1..24: mol_type = genomic DNA
tccgcaccctgagagcagtggagg

SEQ ID NO: 521 - DNA, 23 bp, Homo sapiens
  source 1..23: mol_type = genomic DNA
ccctgcacttggtgcagctgggg

SEQ ID NO: 522 - DNA, 22 bp, Homo sapiens
  source 1..22: mol_type = genomic DNA
accgcacctgacccagtggtgg

SEQ ID NO: 523 - DNA, 23 bp, Homo sapiens
  source 1..23: mol_type = genomic DNA
ctcctaccatggcacagctgagg

SEQ ID NO: 524 - DNA, 23 bp, Homo sapiens
  source 1..23: mol_type = genomic DNA
cccacaccagggcgcagctgaag

SEQ ID NO: 525 - DNA, 23 bp, Homo sapiens
  source 1..23: mol_type = genomic DNA
ccagtaccttggcccagctttgg

SEQ ID NO: 526 - DNA, 22 bp, Homo sapiens
  source 1..22: mol_type = genomic DNA
acagcacctggcacagtggtgg

SEQ ID NO: 527 - DNA, 22 bp, Homo sapiens
  source 1..22: mol_type = genomic DNA
cccacacctggagcaccagggg

SEQ ID NO: 528 - DNA, 24 bp, Homo sapiens
  source 1..24: mol_type = genomic DNA
caagcaccttggcagcagctgagg

SEQ ID NO: 529 - DNA, 23 bp, Homo sapiens
  source 1..23: mol_type = genomic DNA
cccatgccttagcacagcgatgg

SEQ ID NO: 530 - DNA, 23 bp, Homo sapiens
  source 1..23: mol_type = genomic DNA
ctctatccttggcccagcagtgg

SEQ ID NO: 531 - DNA, 23 bp, Homo sapiens
  source 1..23: mol_type = genomic DNA
cccgcaccttgccgcagcggccc

SEQ ID NO: 532 - DNA, 23 bp, Homo sapiens
  source 1..23: mol_type = genomic DNA
atggcaccttggcacatcagagg

SEQ ID NO: 533 - DNA, 23 bp, Homo sapiens
  source 1..23: mol_type = genomic DNA
tccccacactgtcgcagaggagg

SEQ ID NO: 534 - DNA, 23 bp, Homo sapiens
  source 1..23: mol_type = genomic DNA
ccagcaccatggcacagagaggt

SEQ ID NO: 535 - DNA, 22 bp, Homo sapiens
  source 1..22: mol_type = genomic DNA
acagcacctggcacagaggagg

SEQ ID NO: 536 - DNA, 23 bp, Homo sapiens
  source 1..23: mol_type = genomic DNA
accgcacctggcagcagccgtgg

SEQ ID NO: 537 - DNA, 22 bp, Homo sapiens
  source 1..22: mol_type = genomic DNA
ccagcacctggagcagccgagg

SEQ ID NO: 538 - DNA, 22 bp, Homo sapiens
  source 1..22: mol_type = genomic DNA
ccagcacctggcacaaaggagg

SEQ ID NO: 539 - DNA, 23 bp, Homo sapiens
  source 1..23: mol_type = genomic DNA
gaggcaccttggaccagcagcgg

SEQ ID NO: 540 - DNA, 22 bp, Homo sapiens
  source 1..22: mol_type = genomic DNA
cccgcacttggagcagccggtg

SEQ ID NO: 541 - DNA, 22 bp, Homo sapiens
  source 1..22: mol_type = genomic DNA
ccagcacttagtgcagcgcagg

SEQ ID NO: 542 - DNA, 22 bp, Homo sapiens
  source 1..22: mol_type = genomic DNA
cccacacctggagcagcaggag

SEQ ID NO: 543 - DNA, 22 bp, Homo sapiens
  source 1..22: mol_type = genomic DNA
cccacaccaggcacggcggggg

SEQ ID NO: 544 - DNA, 22 bp, Homo sapiens
  source 1..22: mol_type = genomic DNA
ccctcaccagccgcagcagggg

SEQ ID NO: 545 - DNA, 24 bp, Homo sapiens
  source 1..24: mol_type = genomic DNA
cacccgacttggcgacagcggggg

SEQ ID NO: 546 - DNA, 22 bp, Homo sapiens
  source 1..22: mol_type = genomic DNA
accgcacctggcacagaagggg

SEQ ID NO: 547 - DNA, 22 bp, Homo sapiens
  source 1..22: mol_type = genomic DNA
accacacctggcccagcagtgg

SEQ ID NO: 548 - DNA, 22 bp, Homo sapiens
  source 1..22: mol_type = genomic DNA
ccctcaccgggcacagaggagg

SEQ ID NO: 549 - DNA, 22 bp, Homo sapiens
  source 1..22: mol_type = genomic DNA
ccagtacctggcccagaggagg

SEQ ID NO: 550 - DNA, 22 bp, Homo sapiens
  source 1..22: mol_type = genomic DNA
cccgcaccaggcgcaggtggag

SEQ ID NO: 551 - DNA, 24 bp, Homo sapiens
  source 1..24: mol_type = genomic DNA
caggcaccttggcggcagccgcgg

SEQ ID NO: 552 - DNA, 23 bp, Homo sapiens
  source 1..23: mol_type = genomic DNA
tgtgcaccatggcacagcgggga

SEQ ID NO: 553 - DNA, 23 bp, Homo sapiens
  source 1..23: mol_type = genomic DNA
cccgcacacagacgcagagcagg

SEQ ID NO: 554 - DNA, 22 bp, Homo sapiens
  source 1..22: mol_type = genomic DNA
tccacacctggcccagctgtgg

SEQ ID NO: 555 - DNA, 21 bp, Homo sapiens
  source 1..21: mol_type = genomic DNA
cctgcactggcccagcagcgg

SEQ ID NO: 556 - DNA, 22 bp, Homo sapiens
  source 1..22: mol_type = genomic DNA
cctgcactagccgcaacggggg

SEQ ID NO: 557 - DNA, 23 bp, Homo sapiens
  source 1..23: mol_type = genomic DNA
tgagcaccttggggcagctgggg

SEQ ID NO: 558 - DNA, 22 bp, Homo sapiens
  source 1..22: mol_type = genomic DNA
cccgcacttggcgcagctggcc

SEQ ID NO: 559 - DNA, 24 bp, Homo sapiens
  source 1..24: mol_type = genomic DNA
ccagcaccttggcagcagcaccgg

SEQ ID NO: 560 - DNA, 23 bp, Homo sapiens
  source 1..23: mol_type = genomic DNA
tcccccacttggcacagctgggg

SEQ ID NO: 561 - DNA, 22 bp, Homo sapiens
  source 1..22: mol_type = genomic DNA
ccagcacagggcgcagaggtgg

SEQ ID NO: 562 - DNA, 23 bp, Homo sapiens
  source 1..23: mol_type = genomic DNA
cccaccccttagcacagcaatgg

SEQ ID NO: 563 - DNA, 23 bp, Homo sapiens
  source 1..23: mol_type = genomic DNA
cccacaccgtggcccagaggtgg

SEQ ID NO: 564 - DNA, 22 bp, Homo sapiens
  source 1..22: mol_type = genomic DNA
ccagcacctggcacagcatagg

SEQ ID NO: 565 - DNA, 23 bp, Homo sapiens
  source 1..23: mol_type = genomic DNA
accactacctggcccagcggtgg

SEQ ID NO: 566 - DNA, 23 bp, Homo sapiens
  source 1..23: mol_type = genomic DNA
tccgcaccttggtccagcagggg

SEQ ID NO: 567 - DNA, 22 bp, Homo sapiens
  source 1..22: mol_type = genomic DNA
tacgcacctggctcagcagagg

SEQ ID NO: 568 - DNA, 23 bp, Homo sapiens
  source 1..23: mol_type = genomic DNA
agcccagcatggcgcagaggtgg

SEQ ID NO: 569 - DNA, 22 bp, Homo sapiens
  source 1..22: mol_type = genomic DNA
ccagcacctggcacagaggaga

SEQ ID NO: 570 - DNA, 22 bp, Homo sapiens
  source 1..22: mol_type = genomic DNA
accgcacctggcccagatgggg

SEQ ID NO: 571 - DNA, 22 bp, Homo sapiens
  source 1..22: mol_type = genomic DNA
cccgcacctggctcagaggggt

SEQ ID NO: 572 - DNA, 22 bp, Homo sapiens
  source 1..22: mol_type = genomic DNA
accgcacctggcccagtggagg

SEQ ID NO: 573 - DNA, 23 bp, Homo sapiens
  source 1..23: mol_type = genomic DNA
cccacatcctggcccagcagggg

SEQ ID NO: 574 - DNA, 22 bp, Homo sapiens
  source 1..22: mol_type = genomic DNA
cctgcaccaggctcagtggggg

SEQ ID NO: 575 - DNA, 24 bp, Homo sapiens
  source 1..24: mol_type = genomic DNA
cgagcaccttggcagcagctgagg

SEQ ID NO: 576 - DNA, 22 bp, Homo sapiens
  source 1..22: mol_type = genomic DNA
accgcacctggcccagagtagg

SEQ ID NO: 577 - DNA, 22 bp, Homo sapiens
  source 1..22: mol_type = genomic DNA
acagcacctggcgcagagcggg

SEQ ID NO: 578 - DNA, 23 bp, Homo sapiens
  source 1..23: mol_type = genomic DNA
actccaccatggcacagcgtggg

SEQ ID NO: 579 - DNA, 22 bp, Homo sapiens
  source 1..22: mol_type = genomic DNA
accacacctggcccagaggagg

SEQ ID NO: 580 - DNA, 23 bp, Homo sapiens
  source 1..23: mol_type = genomic DNA
gcggcaccttggcccagcgtggg

SEQ ID NO: 581 - DNA, 23 bp, Homo sapiens
  source 1..23: mol_type = genomic DNA
cctgcacctgagcacagaggagg

SEQ ID NO: 582 - DNA, 22 bp, Homo sapiens
  source 1..22: mol_type = genomic DNA
cccgcaccctgtgcagccgagg

SEQ ID NO: 583 - DNA, 22 bp, Homo sapiens
  source 1..22: mol_type = genomic DNA
cccactcttggcacaggggagg

SEQ ID NO: 584 - DNA, 22 bp, Homo sapiens
  source 1..22: mol_type = genomic DNA
cccgcaccaggtgcaggagtgg

SEQ ID NO: 585 - DNA, 22 bp, Homo sapiens
  source 1..22: mol_type = genomic DNA
accgcacctggcccagcaaagg

SEQ ID NO: 586 - DNA, 23 bp, Homo sapiens
  source 1..23: mol_type = genomic DNA
gctgcaccttagcacagtgaagg

SEQ ID NO: 587 - DNA, 23 bp, Homo sapiens
  source 1..23: mol_type = genomic DNA
tcagcaccttggcgaagccttgg

SEQ ID NO: 588 - DNA, 22 bp, Homo sapiens
  source 1..22: mol_type = genomic DNA
accgcacctggcccaaaggggg

SEQ ID NO: 589 - DNA, 23 bp, Homo sapiens
  source 1..23: mol_type = genomic DNA
ccctcaccctggcacagccgggg

SEQ ID NO: 590 - DNA, 23 bp, Homo sapiens
  source 1..23: mol_type = genomic DNA
ttcacaccttggtgcagaggtga

SEQ ID NO: 591 - DNA, 22 bp, Homo sapiens
  source 1..22: mol_type = genomic DNA
ccagcacctagcgcagcggctg

SEQ ID NO: 592 - DNA, 22 bp, Homo sapiens
  source 1..22: mol_type = genomic DNA
accgcacctggcccatcagggg

SEQ ID NO: 593 - DNA, 22 bp, Homo sapiens
  source 1..22: mol_type = genomic DNA
cccgcacctggctcagcgggtc

SEQ ID NO: 594 - DNA, 22 bp, Homo sapiens
  source 1..22: mol_type = genomic DNA
tcagcacctggagcagccgagg

SEQ ID NO: 595 - DNA, 23 bp, Homo sapiens
  source 1..23: mol_type = genomic DNA
ccccacccttggtgcagaggagg

SEQ ID NO: 596 - DNA, 23 bp, Homo sapiens
  source 1..23: mol_type = genomic DNA
catacaccttgccgcagccaggg

SEQ ID NO: 597 - DNA, 23 bp, Homo sapiens
  source 1..23: mol_type = genomic DNA
cacacaccttagcacagccaagg

SEQ ID NO: 598 - DNA, 22 bp, Homo sapiens
  source 1..22: mol_type = genomic DNA
ctagcacctggcacagtggtgg

SEQ ID NO: 599 - DNA, 22 bp, Homo sapiens
  source 1..22: mol_type = genomic DNA
accgtacctggcccagaggagg

SEQ ID NO: 600 - DNA, 23 bp, Homo sapiens
  source 1..23: mol_type = genomic DNA
gccccaccttaatgcagcggggg

SEQ ID NO: 601 - DNA, 23 bp, Homo sapiens
  source 1..23: mol_type = genomic DNA
ccagctacatggcccagaggagg

SEQ ID NO: 602 - DNA, 22 bp, Homo sapiens
  source 1..22: mol_type = genomic DNA
cccacaccatgcgcagagtggg

SEQ ID NO: 603 - DNA, 22 bp, Homo sapiens
  source 1..22: mol_type = genomic DNA
cccgcacccaggccagctgtgg

SEQ ID NO: 604 - DNA, 22 bp, Homo sapiens
  source 1..22: mol_type = genomic DNA
ccagcacctgctgcagcgatgg

SEQ ID NO: 605 - DNA, 23 bp, Homo sapiens
  source 1..23: mol_type = genomic DNA
tccgcaccttggcccagttgaag

SEQ ID NO: 606 - DNA, 24 bp, Homo sapiens
  source 1..24: mol_type = genomic DNA
acagcaccttggcagcagaggtgg

SEQ ID NO: 607 - DNA, 22 bp, Homo sapiens
  source 1..22: mol_type = genomic DNA
cccgcaccaggctcagcagcag

SEQ ID NO: 608 - DNA, 22 bp, Homo sapiens
  source 1..22: mol_type = genomic DNA
ccagcacctggcacagccaggg

SEQ ID NO: 609 - DNA, 23 bp, Homo sapiens
  source 1..23: mol_type = genomic DNA
gctgcaccctgccacagaggagg

SEQ ID NO: 610 - DNA, 23 bp, Homo sapiens
  source 1..23: mol_type = genomic DNA
ccagcaccctagtgcagagtggg

SEQ ID NO: 611 - DNA, 22 bp, Homo sapiens
  source 1..22: mol_type = genomic DNA
cccgcacctggcacagcaccag

SEQ ID NO: 612 - DNA, 22 bp, Homo sapiens
  source 1..22: mol_type = genomic DNA
cccgaccctgacgcagcctggg

SEQ ID NO: 613 - DNA, 23 bp, Homo sapiens
  source 1..23: mol_type = genomic DNA
cccgcaccctatcacagcagagg

SEQ ID NO: 614 - DNA, 22 bp, Homo sapiens
  source 1..22: mol_type = genomic DNA
ctcgcaccaggcgcagccgtgg

SEQ ID NO: 615 - DNA, 23 bp, Homo sapiens
  source 1..23: mol_type = genomic DNA
catgtaccttgccacagcagggg

SEQ ID NO: 616 - DNA, 24 bp, Homo sapiens
  source 1..24: mol_type = genomic DNA
cgagcaccttggcggcagctgagg

SEQ ID NO: 617 - DNA, 23 bp, Homo sapiens
  source 1..23: mol_type = genomic DNA
tccacacctaggcacagcctagg

SEQ ID NO: 618 - DNA, 23 bp, Homo sapiens
  source 1..23: mol_type = genomic DNA
ccagcaccaaggctcagctgagg

SEQ ID NO: 619 - DNA, 22 bp, Homo sapiens
  source 1..22: mol_type = genomic DNA
accgcacctggcacattggagg

SEQ ID NO: 620 - DNA, 23 bp, Homo sapiens
  source 1..23: mol_type = genomic DNA
cccacaccttggcccagccctgg

SEQ ID NO: 621 - DNA, 22 bp, Homo sapiens
  source 1..22: mol_type = genomic DNA
gccgcacctgccgcagccgtgg

SEQ ID NO: 622 - DNA, 22 bp, Homo sapiens
  source 1..22: mol_type = genomic DNA
cccgcactgggtgcagtggtgg

SEQ ID NO: 623 - DNA, 23 bp, Homo sapiens
  source 1..23: mol_type = genomic DNA
cccacacccaggtgcagcggcag

SEQ ID NO: 624 - DNA, 22 bp, Homo sapiens
  source 1..22: mol_type = genomic DNA
ccagcacctggcacagcaggtg

SEQ ID NO: 625 - DNA, 23 bp, Homo sapiens
  source 1..23: mol_type = genomic DNA
cccgcatcttggtgcagctgctt

SEQ ID NO: 626 - DNA, 23 bp, Homo sapiens
  source 1..23: mol_type = genomic DNA
accgcaccatggtgcagctgggc

SEQ ID NO: 627 - DNA, 22 bp, Homo sapiens
  source 1..22: mol_type = genomic DNA
ccaacacctggcgcagagtagg

SEQ ID NO: 628 - DNA, 23 bp, Homo sapiens
  source 1..23: mol_type = genomic DNA
ctcgtaccaaagcgcagaggagg

SEQ ID NO: 629 - DNA, 22 bp, Homo sapiens
  source 1..22: mol_type = genomic DNA
cccgcactcggtgcagcggtat

SEQ ID NO: 630 - DNA, 22 bp, Homo sapiens
  source 1..22: mol_type = genomic DNA
cccgcactgggtgcagcggaag

SEQ ID NO: 631 - DNA, 22 bp, Homo sapiens
  source 1..22: mol_type = genomic DNA
gccgcacttggcgcagctgtgg

SEQ ID NO: 632 - DNA, 23 bp, Homo sapiens
  source 1..23: mol_type = genomic DNA
ctaacaccttggtgcagaggtgg

SEQ ID NO: 633 - DNA, 23 bp, Homo sapiens
  source 1..23: mol_type = genomic DNA
cctacaccatggcgcagcgtcag

SEQ ID NO: 634 - DNA, 22 bp, Homo sapiens
  source 1..22: mol_type = genomic DNA
ccagcacctggcacatcggtgg

SEQ ID NO: 635 - DNA, 22 bp, Homo sapiens
  source 1..22: mol_type = genomic DNA
cccgcacatggtgcagtggctg

SEQ ID NO: 636 - DNA, 22 bp, Homo sapiens
  source 1..22: mol_type = genomic DNA
cccacccctggcccagccgagg

SEQ ID NO: 637 - DNA, 23 bp, Homo sapiens
  source 1..23: mol_type = genomic DNA
tgcacaccttggcgcagtggggg

SEQ ID NO: 638 - DNA, 22 bp, Homo sapiens
  source 1..22: mol_type = genomic DNA
ccagcacctggcacaggggagg

SEQ ID NO: 639 - DNA, 22 bp, Homo sapiens
  source 1..22: mol_type = genomic DNA
cccacaccaggcacagaggagg

SEQ ID NO: 640 - DNA, 23 bp, Homo sapiens
  source 1..23: mol_type = genomic DNA
gtagcacgttgacgcagcagcgg

SEQ ID NO: 641 - DNA, 22 bp, Homo sapiens
  source 1..22: mol_type = genomic DNA
gccgcaccgggcgcagttgggg

SEQ ID NO: 642 - DNA, 22 bp, Homo sapiens
  source 1..22: mol_type = genomic DNA
cccacacctgccccagaggtgg

SEQ ID NO: 643 - DNA, 22 bp, Homo sapiens
  source 1..22: mol_type = genomic DNA
cccacagctggcccagcagggg

SEQ ID NO: 644 - DNA, 23 bp, Homo sapiens
  source 1..23: mol_type = genomic DNA
tcagcaccttggcacagctgaag

SEQ ID NO: 645 - DNA, 23 bp, Homo sapiens
  source 1..23: mol_type = genomic DNA
acagcacctcggtgcagcagaga

SEQ ID NO: 646 - DNA, 22 bp, Homo sapiens
  source 1..22: mol_type = genomic DNA
ccctcccatggcgcagcttcgg

SEQ ID NO: 647 - DNA, 22 bp, Homo sapiens
  source 1..22: mol_type = genomic DNA
cccgcaccgggcgcagcagctg

SEQ ID NO: 648 - DNA, 23 bp, Homo sapiens
  source 1..23: mol_type = genomic DNA
catgctacatggcgcagcggtag

SEQ ID NO: 649 - DNA, 23 bp, Homo sapiens
  source 1..23: mol_type = genomic DNA
ctcgcacccgaacgcagcagagg

SEQ ID NO: 650 - DNA, 23 bp, Homo sapiens
  source 1..23: mol_type = genomic DNA
tccccaccccagcgcagcagagg

SEQ ID NO: 651 - DNA, 23 bp, Homo sapiens
  source 1..23: mol_type = genomic DNA
cgaagaccttggcgcagaagcgg

SEQ ID NO: 652 - DNA, 23 bp, Homo sapiens
  source 1..23: mol_type = genomic DNA
cccgcaccttggcctagcgcggt

SEQ ID NO: 653 - DNA, 23 bp, Homo sapiens
  source 1..23: mol_type = genomic DNA
tctgcaccttggcgcagctggag

SEQ ID NO: 654 - DNA, 23 bp, Homo sapiens
  source 1..23: mol_type = genomic DNA
ctcccaccttaaagcagcggtgg

SEQ ID NO: 655 - DNA, 22 bp, Homo sapiens
  source 1..22: mol_type = genomic DNA
accgcacctggcccagagtggg

SEQ ID NO: 656 - DNA, 23 bp, Homo sapiens
  source 1..23: mol_type = genomic DNA
cccccaccttggcccagcgttgg

SEQ ID NO: 657 - DNA, 22 bp, Homo sapiens
  source 1..22: mol_type = genomic DNA
gccacacctcgcacagcggtgg

SEQ ID NO: 658 - DNA, 23 bp, Homo sapiens
  source 1..23: mol_type = genomic DNA
accacaccttgctgcagaggagg

SEQ ID NO: 659 - DNA, 22 bp, Homo sapiens
  source 1..22: mol_type = genomic DNA
cccgcagagggcgcagcggctg

SEQ ID NO: 660 - DNA, 21 bp, Homo sapiens
  source 1..21: mol_type = genomic DNA
ccagcactggctcagcagagg

SEQ ID NO: 661 - DNA, 22 bp, Homo sapiens
  source 1..22: mol_type = genomic DNA
accgcacccggcccagtggagg

SEQ ID NO: 662 - DNA, 23 bp, Homo sapiens
  source 1..23: mol_type = genomic DNA
cctgcactcaggcgcagacgggg

SEQ ID NO: 663 - DNA, 23 bp, Homo sapiens
  source 1..23: mol_type = genomic DNA
gctgcaccttggcacagtggagg

SEQ ID NO: 664 - DNA, 23 bp, Homo sapiens
  source 1..23: mol_type = genomic DNA
cccacacccaggcccagaggagg

SEQ ID NO: 665 - DNA, 21 bp, Homo sapiens
  source 1..21: mol_type = genomic DNA
cctgcacctgcacagcagggg

SEQ ID NO: 666 - DNA, 22 bp, Homo sapiens
  source 1..22: mol_type = genomic DNA
ctcgcacctggtgcagcaccgg

SEQ ID NO: 667 - DNA, 21 bp, Homo sapiens
  source 1..21: mol_type = genomic DNA
gccgcacaggcacagcggcgg

SEQ ID NO: 668 - DNA, 23 bp, Homo sapiens
  source 1..23: mol_type = genomic DNA
tcagcaccttggcacatccaggg

SEQ ID NO: 669 - DNA, 23 bp, Homo sapiens
  source 1..23: mol_type = genomic DNA
cctgcacctttgcacagcactgg

SEQ ID NO: 670 - DNA, 22 bp, Homo sapiens
  source 1..22: mol_type = genomic DNA
cccgcatgtggcgcagcagtgt

SEQ ID NO: 671 - DNA, 23 bp, Homo sapiens
  source 1..23: mol_type = genomic DNA
cccagcacttggtgaagcggagg

SEQ ID NO: 672 - DNA, 21 bp, Homo sapiens
  source 1..21: mol_type = genomic DNA
cccacactggtgcagaggtgg

SEQ ID NO: 673 - DNA, 23 bp, Homo sapiens
  source 1..23: mol_type = genomic DNA
cctgcaccatggtgcaccggcag

SEQ ID NO: 674 - DNA, 21 bp, Homo sapiens
  source 1..21: mol_type = genomic DNA
cccgcacagccgcagaggagg

SEQ ID NO: 675 - DNA, 22 bp, Homo sapiens
  source 1..22: mol_type = genomic DNA
accgcacctggcacagcttggg

SEQ ID NO: 676 - DNA, 23 bp, Homo sapiens
  source 1..23: mol_type = genomic DNA
cccacaccctggcccagcctcgg

SEQ ID NO: 677 - DNA, 23 bp, Homo sapiens
  source 1..23: mol_type = genomic DNA
ccagcactttggtacagcatagg

SEQ ID NO: 678 - DNA, 23 bp, Homo sapiens
  source 1..23: mol_type = genomic DNA
cccgcaccctggctcagtgttgg

SEQ ID NO: 679 - DNA, 21 bp, Homo sapiens
  source 1..21: mol_type = genomic DNA
cccgcacaggcgcagaggtgg

SEQ ID NO: 680 - DNA, 22 bp, Homo sapiens
  source 1..22: mol_type = genomic DNA
ccagcacctggtccagtggagg

SEQ ID NO: 681 - DNA, 22 bp, Homo sapiens
  source 1..22: mol_type = genomic DNA
ccagcacctggcacagagtagg

SEQ ID NO: 682 - DNA, 23 bp, Homo sapiens
  source 1..23: mol_type = genomic DNA
cagataccataaaaatcatctgg

SEQ ID NO: 683 - DNA, 22 bp, Homo sapiens
  source 1..22: mol_type = genomic DNA
aagatactgaaaaaccctgcaa

SEQ ID NO: 684 - DNA, 23 bp, Homo sapiens
  source 1..23: mol_type = genomic DNA
cagagagcagagtaaacctctgg

SEQ ID NO: 685 - DNA, 21 bp, Homo sapiens
  source 1..21: mol_type = genomic DNA
cagaaaactataaccctcagg

SEQ ID NO: 686 - DNA, 23 bp, Homo sapiens
  source 1..23: mol_type = genomic DNA
agaatggctgcataacccttggg

SEQ ID NO: 687 - DNA, 23 bp, Homo sapiens
  source 1..23: mol_type = genomic DNA
aaggttacttaataaacatctgg

SEQ ID NO: 688 - DNA, 24 bp, Homo sapiens
  source 1..24: mol_type = genomic DNA
aagatacctgaattaaatctcaaa

SEQ ID NO: 689 - DNA, 23 bp, Homo sapiens
  source 1..23: mol_type = genomic DNA
aagtatcttgaataaccctcctg

SEQ ID NO: 690 - DNA, 23 bp, Homo sapiens
  source 1..23: mol_type = genomic DNA
caaataactaaatgaccctcttg

SEQ ID NO: 691 - DNA, 22 bp, Homo sapiens
  source 1..22: mol_type = genomic DNA
aagatactgaaaaactctcttc

SEQ ID NO: 692 - DNA, 24 bp, Homo sapiens
  source 1..24: mol_type = genomic DNA
tagataacctgaatagccctatag

SEQ ID NO: 693 - DNA, 23 bp, Homo sapiens
  source 1..23: mol_type = genomic DNA
tagatacttcaatacctctcagt

SEQ ID NO: 694 - DNA, 23 bp, Homo sapiens
  source 1..23: mol_type = genomic DNA
agcaatcctgaaaaatcctctgg

SEQ ID NO: 695 - DNA, 23 bp, Homo sapiens
  source 1..23: mol_type = genomic DNA
acgatacttggataaccctctgg

SEQ ID NO: 696 - DNA, 22 bp, Homo sapiens
  source 1..22: mol_type = genomic DNA
gagatacctaataagcctctat

SEQ ID NO: 697 - DNA, 23 bp, Homo sapiens
  source 1..23: mol_type = genomic DNA
aagatacctgaataaccctctgg

SEQ ID NO: 698 - DNA, 22 bp, Homo sapiens
  source 1..22: mol_type = genomic DNA
aagttactgaatatctctcagc

SEQ ID NO: 699 - DNA, 23 bp, Homo sapiens
  source 1..23: mol_type = genomic DNA
agtatacctcaataaccacctgg

SEQ ID NO: 700 - DNA, 22 bp, Homo sapiens
  source 1..22: mol_type = genomic DNA
aagatccagaagaatcccctgg

SEQ ID NO: 701 - DNA, 23 bp, Homo sapiens
  source 1..23: mol_type = genomic DNA
aggatacctggaaaccctactgg

SEQ ID NO: 702 - DNA, 23 bp, Homo sapiens
  source 1..23: mol_type = genomic DNA
aagataactagctagctctctgg

SEQ ID NO: 703 - DNA, 23 bp, Homo sapiens
  source 1..23: mol_type = genomic DNA
gagatacttgaataaacttctat

SEQ ID NO: 704 - DNA, 23 bp, Homo sapiens
  source 1..23: mol_type = genomic DNA
aagatacctgactaacctgtttt

SEQ ID NO: 705 - DNA, 23 bp, Homo sapiens
  source 1..23: mol_type = genomic DNA
tagatacatgattaaaccactgc

SEQ ID NO: 706 - DNA, 21 bp, Homo sapiens
  source 1..21: mol_type = genomic DNA
tatatacatgaataactccgg

SEQ ID NO: 707 - DNA, 23 bp, Homo sapiens
  source 1..23: mol_type = genomic DNA
attattcttgaataaccccaggg

SEQ ID NO: 708 - DNA, 23 bp, Homo sapiens
  source 1..23: mol_type = genomic DNA
aagatacctgagaaactctgcaa

SEQ ID NO: 709 - DNA, 23 bp, Homo sapiens
  source 1..23: mol_type = genomic DNA
atgactgctgagaaaccctctgg

SEQ ID NO: 710 - DNA, 23 bp, Homo sapiens
  source 1..23: mol_type = genomic DNA
aagaatcctagatatccctcagt

SEQ ID NO: 711 - DNA, 23 bp, Homo sapiens
  source 1..23: mol_type = genomic DNA
aaaataccaaaaaaaccctatag

SEQ ID NO: 712 - DNA, 22 bp, Homo sapiens
  source 1..22: mol_type = genomic DNA
aagaatttgaataaccctcaat

SEQ ID NO: 713 - DNA, 23 bp, Homo sapiens
  source 1..23: mol_type = genomic DNA
aggctaacagaatcaccctcggg

SEQ ID NO: 714 - DNA, 22 bp, Homo sapiens
  source 1..22: mol_type = genomic DNA
gtgatcctgagtaaacctcagg

SEQ ID NO: 715 - DNA, 21 bp, Homo sapiens
  source 1..21: mol_type = genomic DNA
tagatacctataagcctctgg

SEQ ID NO: 716 - DNA, 23 bp, Homo sapiens
  source 1..23: mol_type = genomic DNA
aagatacatgaaaaaaacattgg

SEQ ID NO: 717 - DNA, 23 bp, Homo sapiens
  source 1..23: mol_type = genomic DNA
aagataccttaaaacccttcagc

SEQ ID NO: 718 - DNA, 23 bp, Homo sapiens
  source 1..23: mol_type = genomic DNA
aatttacctgaatagtcattagg

SEQ ID NO: 719 - DNA, 23 bp, Homo sapiens
  source 1..23: mol_type = genomic DNA
aagatacacaaatagccatcaag

SEQ ID NO: 720 - DNA, 23 bp, Homo sapiens
  source 1..23: mol_type = genomic DNA
aacaaacctgaatagtcctactg

SEQ ID NO: 721 - DNA, 23 bp, Homo sapiens
  source 1..23: mol_type = genomic DNA
cagatatctgaatcactcttctg

SEQ ID NO: 722 - DNA, 21 bp, Homo sapiens
  source 1..21: mol_type = genomic DNA
aaaatatgaataaccctttgg

SEQ ID NO: 723 - DNA, 22 bp, Homo sapiens
  source 1..22: mol_type = genomic DNA
cagatactgagtcaccctcagc

SEQ ID NO: 724 - DNA, 22 bp, Homo sapiens
  source 1..22: mol_type = genomic DNA
aagtacctaaatacccttgggg

SEQ ID NO: 725 - DNA, 23 bp, Homo sapiens
  source 1..23: mol_type = genomic DNA
aagataccattctaaccctctga

SEQ ID NO: 726 - DNA, 23 bp, Homo sapiens
  source 1..23: mol_type = genomic DNA
aaggtaactaagaaaccctcaga

SEQ ID NO: 727 - DNA, 23 bp, Homo sapiens
  source 1..23: mol_type = genomic DNA
ctcataccacaataaccctcatg

SEQ ID NO: 728 - DNA, 22 bp, Homo sapiens
  source 1..22: mol_type = genomic DNA
aagataatgaatatcacccagg

SEQ ID NO: 729 - DNA, 22 bp, Homo sapiens
  source 1..22: mol_type = genomic DNA
aagatactaataaacactcagg

SEQ ID NO: 730 - DNA, 23 bp, Homo sapiens
  source 1..23: mol_type = genomic DNA
cagatacctgaataagcagaagc

SEQ ID NO: 731 - DNA, 22 bp, Homo sapiens
  source 1..22: mol_type = genomic DNA
ataatacctgaatactctcaga

SEQ ID NO: 732 - DNA, 23 bp, Homo sapiens
  source 1..23: mol_type = genomic DNA
tctatacctgcataaccctaagg

SEQ ID NO: 733 - DNA, 23 bp, Homo sapiens
  source 1..23: mol_type = genomic DNA
aagttaccaggaggaccctcagg

SEQ ID NO: 734 - DNA, 23 bp, Homo sapiens
  source 1..23: mol_type = genomic DNA
aagagaccggaatgcccccttgg

SEQ ID NO: 735 - DNA, 23 bp, Homo sapiens
  source 1..23: mol_type = genomic DNA
aacaggccataagaaccctctgg

SEQ ID NO: 736 - DNA, 23 bp, Homo sapiens
  source 1..23: mol_type = genomic DNA
taaatgccaggataagcctctgg

SEQ ID NO: 737 - DNA, 23 bp, Homo sapiens
  source 1..23: mol_type = genomic DNA
tacataactgaataactctccaa

SEQ ID NO: 738 - DNA, 22 bp, Homo sapiens
  source 1..22: mol_type = genomic DNA
aagaaagctgagtaagcccggg

SEQ ID NO: 739 - DNA, 23 bp, Homo sapiens
  source 1..23: mol_type = genomic DNA
gggatacccgaataaccccacag

SEQ ID NO: 740 - DNA, 22 bp, Homo sapiens
  source 1..22: mol_type = genomic DNA
gagacacctgggtaaccccagg

SEQ ID NO: 741 - DNA, 23 bp, Homo sapiens
  source 1..23: mol_type = genomic DNA
gttatacctgaataaatctgggg

SEQ ID NO: 742 - DNA, 23 bp, Homo sapiens
  source 1..23: mol_type = genomic DNA
aaaatacctgcataaccctgaga

SEQ ID NO: 743 - DNA, 23 bp, Homo sapiens
  source 1..23: mol_type = genomic DNA
cagttccctgagtcaccctcagt

SEQ ID NO: 744 - DNA, 23 bp, Homo sapiens
  source 1..23: mol_type = genomic DNA
aagatacatgaacttcccacagg

SEQ ID NO: 745 - DNA, 23 bp, Homo sapiens
  source 1..23: mol_type = genomic DNA
aaaataagtgaataacccactaa

SEQ ID NO: 746 - DNA, 23 bp, Homo sapiens
  source 1..23: mol_type = genomic DNA
taggtacctgagtaactctgcgg

SEQ ID NO: 747 - DNA, 22 bp, Homo sapiens
  source 1..22: mol_type = genomic DNA
aagaaaccagataacccacagc

SEQ ID NO: 748 - DNA, 22 bp, Homo sapiens
  source 1..22: mol_type = genomic DNA
aagatacctgcataatctagga

SEQ ID NO: 749 - DNA, 23 bp, Homo sapiens
  source 1..23: mol_type = genomic DNA
aggatacctgcgtaactcgcagc

SEQ ID NO: 750 - DNA, 23 bp, Homo sapiens
  source 1..23: mol_type = genomic DNA
aagatacctggagatgccccttg

SEQ ID NO: 751 - DNA, 23 bp, Homo sapiens
  source 1..23: mol_type = genomic DNA
aagatatcagaataactctggct

SEQ ID NO: 752 - DNA, 23 bp, Homo sapiens
  source 1..23: mol_type = genomic DNA
cctgtacctgcataaccttctgg

SEQ ID NO: 753 - DNA, 23 bp, Homo sapiens
  source 1..23: mol_type = genomic DNA
aagatacctaaaaagcccccagc

SEQ ID NO: 754 - DNA, 24 bp, Homo sapiens
  source 1..24: mol_type = genomic DNA
tagatacccaaatagcccctcagg

SEQ ID NO: 755 - DNA, 23 bp, Homo sapiens
  source 1..23: mol_type = genomic DNA
tctatacctaaatagtcctcagg

SEQ ID NO: 756 - DNA, 23 bp, Homo sapiens
  source 1..23: mol_type = genomic DNA
aaaataccagaataacccattta

SEQ ID NO: 757 - DNA, 23 bp, Homo sapiens
  source 1..23: mol_type = genomic DNA
aagatatctgaataaactccaaa

SEQ ID NO: 758 - DNA, 23 bp, Homo sapiens
  source 1..23: mol_type = genomic DNA
atgattattaaataaccctcaag

SEQ ID NO: 759 - DNA, 23 bp, Homo sapiens
  source 1..23: mol_type = genomic DNA
aagatccctgattaccattccag

SEQ ID NO: 760 - DNA, 23 bp, Homo sapiens
  source 1..23: mol_type = genomic DNA
aagatacctggctcaacctcatc

SEQ ID NO: 761 - DNA, 23 bp, Homo sapiens
  source 1..23: mol_type = genomic DNA
aatgtggctgaaaaagcctctgg

SEQ ID NO: 762 - DNA, 23 bp, Homo sapiens
  source 1..23: mol_type = genomic DNA
aagatacctaaacattccagtgg

SEQ ID NO: 763 - DNA, 23 bp, Homo sapiens
  source 1..23: mol_type = genomic DNA
aagagagctggacaactctaagg

SEQ ID NO: 764 - DNA, 23 bp, Homo sapiens
  source 1..23: mol_type = genomic DNA
aagataggtcaataaccacccgg

SEQ ID NO: 765 - DNA, 24 bp, Homo sapiens
  source 1..24: mol_type = genomic DNA
tagataactgaataaactctatgg

SEQ ID NO: 766 - DNA, 23 bp, Homo sapiens
  source 1..23: mol_type = genomic DNA
aagatgtattattgaccctctgg

SEQ ID NO: 767 - DNA, 23 bp, Homo sapiens
  source 1..23: mol_type = genomic DNA
tagaaaacagaatgactctcagg

SEQ ID NO: 768 - DNA, 22 bp, Homo sapiens
  source 1..22: mol_type = genomic DNA
aataaccaaaataaccctccag

SEQ ID NO: 769 - DNA, 22 bp, Homo sapiens
  source 1..22: mol_type = genomic DNA
tatgtacctaataagcctcagg

SEQ ID NO: 770 - DNA, 23 bp, Homo sapiens
  source 1..23: mol_type = genomic DNA
catatatctgaatagccttctgg

SEQ ID NO: 771 - DNA, 22 bp, Homo sapiens
  source 1..22: mol_type = genomic DNA
aagatacagaattcccctctga

SEQ ID NO: 772 - DNA, 22 bp, Homo sapiens
  source 1..22: mol_type = genomic DNA
aagttacatgaaaaacatctgg

SEQ ID NO: 773 - DNA, 23 bp, Homo sapiens
  source 1..23: mol_type = genomic DNA
aaaatacctgaataatcctcgaa

SEQ ID NO: 774 - DNA, 23 bp, Homo sapiens
  source 1..23: mol_type = genomic DNA
aagataccagagaaagtctcaga

SEQ ID NO: 775 - DNA, 23 bp, Homo sapiens
  source 1..23: mol_type = genomic DNA
caaataccagaataccctacagg

SEQ ID NO: 776 - DNA, 22 bp, Homo sapiens
  source 1..22: mol_type = genomic DNA
atgatcctaaataaccttccag

SEQ ID NO: 777 - DNA, 22 bp, Homo sapiens
  source 1..22: mol_type = genomic DNA
aacaacatgaatgactctctgg

SEQ ID NO: 778 - DNA, 23 bp, Homo sapiens
  source 1..23: mol_type = genomic DNA
aagataaaggtatctccctctgg

SEQ ID NO: 779 - DNA, 23 bp, Homo sapiens
  source 1..23: mol_type = genomic DNA
aagccaactgaataacactgttg

SEQ ID NO: 780 - DNA, 23 bp, Homo sapiens
  source 1..23: mol_type = genomic DNA
atgatacctgaatacctctaatg

SEQ ID NO: 781 - DNA, 23 bp, Homo sapiens
  source 1..23: mol_type = genomic DNA
aagccaactgaagagcccttggg

SEQ ID NO: 782 - DNA, 22 bp, Homo sapiens
  source 1..22: mol_type = genomic DNA
aagaacttgataaaccctcaag

SEQ ID NO: 783 - DNA, 23 bp, Homo sapiens
  source 1..23: mol_type = genomic DNA
ttgacacctaaataaccctttgg

SEQ ID NO: 784 - DNA, 23 bp, Homo sapiens
  source 1..23: mol_type = genomic DNA
aagagaccagaagcaacctctgt

SEQ ID NO: 785 - DNA, 24 bp, Homo sapiens
  source 1..24: mol_type = genomic DNA
aagaaacatgaacagagcctcagg

SEQ ID NO: 786 - DNA, 23 bp, Homo sapiens
  source 1..23: mol_type = genomic DNA
gagatacctgtataagtcactag

SEQ ID NO: 787 - DNA, 23 bp, Homo sapiens
  source 1..23: mol_type = genomic DNA
aaaatgccttaagaaccctgggg

SEQ ID NO: 788 - DNA, 22 bp, Homo sapiens
  source 1..22: mol_type = genomic DNA
tagatactcagtaaccctcttg

SEQ ID NO: 789 - DNA, 23 bp, Homo sapiens
  source 1..23: mol_type = genomic DNA
aagagacaggaataaccctcagc

SEQ ID NO: 790 - DNA, 24 bp, Homo sapiens
  source 1..24: mol_type = genomic DNA
aaaataccatgtaaaacactctgg

SEQ ID NO: 791 - DNA, 22 bp, Homo sapiens
  source 1..22: mol_type = genomic DNA
gagatacagaatagccctgggg

SEQ ID NO: 792 - DNA, 22 bp, Homo sapiens
  source 1..22: mol_type = genomic DNA
aagaacctaaatcaccattggg

SEQ ID NO: 793 - DNA, 23 bp, Homo sapiens
  source 1..23: mol_type = genomic DNA
aagatatctggataatccaccaa

SEQ ID NO: 794 - DNA, 23 bp, Homo sapiens
  source 1..23: mol_type = genomic DNA
aagatactggaataaacataaag

SEQ ID NO: 795 - DNA, 23 bp, Homo sapiens
  source 1..23: mol_type = genomic DNA
aaaatgcctcaatatctctgtgg

SEQ ID NO: 796 - DNA, 23 bp, Homo sapiens
  source 1..23: mol_type = genomic DNA
aaaataccaaaataaccctaaag

SEQ ID NO: 797 - DNA, 23 bp, Homo sapiens
  source 1..23: mol_type = genomic DNA
tagatacctgaaatactctatgc

SEQ ID NO: 798 - DNA, 23 bp, Homo sapiens
  source 1..23: mol_type = genomic DNA
aaaataccataatttccctcaga

SEQ ID NO: 799 - DNA, 22 bp, Homo sapiens
  source 1..22: mol_type = genomic DNA
aagataccaaataaacctctga

SEQ ID NO: 800 - DNA, 23 bp, Homo sapiens
  source 1..23: mol_type = genomic DNA
aagatacctaaaatacctattgg

SEQ ID NO: 801 - DNA, 23 bp, Homo sapiens
  source 1..23: mol_type = genomic DNA
cagatacctgaaaaactctctct

SEQ ID NO: 802 - DNA, 24 bp, Homo sapiens
  source 1..24: mol_type = genomic DNA
aataaacactgaataaccctttgt

SEQ ID NO: 803 - DNA, 22 bp, Homo sapiens
  source 1..22: mol_type = genomic DNA
cagctacctaattaccctctgg

SEQ ID NO: 804 - DNA, 23 bp, Homo sapiens
  source 1..23: mol_type = genomic DNA
taggtacctgatttaccctgatg

SEQ ID NO: 805 - DNA, 23 bp, Homo sapiens
  source 1..23: mol_type = genomic DNA
aagatacctcaggaaccagcagc

SEQ ID NO: 806 - DNA, 23 bp, Homo sapiens
  source 1..23: mol_type = genomic DNA
aaaagacctaaaaagccctctgg

SEQ ID NO: 807 - DNA, 23 bp, Homo sapiens
  source 1..23: mol_type = genomic DNA
tcaattactgaataaccctcttg

SEQ ID NO: 808 - DNA, 23 bp, Homo sapiens
  source 1..23: mol_type = genomic DNA
aatatacatgaataaatctcaca

SEQ ID NO: 809 - DNA, 23 bp, Homo sapiens
  source 1..23: mol_type = genomic DNA
aaaaaacgtgaaaaaccttaggg

SEQ ID NO: 810 - DNA, 22 bp, Homo sapiens
  source 1..22: mol_type = genomic DNA
aagatacctgttagccctcacc

SEQ ID NO: 811 - DNA, 23 bp, Homo sapiens
  source 1..23: mol_type = genomic DNA
aagtttcatgcataaaactctgg

SEQ ID NO: 812 - DNA, 23 bp, Homo sapiens
  source 1..23: mol_type = genomic DNA
aaggtacctgaagaactcaactg

SEQ ID NO: 813 - DNA, 23 bp, Homo sapiens
  source 1..23: mol_type = genomic DNA
aagatgtatgaataactctcggg

SEQ ID NO: 814 - DNA, 23 bp, Homo sapiens
  source 1..23: mol_type = genomic DNA
aagcaacctaaatgtccatcagg

SEQ ID NO: 815 - DNA, 23 bp, Homo sapiens
  source 1..23: mol_type = genomic DNA
gagatacctggataaccacttgg

SEQ ID NO: 816 - DNA, 23 bp, Homo sapiens
  source 1..23: mol_type = genomic DNA
aagacacctggagaactctcggg

SEQ ID NO: 817 - DNA, 22 bp, Homo sapiens
  source 1..22: mol_type = genomic DNA
aagtaacccaataaccctgagg

SEQ ID NO: 818 - DNA, 24 bp, Homo sapiens
  source 1..24: mol_type = genomic DNA
acaatacgtgaatgaatcctctgg

SEQ ID NO: 819 - DNA, 23 bp, Homo sapiens
  source 1..23: mol_type = genomic DNA
aagattccagacatacactctgg

SEQ ID NO: 820 - DNA, 23 bp, Homo sapiens
  source 1..23: mol_type = genomic DNA
taagtagctgtataaccctgggg

SEQ ID NO: 821 - DNA, 23 bp, Homo sapiens
  source 1..23: mol_type = genomic DNA
taaatacttgaaaaacccacaga

SEQ ID NO: 822 - DNA, 23 bp, Homo sapiens
  source 1..23: mol_type = genomic DNA
aagttatctgactaacaatctgt

SEQ ID NO: 823 - DNA, 23 bp, Homo sapiens
  source 1..23: mol_type = genomic DNA
aatatacatgaatttctcttagg

SEQ ID NO: 824 - DNA, 23 bp, Homo sapiens
  source 1..23: mol_type = genomic DNA
aagatgcctccctaacactgggg

SEQ ID NO: 825 - DNA, 21 bp, Homo sapiens
  source 1..21: mol_type = genomic DNA
tacataccaacaaccctctgg

SEQ ID NO: 826 - DNA, 23 bp, Homo sapiens
  source 1..23: mol_type = genomic DNA
aatagagctgaaaaaccctcact

SEQ ID NO: 827 - DNA, 23 bp, Homo sapiens
  source 1..23: mol_type = genomic DNA
aaattagatgaataacccttagt

SEQ ID NO: 828 - DNA, 21 bp, Homo sapiens
  source 1..21: mol_type = genomic DNA
aaaatacctgataccccctgg

SEQ ID NO: 829 - DNA, 21 bp, Homo sapiens
  source 1..21: mol_type = genomic DNA
agagtacctgaatacctctgg

SEQ ID NO: 830 - DNA, 23 bp, Homo sapiens
  source 1..23: mol_type = genomic DNA
agaatatctgaattaccctcaag

SEQ ID NO: 831 - DNA, 22 bp, Homo sapiens
  source 1..22: mol_type = genomic DNA
aagatacatgagtaaacccagc

SEQ ID NO: 832 - DNA, 23 bp, Homo sapiens
  source 1..23: mol_type = genomic DNA
aggagacctgcacaggcctctgg

SEQ ID NO: 833 - DNA, 23 bp, Homo sapiens
  source 1..23: mol_type = genomic DNA
aatttatatgaaaaacccactgg

SEQ ID NO: 834 - DNA, 23 bp, Homo sapiens
  source 1..23: mol_type = genomic DNA
aagatacctgatcaatcctcttc

SEQ ID NO: 835 - DNA, 23 bp, Homo sapiens
  source 1..23: mol_type = genomic DNA
aagataccagaccaaagctcagg

SEQ ID NO: 836 - DNA, 23 bp, Homo sapiens
  source 1..23: mol_type = genomic DNA
tagagacatgaaaaaccctccaa

SEQ ID NO: 837 - DNA, 21 bp, Homo sapiens
  source 1..21: mol_type = genomic DNA
aatattcctgaatccctcggg

SEQ ID NO: 838 - DNA, 23 bp, Homo sapiens
  source 1..23: mol_type = genomic DNA
ctcatacctgaataaccttctca

SEQ ID NO: 839 - DNA, 24 bp, Homo sapiens
  source 1..24: mol_type = genomic DNA
cagataccgagaaaaaccctctgg

SEQ ID NO: 840 - DNA, 23 bp, Homo sapiens
  source 1..23: mol_type = genomic DNA
aagatatatgaaaaagcctatgc

SEQ ID NO: 841 - DNA, 23 bp, Homo sapiens
  source 1..23: mol_type = genomic DNA
cagatacctcaccaacactccag

SEQ ID NO: 842 - DNA, 23 bp, Homo sapiens
  source 1..23: mol_type = genomic DNA
cagagacctgaaaagccctgccg

SEQ ID NO: 843 - DNA, 23 bp, Homo sapiens
  source 1..23: mol_type = genomic DNA
aaaaggcctgcagaaacctctgg

SEQ ID NO: 844 - DNA, 23 bp, Homo sapiens
  source 1..23: mol_type = genomic DNA
caaatccttgaatcacccccagg

SEQ ID NO: 845 - DNA, 23 bp, Homo sapiens
  source 1..23: mol_type = genomic DNA
aagatacctggccacaccccagg

SEQ ID NO: 846 - DNA, 22 bp, Homo sapiens
  source 1..22: mol_type = genomic DNA
gagataatgaatagccctccgg

SEQ ID NO: 847 - DNA, 22 bp, Homo sapiens
  source 1..22: mol_type = genomic DNA
aagatacctgtcatccctccgt

SEQ ID NO: 848 - DNA, 23 bp, Homo sapiens
  source 1..23: mol_type = genomic DNA
gggatacctgcataactctcagg

SEQ ID NO: 849 - DNA, 23 bp, Homo sapiens
  source 1..23: mol_type = genomic DNA
gaaatgcctgaatcacactcgag

SEQ ID NO: 850 - DNA, 22 bp, Homo sapiens
  source 1..22: mol_type = genomic DNA
aagatactgaatcaacttcagt

SEQ ID NO: 851 - DNA, 22 bp, Homo sapiens
  source 1..22: mol_type = genomic DNA
aagataccagtacacccccagg

SEQ ID NO: 852 - DNA, 23 bp, Homo sapiens
  source 1..23: mol_type = genomic DNA
atgatacctcaataaccctattt

SEQ ID NO: 853 - DNA, 23 bp, Homo sapiens
  source 1..23: mol_type = genomic DNA
aaaatacctgaacataccttgag

SEQ ID NO: 854 - DNA, 23 bp, Homo sapiens
  source 1..23: mol_type = genomic DNA
tacatacctaacaacccctcagg

SEQ ID NO: 855 - DNA, 23 bp, Homo sapiens
  source 1..23: mol_type = genomic DNA
aagaaacaagggaaaccctcagg

SEQ ID NO: 856 - DNA, 23 bp, Homo sapiens
  source 1..23: mol_type = genomic DNA
aagataccaggatggctctctgc

SEQ ID NO: 857 - DNA, 23 bp, Homo sapiens
  source 1..23: mol_type = genomic DNA
caacaaccagaataacccacagg

SEQ ID NO: 858 - DNA, 24 bp, Homo sapiens
  source 1..24: mol_type = genomic DNA
aagattaaaagaataaacctcagg

SEQ ID NO: 859 - DNA, 23 bp, Homo sapiens
  source 1..23: mol_type = genomic DNA
aacttacctgcaaaaccatctgg

SEQ ID NO: 860 - DNA, 21 bp, Homo sapiens
  source 1..21: mol_type = genomic DNA
aagatctgaattaccatcagt

SEQ ID NO: 861 - DNA, 22 bp, Homo sapiens
  source 1..22: mol_type = genomic DNA
gagatccttaacaaccctcaag

SEQ ID NO: 862 - DNA, 23 bp, Homo sapiens
  source 1..23: mol_type = genomic DNA
aagatatctgagccacactctcg

SEQ ID NO: 863 - DNA, 22 bp, Homo sapiens
  source 1..22: mol_type = genomic DNA
aagctacctgaaaaccttcagg

SEQ ID NO: 864 - DNA, 23 bp, Homo sapiens
  source 1..23: mol_type = genomic DNA
aagatgactgaagaaaccttggg

SEQ ID NO: 865 - DNA, 23 bp, Homo sapiens
  source 1..23: mol_type = genomic DNA
aagatccctgcaaacccttttgg

SEQ ID NO: 866 - DNA, 23 bp, Homo sapiens
  source 1..23: mol_type = genomic DNA
aagacagctaaatcaccccacgg

SEQ ID NO: 867 - DNA, 23 bp, Homo sapiens
  source 1..23: mol_type = genomic DNA
aagatcacagaatcaccctcctc

SEQ ID NO: 868 - DNA, 23 bp, Homo sapiens
  source 1..23: mol_type = genomic DNA
aatagacatgaataaccctaaga

SEQ ID NO: 869 - DNA, 23 bp, Homo sapiens
  source 1..23: mol_type = genomic DNA
cagacaccttactaactctcctg

SEQ ID NO: 870 - DNA, 23 bp, Homo sapiens
  source 1..23: mol_type = genomic DNA
aagatacacaaataaacttctag

SEQ ID NO: 871 - DNA, 23 bp, Homo sapiens
  source 1..23: mol_type = genomic DNA
aagatatctgaaaaactctcaaa

SEQ ID NO: 872 - DNA, 22 bp, Homo sapiens
  source 1..22: mol_type = genomic DNA
aagacactgaataacccacaga

SEQ ID NO: 873 - DNA, 22 bp, Homo sapiens
  source 1..22: mol_type = genomic DNA
tagatagcaaataaccctaggg

SEQ ID NO: 874 - DNA, 22 bp, Homo sapiens
  source 1..22: mol_type = genomic DNA
aatagacctaaataacctcaag

SEQ ID NO: 875 - DNA, 23 bp, Homo sapiens
  source 1..23: mol_type = genomic DNA
aagttacctgactaaccctgagg

SEQ ID NO: 876 - DNA, 23 bp, Homo sapiens
  source 1..23: mol_type = genomic DNA
aagatatctgaataactacaagg

SEQ ID NO: 877 - DNA, 23 bp, Homo sapiens
  source 1..23: mol_type = genomic DNA
aagatacttggataactctgcta

SEQ ID NO: 878 - DNA, 23 bp, Homo sapiens
  source 1..23: mol_type = genomic DNA
aagaggctggaataagccacggg

SEQ ID NO: 879 - DNA, 23 bp, Homo sapiens
  source 1..23: mol_type = genomic DNA
aagatacataaatatcactgcag

SEQ ID NO: 880 - DNA, 23 bp, Homo sapiens
  source 1..23: mol_type = genomic DNA
cactaacctgaatagccctaagg

SEQ ID NO: 881 - DNA, 23 bp, Homo sapiens
  source 1..23: mol_type = genomic DNA
aatatacctgaaaaaccatcagg

SEQ ID NO: 882 - DNA, 23 bp, Homo sapiens
  source 1..23: mol_type = genomic DNA
aaaatacctaaagaaatttcagg

SEQ ID NO: 883 - DNA, 23 bp, Homo sapiens
  source 1..23: mol_type = genomic DNA
cgtgtacctgaaaaagcctcagg

SEQ ID NO: 884 - DNA, 23 bp, Homo sapiens
  source 1..23: mol_type = genomic DNA
gtgaggcctgaagaacactctgg

SEQ ID NO: 885 - DNA, 22 bp, Homo sapiens
  source 1..22: mol_type = genomic DNA
aagttactgaatatccctccag

SEQ ID NO: 886 - DNA, 23 bp, Homo sapiens
  source 1..23: mol_type = genomic DNA
aagaaaccggaatgagcccccag

SEQ ID NO: 887 - DNA, 23 bp, Homo sapiens
  source 1..23: mol_type = genomic DNA
cagataccagaagcaccctcgag

SEQ ID NO: 888 - DNA, 24 bp, Homo sapiens
  source 1..24: mol_type = genomic DNA
tagataactgaaatatccctctgg

SEQ ID NO: 889 - DNA, 23 bp, Homo sapiens
  source 1..23: mol_type = genomic DNA
gagatacccaaataaacctcaaa

SEQ ID NO: 890 - DNA, 22 bp, Homo sapiens
  source 1..22: mol_type = genomic DNA
aagatactgaataaagctctta

SEQ ID NO: 891 - DNA, 23 bp, Homo sapiens
  source 1..23: mol_type = genomic DNA
aagataactgaagaaactgaagg

SEQ ID NO: 892 - DNA, 23 bp, Homo sapiens
  source 1..23: mol_type = genomic DNA
aagataccagggtaactctatga

SEQ ID NO: 893 - DNA, 23 bp, Homo sapiens
  source 1..23: mol_type = genomic DNA
aagatacctgaatatccaaccta

SEQ ID NO: 894 - DNA, 23 bp, Homo sapiens
  source 1..23: mol_type = genomic DNA
aagctgactgaagagcccttggg

SEQ ID NO: 895 - DNA, 23 bp, Homo sapiens
  source 1..23: mol_type = genomic DNA
agtatttctgacaaaccctcagg

SEQ ID NO: 896 - DNA, 22 bp, Homo sapiens
  source 1..22: mol_type = genomic DNA
gagatagctaataaccccctgg

SEQ ID NO: 897 - DNA, 23 bp, Homo sapiens
  source 1..23: mol_type = genomic DNA
aagacaactgaaaaacgctgtgg

SEQ ID NO: 898 - DNA, 23 bp, Homo sapiens
  source 1..23: mol_type = genomic DNA
aagacacctgaataatctctgga

SEQ ID NO: 899 - DNA, 23 bp, Homo sapiens
  source 1..23: mol_type = genomic DNA
atgataagtgaataagtctcatg

SEQ ID NO: 900 - DNA, 23 bp, Homo sapiens
  source 1..23: mol_type = genomic DNA
aggatatatgaaaaagcctgcgg

SEQ ID NO: 901 - DNA, 22 bp, Homo sapiens
  source 1..22: mol_type = genomic DNA
aagataccctaaaagcctttgg

SEQ ID NO: 902 - DNA, 23 bp, Homo sapiens
  source 1..23: mol_type = genomic DNA
aagatgcatgaataacctctgga

SEQ ID NO: 903 - DNA, 23 bp, Homo sapiens
  source 1..23: mol_type = genomic DNA
atgacaccagaaagaccctaagg

SEQ ID NO: 904 - DNA, 22 bp, Homo sapiens
  source 1..22: mol_type = genomic DNA
aaaatactaaataaccccatgg

SEQ ID NO: 905 - DNA, 23 bp, Homo sapiens
  source 1..23: mol_type = genomic DNA
cagattcctggaagaccctcaag

SEQ ID NO: 906 - DNA, 23 bp, Homo sapiens
  source 1..23: mol_type = genomic DNA
aagagacctcaaggtctctctgg

SEQ ID NO: 907 - DNA, 23 bp, Homo sapiens
  source 1..23: mol_type = genomic DNA
aagactaaagaataaccctctgg

SEQ ID NO: 908 - DNA, 23 bp, Homo sapiens
  source 1..23: mol_type = genomic DNA
aatatgcctacattacactcagg

SEQ ID NO: 909 - DNA, 22 bp, Homo sapiens
  source 1..22: mol_type = genomic DNA
aagacactgaataacccttggc

SEQ ID NO: 910 - DNA, 22 bp, Homo sapiens
  source 1..22: mol_type = genomic DNA
aagatagtgagtaagtctcagg

SEQ ID NO: 911 - DNA, 21 bp, Homo sapiens
  source 1..21: mol_type = genomic DNA
tagataagaatagccctcagg

SEQ ID NO: 912 - DNA, 23 bp, Homo sapiens
  source 1..23: mol_type = genomic DNA
tctatacctcaataacctcctgg

SEQ ID NO: 913 - DNA, 23 bp, Homo sapiens
  source 1..23: mol_type = genomic DNA
aagatacctaagtgctccacagg

SEQ ID NO: 914 - DNA, 24 bp, Homo sapiens
  source 1..24: mol_type = genomic DNA
aagaaacctacaataaccttcatg

SEQ ID NO: 915 - DNA, 23 bp, Homo sapiens
  source 1..23: mol_type = genomic DNA
ccgatatcagaatatcccttagg

SEQ ID NO: 916 - DNA, 23 bp, Homo sapiens
  source 1..23: mol_type = genomic DNA
aagatgcatgaaaaagcttcagt

SEQ ID NO: 917 - DNA, 23 bp, Homo sapiens
  source 1..23: mol_type = genomic DNA
tagatatctgcagaactctccgc

SEQ ID NO: 918 - DNA, 23 bp, Homo sapiens
  source 1..23: mol_type = genomic DNA
aacatacatcaataactttcttg

SEQ ID NO: 919 - DNA, 23 bp, Homo sapiens
  source 1..23: mol_type = genomic DNA
aagatacttgaataccaatcaag

SEQ ID NO: 920 - DNA, 22 bp, Homo sapiens
  source 1..22: mol_type = genomic DNA
taaagacctgaataacctcaag

SEQ ID NO: 921 - DNA, 22 bp, Homo sapiens
  source 1..22: mol_type = genomic DNA
aagatattgaatatacctcagg

SEQ ID NO: 922 - DNA, 23 bp, Homo sapiens
  source 1..23: mol_type = genomic DNA
tagttacctgaatacacctctgg

SEQ ID NO: 923 - DNA, 23 bp, Homo sapiens
  source 1..23: mol_type = genomic DNA
tatatacctggaaaaccctaaag

SEQ ID NO: 924 - DNA, 22 bp, Homo sapiens
  source 1..22: mol_type = genomic DNA
tagatacataataaccaactgg

SEQ ID NO: 925 - DNA, 21 bp, Homo sapiens
  source 1..21: mol_type = genomic DNA
gagatacttgaatccctcagg

SEQ ID NO: 926 - DNA, 23 bp, Homo sapiens
  source 1..23: mol_type = genomic DNA
aagatacctgtatgacactgtgt

SEQ ID NO: 927 - DNA, 23 bp, Homo sapiens
  source 1..23: mol_type = genomic DNA
aagatacctaaataacaagctgg

SEQ ID NO: 928 - DNA, 23 bp, Homo sapiens
  source 1..23: mol_type = genomic DNA
aggatacatgcataacccatgag

SEQ ID NO: 929 - DNA, 22 bp, Homo sapiens
  source 1..22: mol_type = genomic DNA
aagatccagaataattctctgg

SEQ ID NO: 930 - DNA, 23 bp, Homo sapiens
  source 1..23: mol_type = genomic DNA
aagatacatgaaaaattctctca

SEQ ID NO: 931 - DNA, 23 bp, Homo sapiens
  source 1..23: mol_type = genomic DNA
aatataccctaataagccttctg

SEQ ID NO: 932 - DNA, 25 bp, Homo sapiens
  source 1..25: mol_type = genomic DNA
aagatggctgaatagaaccttccag

SEQ ID NO: 933 - DNA, 23 bp, Homo sapiens
  source 1..23: mol_type = genomic DNA
aatataccttattatccttcaga

SEQ ID NO: 934 - DNA, 23 bp, Homo sapiens
  source 1..23: mol_type = genomic DNA
cagatacaagagtactcctcagg

SEQ ID NO: 935 - DNA, 23 bp, Homo sapiens
  source 1..23: mol_type = genomic DNA
tctatacctaaataaacctaagg

SEQ ID NO: 936 - DNA, 23 bp, Homo sapiens
  source 1..23: mol_type = genomic DNA
tagatacctcaataattctctct

SEQ ID NO: 937 - DNA, 23 bp, Homo sapiens
  source 1..23: mol_type = genomic DNA
aaataacataaataaccctcaga

SEQ ID NO: 938 - DNA, 22 bp, Homo sapiens
  source 1..22: mol_type = genomic DNA
cagaagctggatagccctcggg

SEQ ID NO: 939 - DNA, 22 bp, Homo sapiens
  source 1..22: mol_type = genomic DNA
aagaacatgagtaaccctaagg

SEQ ID NO: 940 - DNA, 23 bp, Homo sapiens
  source 1..23: mol_type = genomic DNA
aagatacttgaaaaacaccaggt

SEQ ID NO: 941 - DNA, 22 bp, Homo sapiens
  source 1..22: mol_type = genomic DNA
aagagaactgaaaagcctcaag

SEQ ID NO: 942 - DNA, 22 bp, Homo sapiens
  source 1..22: mol_type = genomic DNA
aagataccaaataactctctgg

SEQ ID NO: 943 - DNA, 21 bp, Homo sapiens
  source 1..21: mol_type = genomic DNA
aatatgcctgtaaccctcaag

SEQ ID NO: 944 - DNA, 23 bp, Homo sapiens
  source 1..23: mol_type = genomic DNA
aagctgactgaagagcccttagg

SEQ ID NO: 945 - DNA, 23 bp, Homo sapiens
  source 1..23: mol_type = genomic DNA
aaaattcatgaagaaccctgggt

SEQ ID NO: 946 - DNA, 23 bp, Homo sapiens
  source 1..23: mol_type = genomic DNA
aagatacgtgaataactcaggat

SEQ ID NO: 947 - DNA, 23 bp, Homo sapiens
  source 1..23: mol_type = genomic DNA
aagatatctgaacaattctaagg

SEQ ID NO: 948 - DNA, 23 bp, Homo sapiens
  source 1..23: mol_type = genomic DNA
aagatacttgaatcactgtcagt

SEQ ID NO: 949 - DNA, 22 bp, Homo sapiens
  source 1..22: mol_type = genomic DNA
aagatcctgaataattctctgg

SEQ ID NO: 950 - DNA, 23 bp, Homo sapiens
  source 1..23: mol_type = genomic DNA
aagaagcctggatagaactctgg

SEQ ID NO: 951 - DNA, 23 bp, Homo sapiens
  source 1..23: mol_type = genomic DNA
ttgatacctgaataacactccag

SEQ ID NO: 952 - DNA, 23 bp, Homo sapiens
  source 1..23: mol_type = genomic DNA
aaaaaaaatgaattaccctcatg

SEQ ID NO: 953 - DNA, 22 bp, Homo sapiens
  source 1..22: mol_type = genomic DNA
gagatccagaattacccttggg

SEQ ID NO: 954 - DNA, 23 bp, Homo sapiens
  source 1..23: mol_type = genomic DNA
aacatacctaaataactcctggc

SEQ ID NO: 955 - DNA, 22 bp, Homo sapiens
  source 1..22: mol_type = genomic DNA
aatctacctgatgaccctcggc

SEQ ID NO: 956 - DNA, 25 bp, Homo sapiens
  source 1..25: mol_type = genomic DNA
aagttaactgtaaaacagcctcagg

SEQ ID NO: 957 - DNA, 22 bp, Homo sapiens
  source 1..22: mol_type = genomic DNA
aagaaatctgaaagccctgggg

SEQ ID NO: 958 - DNA, 23 bp, Homo sapiens
  source 1..23: mol_type = genomic DNA
gagatacctgcataacacttaat

SEQ ID NO: 959 - DNA, 23 bp, Homo sapiens
  source 1..23: mol_type = genomic DNA
cagataactgaacaaccagatgg

SEQ ID NO: 960 - DNA, 23 bp, Homo sapiens
  source 1..23: mol_type = genomic DNA
aacttaggtgattaaccctcacg

SEQ ID NO: 961 - DNA, 22 bp, Homo sapiens
  source 1..22: mol_type = genomic DNA
atgatactgaataagtctcagg

SEQ ID NO: 962 - DNA, 22 bp, Homo sapiens
  source 1..22: mol_type = genomic DNA
agaatacctagtgaccctcagg

SEQ ID NO: 963 - DNA, 23 bp, Homo sapiens
  source 1..23: mol_type = genomic DNA
aacagaccttcatagccctcaga

SEQ ID NO: 964 - DNA, 22 bp, Homo sapiens
  source 1..22: mol_type = genomic DNA
tatatacctaaataacctaggg

SEQ ID NO: 965 - DNA, 23 bp, Homo sapiens
  source 1..23: mol_type = genomic DNA
aagatctctgaaatgccctgagg

SEQ ID NO: 966 - DNA, 23 bp, Homo sapiens
  source 1..23: mol_type = genomic DNA
aacttaacataataaccttcagg

SEQ ID NO: 967 - DNA, 22 bp, Homo sapiens
  source 1..22: mol_type = genomic DNA
atgatagtgaataatcctcatg

SEQ ID NO: 968 - DNA, 23 bp, Homo sapiens
  source 1..23: mol_type = genomic DNA
aagatacgagaataacctcaaga

SEQ ID NO: 969 - DNA, 23 bp, Homo sapiens
  source 1..23: mol_type = genomic DNA
aaactacctggatgaccctctga

SEQ ID NO: 970 - DNA, 22 bp, Homo sapiens
  source 1..22: mol_type = genomic DNA
aagaagatgaattactctctgg

SEQ ID NO: 971 - DNA, 22 bp, Homo sapiens
  source 1..22: mol_type = genomic DNA
aagatacagagtaactcttggg

SEQ ID NO: 972 - DNA, 23 bp, Homo sapiens
  source 1..23: mol_type = genomic DNA
gagatagctgaataatccctcag

SEQ ID NO: 973 - DNA, 23 bp, Homo sapiens
  source 1..23: mol_type = genomic DNA
aagatacatcagtaagccacagt

SEQ ID NO: 974 - DNA, 23 bp, Homo sapiens
  source 1..23: mol_type = genomic DNA
aaaatacattaataaaactaagg

SEQ ID NO: 975 - DNA, 23 bp, Homo sapiens
  source 1..23: mol_type = genomic DNA
agtagaggtgaataaccctcagc

SEQ ID NO: 976 - DNA, 23 bp, Homo sapiens
  source 1..23: mol_type = genomic DNA
cagatacttaaataaccataagg

SEQ ID NO: 977 - DNA, 22 bp, Homo sapiens
  source 1..22: mol_type = genomic DNA
aagaacctgacaagccctcaga

SEQ ID NO: 978 - DNA, 23 bp, Homo sapiens
  source 1..23: mol_type = genomic DNA
aagatccatcaataaaccacgtg

SEQ ID NO: 979 - DNA, 23 bp, Homo sapiens
  source 1..23: mol_type = genomic DNA
aagatacttttaaaacccagtgg

SEQ ID NO: 980 - DNA, 22 bp, Homo sapiens
  source 1..22: mol_type = genomic DNA
aagatcctgaattactctcaag

SEQ ID NO: 981 - DNA, 23 bp, Homo sapiens
  source 1..23: mol_type = genomic DNA
aagatacctgaacaactccacac

SEQ ID NO: 982 - DNA, 23 bp, Homo sapiens
  source 1..23: mol_type = genomic DNA
aagctgactgaagagccctaggg

SEQ ID NO: 983 - DNA, 23 bp, Homo sapiens
  source 1..23: mol_type = genomic DNA
ttgatacctgtattacactcatg

SEQ ID NO: 984 - DNA, 24 bp, Homo sapiens
  source 1..24: mol_type = genomic DNA
aagatacagagaataaccctcaca

SEQ ID NO: 985 - DNA, 23 bp, Homo sapiens
  source 1..23: mol_type = genomic DNA
aaaatacctcactagctctccag

SEQ ID NO: 986 - DNA, 23 bp, Homo sapiens
  source 1..23: mol_type = genomic DNA
aaaataattgaaaaactctctgt

SEQ ID NO: 987 - DNA, 23 bp, Homo sapiens
  source 1..23: mol_type = genomic DNA
ataagaacagaataaccttctgg

SEQ ID NO: 988 - DNA, 23 bp, Homo sapiens
  source 1..23: mol_type = genomic DNA
aagagtcatgcatagccctccag

SEQ ID NO: 989 - DNA, 22 bp, Homo sapiens
  source 1..22: mol_type = genomic DNA
aagatactgaataaactcctgc

SEQ ID NO: 990 - DNA, 23 bp, Homo sapiens
  source 1..23: mol_type = genomic DNA
aagaaacacaaataaccatcaga

SEQ ID NO: 991 - DNA, 22 bp, Homo sapiens
  source 1..22: mol_type = genomic DNA
gagatgctgaataactctctgg

SEQ ID NO: 992 - DNA, 22 bp, Homo sapiens
  source 1..22: mol_type = genomic DNA
aagatactgagtatctcacagg

SEQ ID NO: 993 - DNA, 25 bp, Homo sapiens
  source 1..25: mol_type = genomic DNA
aagacaccaagatagcaccctcggg

SEQ ID NO: 994 - DNA, 22 bp, Homo sapiens
  source 1..22: mol_type = genomic DNA
agtataccttaataccccctgg

SEQ ID NO: 995 - DNA, 22 bp, Homo sapiens
  source 1..22: mol_type = genomic DNA
attatacctaataaccctatgg

SEQ ID NO: 996 - DNA, 23 bp, Homo sapiens
  source 1..23: mol_type = genomic DNA
aatatagcccaatatccctcatg

SEQ ID NO: 997 - DNA, 23 bp, Homo sapiens
  source 1..23: mol_type = genomic DNA
cagatacctgaatgatccttttc

SEQ ID NO: 998 - DNA, 23 bp, Homo sapiens
  source 1..23: mol_type = genomic DNA
aagaaagctgagtagtcctcaga

SEQ ID NO: 999 - DNA, 23 bp, Homo sapiens
  source 1..23: mol_type = genomic DNA
aagggacaggaagaaccctgagg

SEQ ID NO: 1000 - DNA, 23 bp, Homo sapiens
  source 1..23: mol_type = genomic DNA
aagatagctgtataacctttatc

SEQ ID NO: 1001 - DNA, 24 bp, Homo sapiens
  source 1..24: mol_type = genomic DNA
aagttagcggaactcaccctcagg

SEQ ID NO: 1002 - DNA, 23 bp, Homo sapiens
  source 1..23: mol_type = genomic DNA
aagagagctagctagccctctgg

SEQ ID NO: 1003 - DNA, 23 bp, Homo sapiens
  source 1..23: mol_type = genomic DNA
aggatttctggataacactttgg

SEQ ID NO: 1004 - DNA, 23 bp, Homo sapiens
  source 1..23: mol_type = genomic DNA
gaagtacctgaaaaaccctctgc

SEQ ID NO: 1005 - DNA, 23 bp, Homo sapiens
  source 1..23: mol_type = genomic DNA
gaggtacttgaatcaccatcaag

SEQ ID NO: 1006 - DNA, 23 bp, Homo sapiens
  source 1..23: mol_type = genomic DNA
tagcttactgaataaccctaagg

SEQ ID NO: 1007 - DNA, 23 bp, Homo sapiens
  source 1..23: mol_type = genomic DNA
aagaggcatgaataaccctgttc

SEQ ID NO: 1008 - DNA, 21 bp, Homo sapiens
  source 1..21: mol_type = genomic DNA
cagttacgaataaccctcaga

SEQ ID NO: 1009 - DNA, 22 bp, Homo sapiens
  source 1..22: mol_type = genomic DNA
aagatactgaaaaaccctctga

SEQ ID NO: 1010 - DNA, 23 bp, Homo sapiens
  source 1..23: mol_type = genomic DNA
aacagacatgaagaaggctcagg

SEQ ID NO: 1011 - DNA, 23 bp, Homo sapiens
  source 1..23: mol_type = genomic DNA
accatacctgaaggaccatcttg

SEQ ID NO: 1012 - DNA, 22 bp, Homo sapiens
  source 1..22: mol_type = genomic DNA
aagagaccttaaaactctctgt

SEQ ID NO: 1013 - DNA, 23 bp, Homo sapiens
  source 1..23: mol_type = genomic DNA
acaagaccaaaataacccacagg

SEQ ID NO: 1014 - DNA, 23 bp, Homo sapiens
  source 1..23: mol_type = genomic DNA
acgatggcagaacaaacctcagg

SEQ ID NO: 1015 - DNA, 23 bp, Homo sapiens
  source 1..23: mol_type = genomic DNA
aagatacctcaaacaccagccgt

SEQ ID NO: 1016 - DNA, 23 bp, Homo sapiens
  source 1..23: mol_type = genomic DNA
aagacacctaaatatccctggga

SEQ ID NO: 1017 - DNA, 22 bp, Homo sapiens
  source 1..22: mol_type = genomic DNA
aagatactgactaatcatctgc

SEQ ID NO: 1018 - DNA, 23 bp, Homo sapiens
  source 1..23: mol_type = genomic DNA
tagacacctgagtcaccctctta

SEQ ID NO: 1019 - DNA, 22 bp, Homo sapiens
  source 1..22: mol_type = genomic DNA
gtgataccagattaacctctgg

SEQ ID NO: 1020 - DNA, 23 bp, Homo sapiens
  source 1..23: mol_type = genomic DNA
agagtaactgaataaccctacag

SEQ ID NO: 1021 - DNA, 23 bp, Homo sapiens
  source 1..23: mol_type = genomic DNA
tttgtaccagaataaccctcctg

SEQ ID NO: 1022 - DNA, 23 bp, Homo sapiens
  source 1..23: mol_type = genomic DNA
aaattaactgcataaccctgggt

SEQ ID NO: 1023 - DNA, 23 bp, Homo sapiens
  source 1..23: mol_type = genomic DNA
aaaaaacttgaattaccttctag

SEQ ID NO: 1024 - DNA, 23 bp, Homo sapiens
  source 1..23: mol_type = genomic DNA
ctgaaacctaaataatcccccgg

SEQ ID NO: 1025 - DNA, 23 bp, Homo sapiens
  source 1..23: mol_type = genomic DNA
aagacccaggaatcacactctgg

SEQ ID NO: 1026 - DNA, 22 bp, Homo sapiens
  source 1..22: mol_type = genomic DNA
agaagacctgaatacccccagg

SEQ ID NO: 1027 - DNA, 23 bp, Homo sapiens
  source 1..23: mol_type = genomic DNA
caaatacctaaagaactctcctg

SEQ ID NO: 1028 - DNA, 22 bp, Homo sapiens
  source 1..22: mol_type = genomic DNA
cctatacctaataaccttcagg

SEQ ID NO: 1029 - DNA, 23 bp, Homo sapiens
  source 1..23: mol_type = genomic DNA
aagatacctggaaaactcccaaa

SEQ ID NO: 1030 - DNA, 22 bp, Homo sapiens
  source 1..22: mol_type = genomic DNA
tagacacctaataatccccagg

SEQ ID NO: 1031 - DNA, 23 bp, Homo sapiens
  source 1..23: mol_type = genomic DNA
gtgatacctgtcagaccctcggg

SEQ ID NO: 1032 - DNA, 23 bp, Homo sapiens
  source 1..23: mol_type = genomic DNA
aagataccagaattcccctcttc

SEQ ID NO: 1033 - DNA, 23 bp, Homo sapiens
  source 1..23: mol_type = genomic DNA
aagatggctgagaaaaactcagg

SEQ ID NO: 1034 - DNA, 23 bp, Homo sapiens
  source 1..23: mol_type = genomic DNA
cgtgtaccagaatcaccctcagg

SEQ ID NO: 1035 - DNA, 22 bp, Homo sapiens
  source 1..22: mol_type = genomic DNA
aagaacttgtagaaccatcagg

SEQ ID NO: 1036 - DNA, 23 bp, Homo sapiens
  source 1..23: mol_type = genomic DNA
aagataccccatcacccctcccg

SEQ ID NO: 1037 - DNA, 24 bp, Homo sapiens
  source 1..24: mol_type = genomic DNA
aagatcagcagaagaaccttctgg

SEQ ID NO: 1038 - DNA, 23 bp, Homo sapiens
  source 1..23: mol_type = genomic DNA
agtatacctaaacaaacctcaga

SEQ ID NO: 1039 - DNA, 22 bp, Homo sapiens
  source 1..22: mol_type = genomic DNA
aagatcctgcatacccttctgt

SEQ ID NO: 1040 - DNA, 22 bp, Homo sapiens
  source 1..22: mol_type = genomic DNA
aagatccagattaaccctctag

SEQ ID NO: 1041 - DNA, 23 bp, Homo sapiens
  source 1..23: mol_type = genomic DNA
aacatccctgaagacccttgagg

SEQ ID NO: 1042 - DNA, 23 bp, Homo sapiens
  source 1..23: mol_type = genomic DNA
aagatacctgggtccccatttgg

SEQ ID NO: 1043 - DNA, 22 bp, Homo sapiens
  source 1..22: mol_type = genomic DNA
aagatccttaaataccctctgg

SEQ ID NO: 1044 - DNA, 23 bp, Homo sapiens
  source 1..23: mol_type = genomic DNA
aagataactaactcaccttcccg

SEQ ID NO: 1045 - DNA, 23 bp, Homo sapiens
  source 1..23: mol_type = genomic DNA
atgatatatgaacaaccctctgg

SEQ ID NO: 1046 - DNA, 23 bp, Homo sapiens
  source 1..23: mol_type = genomic DNA
aacatactcgaatacccctcaaa

SEQ ID NO: 1047 - DNA, 23 bp, Homo sapiens
  source 1..23: mol_type = genomic DNA
agcttacctgcttaaccctcagg

SEQ ID NO: 1048 - DNA, 23 bp, Homo sapiens
  source 1..23: mol_type = genomic DNA
aagataccaaaattccccaatgg

SEQ ID NO: 1049 - DNA, 23 bp, Homo sapiens
  source 1..23: mol_type = genomic DNA
acgatactggaataagcctttga

SEQ ID NO: 1050 - DNA, 22 bp, Homo sapiens
  source 1..22: mol_type = genomic DNA
cagtacctcaacaaccccctgg

SEQ ID NO: 1051 - DNA, 22 bp, Homo sapiens
  source 1..22: mol_type = genomic DNA
aatatcctgaataaacctctag

SEQ ID NO: 1052 - DNA, 23 bp, Homo sapiens
  source 1..23: mol_type = genomic DNA
aagacacctgataaaaactctgt

SEQ ID NO: 1053 - DNA, 22 bp, Homo sapiens
  source 1..22: mol_type = genomic DNA
aagatacagaataaacctaagg

SEQ ID NO: 1054 - DNA, 23 bp, Homo sapiens
  source 1..23: mol_type = genomic DNA
gagatacttgaacaactcactgg

SEQ ID NO: 1055 - DNA, 23 bp, Homo sapiens
  source 1..23: mol_type = genomic DNA
aagaaaccagagaaaccttcgag

SEQ ID NO: 1056 - DNA, 23 bp, Homo sapiens
  source 1..23: mol_type = genomic DNA
aaagtacctaaataaccaaccag

SEQ ID NO: 1057 - DNA, 22 bp, Homo sapiens
  source 1..22: mol_type = genomic DNA
aagaaggtgaataacacttagg

SEQ ID NO: 1058 - DNA, 23 bp, Homo sapiens
  source 1..23: mol_type = genomic DNA
aagatacctggctagccatatgc

SEQ ID NO: 1059 - DNA, 23 bp, Homo sapiens
  source 1..23: mol_type = genomic DNA
aagctaccagaggaacaatcagg

SEQ ID NO: 1060 - DNA, 22 bp, Homo sapiens
  source 1..22: mol_type = genomic DNA
catttactgaataaccctttgg

SEQ ID NO: 1061 - DNA, 23 bp, Homo sapiens
  source 1..23: mol_type = genomic DNA
gataaacatgaaggaccctcagg

SEQ ID NO: 1062 - DNA, 23 bp, Homo sapiens
  source 1..23: mol_type = genomic DNA
aacgtacctgaacaaccctcagg

SEQ ID NO: 1063 - DNA, 23 bp, Homo sapiens
  source 1..23: mol_type = genomic DNA
acactacctgaatgaccctcaag

SEQ ID NO: 1064 - DNA, 23 bp, Homo sapiens
  source 1..23: mol_type = genomic DNA
aatatacatgaaacacacttagg

SEQ ID NO: 1065 - DNA, 23 bp, Homo sapiens
  source 1..23: mol_type = genomic DNA
aagatacctaaatgtccatcaac

SEQ ID NO: 1066 - DNA, 21 bp, Homo sapiens
  source 1..21: mol_type = genomic DNA
cagatatgaataaacctctag

SEQ ID NO: 1067 - DNA, 23 bp, Homo sapiens
  source 1..23: mol_type = genomic DNA
aatagtactcaataaacctctgg

SEQ ID NO: 1068 - DNA, 23 bp, Homo sapiens
  source 1..23: mol_type = genomic DNA
agtatacatgaatagccctcagg

SEQ ID NO: 1069 - DNA, 23 bp, Homo sapiens
  source 1..23: mol_type = genomic DNA
ttgctacctgaataaccctcttg

SEQ ID NO: 1070 - DNA, 23 bp, Homo sapiens
  source 1..23: mol_type = genomic DNA
aagatatctgaggaagcgtcttg

SEQ ID NO: 1071 - DNA, 21 bp, Homo sapiens
  source 1..21: mol_type = genomic DNA
aagatacctgaaaccctctgg

SEQ ID NO: 1072 - DNA, 22 bp, Homo sapiens
  source 1..22: mol_type = genomic DNA
cagatattgaaaaaccctctgg

SEQ ID NO: 1073 - DNA, 23 bp, Homo sapiens
  source 1..23: mol_type = genomic DNA
aaggtatccaaataaccctttgg

SEQ ID NO: 1074 - DNA, 23 bp, Homo sapiens
  source 1..23: mol_type = genomic DNA
taaatacctgaacaactctaggg

SEQ ID NO: 1075 - DNA, 24 bp, Homo sapiens
  source 1..24: mol_type = genomic DNA
aagattacatgagtacccctcctg

SEQ ID NO: 1076 - DNA, 22 bp, Homo sapiens
  source 1..22: mol_type = genomic DNA
atgatagtgaataactctcttg

SEQ ID NO: 1077 - DNA, 23 bp, Homo sapiens
  source 1..23: mol_type = genomic DNA
aagatatctgaaaaatccacaaa

SEQ ID NO: 1078 - DNA, 22 bp, Homo sapiens
  source 1..22: mol_type = genomic DNA
aagatttcttataaccctctgg

SEQ ID NO: 1079 - DNA, 24 bp, Homo sapiens
  source 1..24: mol_type = genomic DNA
aagatactctgaataactttctgg

SEQ ID NO: 1080 - DNA, 23 bp, Homo sapiens
  source 1..23: mol_type = genomic DNA
aagtcatctgaataaccctcaag

SEQ ID NO: 1081 - DNA, 24 bp, Homo sapiens
  source 1..24: mol_type = genomic DNA
aagatacgtgcaataactatcaag

SEQ ID NO: 1082 - DNA, 23 bp, Homo sapiens
  source 1..23: mol_type = genomic DNA
aagatacattagtaacattttgg

SEQ ID NO: 1083 - DNA, 24 bp, Homo sapiens
  source 1..24: mol_type = genomic DNA
aagaaacacttaaaaaccatctgg

SEQ ID NO: 1084 - DNA, 23 bp, Homo sapiens
  source 1..23: mol_type = genomic DNA
tagatacctgtataaccaccacc

SEQ ID NO: 1085 - DNA, 23 bp, Homo sapiens
  source 1..23: mol_type = genomic DNA
aacttacctgaacatgcccctgg

SEQ ID NO: 1086 - DNA, 23 bp, Homo sapiens
  source 1..23: mol_type = genomic DNA
tagatacatggattaacttctgg

SEQ ID NO: 1087 - DNA, 23 bp, Homo sapiens
  source 1..23: mol_type = genomic DNA
aagacagcagtaaaacactctgg

SEQ ID NO: 1088 - DNA, 22 bp, Homo sapiens
  source 1..22: mol_type = genomic DNA
aagatctggaagaactctctgg

SEQ ID NO: 1089 - DNA, 23 bp, Homo sapiens
  source 1..23: mol_type = genomic DNA
aagaaaggtgagcaacactcggg

SEQ ID NO: 1090 - DNA, 23 bp, Homo sapiens
  source 1..23: mol_type = genomic DNA
aagatactttaaaaaacccctgc

SEQ ID NO: 1091 - DNA, 23 bp, Homo sapiens
  source 1..23: mol_type = genomic DNA
aatatacctagctaagcctcaga

SEQ ID NO: 1092 - DNA, 24 bp, Homo sapiens
  source 1..24: mol_type = genomic DNA
aagatagcctgagtcacactcttg

SEQ ID NO: 1093 - DNA, 23 bp, Homo sapiens
  source 1..23: mol_type = genomic DNA
aagaaaacagcgtaagcctcagg

SEQ ID NO: 1094 - DNA, 23 bp, Homo sapiens
  source 1..23: mol_type = genomic DNA
atgaaacctaaataagtctctgg

SEQ ID NO: 1095 - DNA, 23 bp, Homo sapiens
  source 1..23: mol_type = genomic DNA
tgtttacctgaataaccttcagg

SEQ ID NO: 1096 - DNA, 23 bp, Homo sapiens
  source 1..23: mol_type = genomic DNA
aagatatctgaaaagcccacttt

SEQ ID NO: 1097 - DNA, 23 bp, Homo sapiens
  source 1..23: mol_type = genomic DNA
tgtaaacctggataaccctctag

SEQ ID NO: 1098 - DNA, 22 bp, Homo sapiens
  source 1..22: mol_type = genomic DNA
aagtatcatgaataccctcagg

SEQ ID NO: 1099 - DNA, 22 bp, Homo sapiens
  source 1..22: mol_type = genomic DNA
aagatcctatataaccctctga

SEQ ID NO: 1100 - DNA, 23 bp, Homo sapiens
  source 1..23: mol_type = genomic DNA
aaaatacctgaataacctgggcc

SEQ ID NO: 1101 - DNA, 23 bp, Homo sapiens
  source 1..23: mol_type = genomic DNA
aagttaccagaacaacccttagg

SEQ ID NO: 1102 - DNA, 22 bp, Homo sapiens
  source 1..22: mol_type = genomic DNA
aagaatttgaataactctctag

SEQ ID NO: 1103 - DNA, 21 bp, Homo sapiens
  source 1..21: mol_type = genomic DNA
aggatacctgaatccctccag

SEQ ID NO: 1104 - DNA, 23 bp, Homo sapiens
  source 1..23: mol_type = genomic DNA
gagacacctgaataagtgtctgg

SEQ ID NO: 1105 - DNA, 22 bp, Homo sapiens
  source 1..22: mol_type = genomic DNA
aagctagtgaaaaaccatcagg

SEQ ID NO: 1106 - DNA, 23 bp, Homo sapiens
  source 1..23: mol_type = genomic DNA
aggatacttgaatatccctgcct

SEQ ID NO: 1107 - DNA, 22 bp, Homo sapiens
  source 1..22: mol_type = genomic DNA
cagatactgaaaaacactctgg

SEQ ID NO: 1108 - DNA, 23 bp, Homo sapiens
  source 1..23: mol_type = genomic DNA
aagaaatctggataacccccaat

SEQ ID NO: 1109 - DNA, 23 bp, Homo sapiens
  source 1..23: mol_type = genomic DNA
aacatacccaaaaaaacctctga

SEQ ID NO: 1110 - DNA, 23 bp, Homo sapiens
  source 1..23: mol_type = genomic DNA
aaaatatccaaataaccccctgg

SEQ ID NO: 1111 - DNA, 23 bp, Homo sapiens
  source 1..23: mol_type = genomic DNA
aagatatctgaataatcatcagg

SEQ ID NO: 1112 - DNA, 22 bp, Homo sapiens
  source 1..22: mol_type = genomic DNA
aagatactgagtaacactgaag

SEQ ID NO: 1113 - DNA, 21 bp, Homo sapiens
  source 1..21: mol_type = genomic DNA
aagttacctaaataactttgg

SEQ ID NO: 1114 - DNA, 23 bp, Homo sapiens
  source 1..23: mol_type = genomic DNA
accataattgattaactctctgg

SEQ ID NO: 1115 - DNA, 23 bp, Homo sapiens
  source 1..23: mol_type = genomic DNA
aagaaacctaagtaaacctctaa

SEQ ID NO: 1116 - DNA, 22 bp, Homo sapiens
  source 1..22: mol_type = genomic DNA
aagatacatcatcaccctcctg

SEQ ID NO: 1117 - DNA, 23 bp, Homo sapiens
  source 1..23: mol_type = genomic DNA
aagacacataaggaaccctcatg

SEQ ID NO: 1118 - DNA, 23 bp, Homo sapiens
  source 1..23: mol_type = genomic DNA
gagatacctgagctgccctcagc

SEQ ID NO: 1119 - DNA, 23 bp, Homo sapiens
  source 1..23: mol_type = genomic DNA
gagatacctaaataaccttccag

SEQ ID NO: 1120 - DNA, 21 bp, Homo sapiens
  source 1..21: mol_type = genomic DNA
aagatacgaataatcctccga

SEQ ID NO: 1121 - DNA, 23 bp, Homo sapiens
  source 1..23: mol_type = genomic DNA
attaaaccaaaataaccctcggg

SEQ ID NO: 1122 - DNA, 23 bp, Homo sapiens
  source 1..23: mol_type = genomic DNA
cacaaaccttaataaccctcaag

SEQ ID NO: 1123 - DNA, 23 bp, Homo sapiens
  source 1..23: mol_type = genomic DNA
aagataaaaaaatacccctaggg

SEQ ID NO: 1124 - DNA, 23 bp, Homo sapiens
  source 1..23: mol_type = genomic DNA
aagatatctgaaaaagtcttgag

SEQ ID NO: 1125 - DNA, 23 bp, Homo sapiens
  source 1..23: mol_type = genomic DNA
gagataactgaataaccatttgg

SEQ ID NO: 1126 - DNA, 23 bp, Homo sapiens
  source 1..23: mol_type = genomic DNA
aagatatctgtaaaacccttcag

SEQ ID NO: 1127 - DNA, 23 bp, Homo sapiens
  source 1..23: mol_type = genomic DNA
aacatacatgaaaaatcctcaac

SEQ ID NO: 1128 - DNA, 23 bp, Homo sapiens
  source 1..23: mol_type = genomic DNA
aaggtaactggatagccatctgc

SEQ ID NO: 1129 - DNA, 23 bp, Homo sapiens
  source 1..23: mol_type = genomic DNA
aagagacctgagtcaccctgtct

SEQ ID NO: 1130 - DNA, 23 bp, Homo sapiens
  source 1..23: mol_type = genomic DNA
aagataaatgaatttccttctgt

SEQ ID NO: 1131 - DNA, 23 bp, Homo sapiens
  source 1..23: mol_type = genomic DNA
aagatacgggaaatcccctttgg

SEQ ID NO: 1132 - DNA, 22 bp, Homo sapiens
  source 1..22: mol_type = genomic DNA
cagatatcagataaccctatgg

SEQ ID NO: 1133 - DNA, 23 bp, Homo sapiens
  source 1..23: mol_type = genomic DNA
cagatgcttgtaaaaccatcagg

SEQ ID NO: 1134 - DNA, 23 bp, Homo sapiens
  source 1..23: mol_type = genomic DNA
acagtagttgcataaccctctgg

SEQ ID NO: 1135 - DNA, 23 bp, Homo sapiens
  source 1..23: mol_type = genomic DNA
aagattcagcactaacccacagg

SEQ ID NO: 1136 - DNA, 22 bp, Homo sapiens
  source 1..22: mol_type = genomic DNA
gagatactgaattaccctctgg

SEQ ID NO: 1137 - DNA, 23 bp, Homo sapiens
  source 1..23: mol_type = genomic DNA
aagagacatgcataatcttcagg

SEQ ID NO: 1138 - DNA, 22 bp, Homo sapiens
  source 1..22: mol_type = genomic DNA
aagtaaactgaataccttctgg

SEQ ID NO: 1139 - DNA, 23 bp, Homo sapiens
  source 1..23: mol_type = genomic DNA
aagaaaccactataaccatcagt

SEQ ID NO: 1140 - DNA, 22 bp, Homo sapiens
  source 1..22: mol_type = genomic DNA
cagatactgtataaccctcaga

SEQ ID NO: 1141 - DNA, 23 bp, Homo sapiens
  source 1..23: mol_type = genomic DNA
aatgtaaatgtataaccctctgt

SEQ ID NO: 1142 - DNA, 23 bp, Homo sapiens
  source 1..23: mol_type = genomic DNA
aggataccataataaccagcatg

SEQ ID NO: 1143 - DNA, 23 bp, Homo sapiens
  source 1..23: mol_type = genomic DNA
gcaatacctgaataacccattgt

SEQ ID NO: 1144 - DNA, 23 bp, Homo sapiens
  source 1..23: mol_type = genomic DNA
aagataccagaccatctcccagg

SEQ ID NO: 1145 - DNA, 21 bp, Homo sapiens
  source 1..21: mol_type = genomic DNA
aagatctgaatagcaccctgg

SEQ ID NO: 1146 - DNA, 23 bp, Homo sapiens
  source 1..23: mol_type = genomic DNA
aagatcacaggacaaccctccgc

SEQ ID NO: 1147 - DNA, 22 bp, Homo sapiens
  source 1..22: mol_type = genomic DNA
aagattcatgataaccatcatg

SEQ ID NO: 1148 - DNA, 23 bp, Homo sapiens
  source 1..23: mol_type = genomic DNA
caggtacctggagaaccctagag

SEQ ID NO: 1149 - DNA, 23 bp, Homo sapiens
  source 1..23: mol_type = genomic DNA
aagatacctgaacaccctactgg

SEQ ID NO: 1150 - DNA, 22 bp, Homo sapiens
  source 1..22: mol_type = genomic DNA
tagctagctgataacactctgg

SEQ ID NO: 1151 - DNA, 22 bp, Homo sapiens
  source 1..22: mol_type = genomic DNA
attatactgaataaccttccag

SEQ ID NO: 1152 - DNA, 23 bp, Homo sapiens
  source 1..23: mol_type = genomic DNA
aagttacctgcatcaaactcatg

SEQ ID NO: 1153 - DNA, 22 bp, Homo sapiens
  source 1..22: mol_type = genomic DNA
aagatacagaataaccctctag

SEQ ID NO: 1154 - DNA, 23 bp, Homo sapiens
  source 1..23: mol_type = genomic DNA
gatatactctaataaccctcaag

SEQ ID NO: 1155 - DNA, 23 bp, Homo sapiens
  source 1..23: mol_type = genomic DNA
aagatacataaatcactttccag

SEQ ID NO: 1156 - DNA, 22 bp, Homo sapiens
  source 1..22: mol_type = genomic DNA
aaaatgcctaatagacctctgg

SEQ ID NO: 1157 - DNA, 23 bp, Homo sapiens
  source 1..23: mol_type = genomic DNA
aaaacacctgaaaaatcctccac

SEQ ID NO: 1158 - DNA, 24 bp, Homo sapiens
  source 1..24: mol_type = genomic DNA
aagaaacactgaatgtccctcttg

SEQ ID NO: 1159 - DNA, 23 bp, Homo sapiens
  source 1..23: mol_type = genomic DNA
gtgaaacctaaataaccctcaga

SEQ ID NO: 1160 - DNA, 23 bp, Homo sapiens
  source 1..23: mol_type = genomic DNA
aatataccagaatagttctcagt

SEQ ID NO: 1161 - DNA, 22 bp, Homo sapiens
  source 1..22: mol_type = genomic DNA
aagatactgaatattcctcagg

SEQ ID NO: 1162 - DNA, 23 bp, Homo sapiens
  source 1..23: mol_type = genomic DNA
gagatacttgaataaccatctca

SEQ ID NO: 1163 - DNA, 23 bp, Homo sapiens
  source 1..23: mol_type = genomic DNA
aaagtacattaaaaaccttctgg

SEQ ID NO: 1164 - DNA, 23 bp, Homo sapiens
  source 1..23: mol_type = genomic DNA
aagataattgaatagccatctta

SEQ ID NO: 1165 - DNA, 23 bp, Homo sapiens
  source 1..23: mol_type = genomic DNA
aacaaacccgtaaaaccctcacg

SEQ ID NO: 1166 - DNA, 23 bp, Homo sapiens
  source 1..23: mol_type = genomic DNA
aagatagttaaatatccccctgt

SEQ ID NO: 1167 - DNA, 22 bp, Homo sapiens
  source 1..22: mol_type = genomic DNA
aagataataaataaccctcaag

SEQ ID NO: 1168 - DNA, 22 bp, Homo sapiens
  source 1..22: mol_type = genomic DNA
aagctacttgataaccctatgg

SEQ ID NO: 1169 - DNA, 21 bp, Homo sapiens
  source 1..21: mol_type = genomic DNA
attatacctgaatccctcagg

SEQ ID NO: 1170 - DNA, 23 bp, Homo sapiens
  source 1..23: mol_type = genomic DNA
aagttatcctaataaccctatgg

SEQ ID NO: 1171 - DNA, 23 bp, Homo sapiens
  source 1..23: mol_type = genomic DNA
atgtttactgaatacccctctgg

SEQ ID NO: 1172 - DNA, 23 bp, Homo sapiens
  source 1..23: mol_type = genomic DNA
aagggacctgaaattccctgagg

SEQ ID NO: 1173 - DNA, 23 bp, Homo sapiens
  source 1..23: mol_type = genomic DNA
tagataacagaatgactcacagg

SEQ ID NO: 1174 - DNA, 22 bp, Homo sapiens
  source 1..22: mol_type = genomic DNA
aagattctgaatagaccccagg

SEQ ID NO: 1175 - DNA, 22 bp, Homo sapiens
  source 1..22: mol_type = genomic DNA
aacatacccaaatactctcagg

SEQ ID NO: 1176 - DNA, 23 bp, Homo sapiens
  source 1..23: mol_type = genomic DNA
aagatacctcaataagactcggg

SEQ ID NO: 1177 - DNA, 22 bp, Homo sapiens
  source 1..22: mol_type = genomic DNA
tagatactgaaaatctctcagg

SEQ ID NO: 1178 - DNA, 23 bp, Homo sapiens
  source 1..23: mol_type = genomic DNA
agaatacaagaataaccctgggg

SEQ ID NO: 1179 - DNA, 23 bp, Homo sapiens
  source 1..23: mol_type = genomic DNA
aagatacctgaaattcctgcaga

SEQ ID NO: 1180 - DNA, 22 bp, Homo sapiens
  source 1..22: mol_type = genomic DNA
ctggtacttaataaccctcagg

SEQ ID NO: 1181 - DNA, 23 bp, Homo sapiens
  source 1..23: mol_type = genomic DNA
gagatacctaacacacactctgg

SEQ ID NO: 1182 - DNA, 23 bp, Homo sapiens
  source 1..23: mol_type = genomic DNA
acaatacctgaaaaactcccttg

SEQ ID NO: 1183 - DNA, 22 bp, Homo sapiens
  source 1..22: mol_type = genomic DNA
cagatacattaaaaccctctgg

SEQ ID NO: 1184 - DNA, 23 bp, Homo sapiens
  source 1..23: mol_type = genomic DNA
cagaacccacaataagcctctgg

SEQ ID NO: 1185 - DNA, 22 bp, Homo sapiens
  source 1..22: mol_type = genomic DNA
aataacatgaataacactcaag

SEQ ID NO: 1186 - DNA, 22 bp, Homo sapiens
  source 1..22: mol_type = genomic DNA
aagtaacccaaataaccccagg

SEQ ID NO: 1187 - DNA, 22 bp, Homo sapiens
  source 1..22: mol_type = genomic DNA
aagatacagaatttccctttgg

SEQ ID NO: 1188 - DNA, 23 bp, Homo sapiens
  source 1..23: mol_type = genomic DNA
aaggtccctgagccaccctccag

SEQ ID NO: 1189 - DNA, 22 bp, Homo sapiens
  source 1..22: mol_type = genomic DNA
aagatctggaacaactctctgg

SEQ ID NO: 1190 - DNA, 23 bp, Homo sapiens
  source 1..23: mol_type = genomic DNA
aacactattgaataaccatctgg

SEQ ID NO: 1191 - DNA, 22 bp, Homo sapiens
  source 1..22: mol_type = genomic DNA
gggatacctgaatattctctgg

SEQ ID NO: 1192 - DNA, 23 bp, Homo sapiens
  source 1..23: mol_type = genomic DNA
aagatgcctgcacatccctcctt

SEQ ID NO: 1193 - DNA, 23 bp, Homo sapiens
  source 1..23: mol_type = genomic DNA
aagatacatgaattaccaaaaag

SEQ ID NO: 1194 - DNA, 23 bp, Homo sapiens
  source 1..23: mol_type = genomic DNA
aagatgcttgaagtagcttcagg

SEQ ID NO: 1195 - DNA, 24 bp, Homo sapiens
  source 1..24: mol_type = genomic DNA
tagatacctcttataaccctccag

SEQ ID NO: 1196 - DNA, 23 bp, Homo sapiens
  source 1..23: mol_type = genomic DNA
aagatacatcaataaacctgatt

SEQ ID NO: 1197 - DNA, 23 bp, Homo sapiens
  source 1..23: mol_type = genomic DNA
aagatagtcctataactctctgg

SEQ ID NO: 1198 - DNA, 23 bp, Homo sapiens
  source 1..23: mol_type = genomic DNA
aaaattagtggataaacctctgg

SEQ ID NO: 1199 - DNA, 22 bp, Homo sapiens
  source 1..22: mol_type = genomic DNA
aagatcctgaagaattctctga

SEQ ID NO: 1200 - DNA, 23 bp, Homo sapiens
  source 1..23: mol_type = genomic DNA
agaatacctgaacaacactctag

SEQ ID NO: 1201 - DNA, 21 bp, Homo sapiens
  source 1..21: mol_type = genomic DNA
attaaacctgaaaccctcagg

SEQ ID NO: 1202 - DNA, 22 bp, Homo sapiens
  source 1..22: mol_type = genomic DNA
aagatagctaaataacctctga

SEQ ID NO: 1203 - DNA, 23 bp, Homo sapiens
  source 1..23: mol_type = genomic DNA
gagacaactgattatccctcaag

SEQ ID NO: 1204 - DNA, 23 bp, Homo sapiens
  source 1..23: mol_type = genomic DNA
aatttaccagaatagccctctga

SEQ ID NO: 1205 - DNA, 23 bp, Homo sapiens
  source 1..23: mol_type = genomic DNA
aagatactgaaatacccctatgg

SEQ ID NO: 1206 - DNA, 23 bp, Homo sapiens
  source 1..23: mol_type = genomic DNA
aaggtaaatgagtaatcctttgg

SEQ ID NO: 1207 - DNA, 24 bp, Homo sapiens
  source 1..24: mol_type = genomic DNA
aagattacttgaagaagcctctga

SEQ ID NO: 1208 - DNA, 23 bp, Homo sapiens
  source 1..23: mol_type = genomic DNA
aaagtagctgaataaacctcaag

SEQ ID NO: 1209 - DNA, 23 bp, Homo sapiens
  source 1..23: mol_type = genomic DNA
aagataactgaaatgccttcgag

SEQ ID NO: 1210 - DNA, 23 bp, Homo sapiens
  source 1..23: mol_type = genomic DNA
actattcctgaataaccctttgg

SEQ ID NO: 1211 - DNA, 22 bp, Homo sapiens
  source 1..22: mol_type = genomic DNA
aacatcctgaatcaacctctgc

SEQ ID NO: 1212 - DNA, 22 bp, Homo sapiens
  source 1..22: mol_type = genomic DNA
gaaatactgagtacccctcagg

SEQ ID NO: 1213 - DNA, 22 bp, Homo sapiens
  source 1..22: mol_type = genomic DNA
tagatctagaataagcctctgg

SEQ ID NO: 1214 - DNA, 23 bp, Homo sapiens
  source 1..23: mol_type = genomic DNA
aagatacccaaataaccatcaga

SEQ ID NO: 1215 - DNA, 23 bp, Homo sapiens
  source 1..23: mol_type = genomic DNA
aagacagctaactaactctcggg

SEQ ID NO: 1216 - DNA, 23 bp, Homo sapiens
  source 1..23: mol_type = genomic DNA
aaagtagctgaacagccctcagg

SEQ ID NO: 1217 - DNA, 23 bp, Homo sapiens
  source 1..23: mol_type = genomic DNA
aagatacctcattaatcatcaca

SEQ ID NO: 1218 - DNA, 22 bp, Homo sapiens
  source 1..22: mol_type = genomic DNA
aagatatggaatcaacctcagg

SEQ ID NO: 1219 - DNA, 22 bp, Homo sapiens
  source 1..22: mol_type = genomic DNA
aagatacctaataaccacaggg

SEQ ID NO: 1220 - DNA, 23 bp, Homo sapiens
  source 1..23: mol_type = genomic DNA
acagcacctgaatcacactctgg

SEQ ID NO: 1221 - DNA, 23 bp, Homo sapiens
  source 1..23: mol_type = genomic DNA
aagatacaaaaacaaccgactgg

SEQ ID NO: 1222 - DNA, 22 bp, Homo sapiens
  source 1..22: mol_type = genomic DNA
aagatactcaataaacctcaag

SEQ ID NO: 1223 - DNA, 22 bp, Homo sapiens
  source 1..22: mol_type = genomic DNA
atgatagtgaataattctcagg

SEQ ID NO: 1224 - DNA, 23 bp, Homo sapiens
  source 1..23: mol_type = genomic DNA
aagacacataaaccactctcagg

SEQ ID NO: 1225 - DNA, 22 bp, Homo sapiens
  source 1..22: mol_type = genomic DNA
aagatactggataaccttccag

SEQ ID NO: 1226 - DNA, 22 bp, Homo sapiens
  source 1..22: mol_type = genomic DNA
atgataatgaataacccttggg

SEQ ID NO: 1227 - DNA, 22 bp, Homo sapiens
  source 1..22: mol_type = genomic DNA
aagacactgaaaaaccctcaag

SEQ ID NO: 1228 - DNA, 23 bp, Homo sapiens
  source 1..23: mol_type = genomic DNA
aagatagcagattagtcctcagt

SEQ ID NO: 1229 - DNA, 23 bp, Homo sapiens
  source 1..23: mol_type = genomic DNA
aagagatcgggataagcctttgg

SEQ ID NO: 1230 - DNA, 23 bp, Homo sapiens
  source 1..23: mol_type = genomic DNA
taagtacccaaataagcctctgg

SEQ ID NO: 1231 - DNA, 23 bp, Homo sapiens
  source 1..23: mol_type = genomic DNA
aagatatctgaatatggaccagg

SEQ ID NO: 1232 - DNA, 23 bp, Homo sapiens
  source 1..23: mol_type = genomic DNA
aagatagctaagaatccctccag

SEQ ID NO: 1233 - DNA, 22 bp, Homo sapiens
  source 1..22: mol_type = genomic DNA
tagttacaagaataaccccagg

SEQ ID NO: 1234 - DNA, 22 bp, Homo sapiens
  source 1..22: mol_type = genomic DNA
tagatacataatagccctttgg

SEQ ID NO: 1235 - DNA, 23 bp, Homo sapiens
  source 1..23: mol_type = genomic DNA
aagagccctgaataagctttagg

SEQ ID NO: 1236 - DNA, 22 bp, Homo sapiens
  source 1..22: mol_type = genomic DNA
aagatactgaataaacccgaag

SEQ ID NO: 1237 - DNA, 23 bp, Homo sapiens
  source 1..23: mol_type = genomic DNA
aagatatctggataatccccaaa

SEQ ID NO: 1238 - DNA, 24 bp, Homo sapiens
  source 1..24: mol_type = genomic DNA
aatataccttgaatacccctccct

SEQ ID NO: 1239 - DNA, 23 bp, Homo sapiens
  source 1..23: mol_type = genomic DNA
gggataccttaacaaccctgtgg

SEQ ID NO: 1240 - DNA, 23 bp, Homo sapiens
  source 1..23: mol_type = genomic DNA
aaaatacctgacagaaccactgg

SEQ ID NO: 1241 - DNA, 23 bp, Homo sapiens
  source 1..23: mol_type = genomic DNA
aaaatacctgagtgaccctagaa

SEQ ID NO: 1242 - DNA, 23 bp, Homo sapiens
  source 1..23: mol_type = genomic DNA
aagatttgtgaatgaccctaatg

SEQ ID NO: 1243 - DNA, 22 bp, Homo sapiens
  source 1..22: mol_type = genomic DNA
aagataccagtatactctctgg

SEQ ID NO: 1244 - DNA, 23 bp, Homo sapiens
  source 1..23: mol_type = genomic DNA
aagatccctgaacaacaccaaag

SEQ ID NO: 1245 - DNA, 23 bp, Homo sapiens
  source 1..23: mol_type = genomic DNA
aagataccagtcccaccctcttg

SEQ ID NO: 1246 - DNA, 24 bp, Homo sapiens
  source 1..24: mol_type = genomic DNA
tagatactctcaatgaccctctga

SEQ ID NO: 1247 - DNA, 23 bp, Homo sapiens
  source 1..23: mol_type = genomic DNA
aagttacttaaatagctctctgc

SEQ ID NO: 1248 - DNA, 23 bp, Homo sapiens
  source 1..23: mol_type = genomic DNA
aagatgcttgaatttccctaatg

SEQ ID NO: 1249 - DNA, 23 bp, Homo sapiens
  source 1..23: mol_type = genomic DNA
aagagatctggatcacccccagc

SEQ ID NO: 1250 - DNA, 23 bp, Homo sapiens
  source 1..23: mol_type = genomic DNA
aagatatttgaatattccctagg

SEQ ID NO: 1251 - DNA, 23 bp, Homo sapiens
  source 1..23: mol_type = genomic DNA
taattaccagaataaccctatga

SEQ ID NO: 1252 - DNA, 22 bp, Homo sapiens
  source 1..22: mol_type = genomic DNA
aagatacctgaaatacctgggt

SEQ ID NO: 1253 - DNA, 23 bp, Homo sapiens
  source 1..23: mol_type = genomic DNA
aaggtacctgagtaaacattctg

SEQ ID NO: 1254 - DNA, 22 bp, Homo sapiens
  source 1..22: mol_type = genomic DNA
aagatacatgaatgaattcagg

SEQ ID NO: 1255 - DNA, 22 bp, Homo sapiens
  source 1..22: mol_type = genomic DNA
cagatacctaagaaccctgacg

SEQ ID NO: 1256 - DNA, 23 bp, Homo sapiens
  source 1..23: mol_type = genomic DNA
agtataacagaataaccctatgt

SEQ ID NO: 1257 - DNA, 23 bp, Homo sapiens
  source 1..23: mol_type = genomic DNA
aacatatctgaatatctctctaa

SEQ ID NO: 1258 - DNA, 22 bp, Homo sapiens
  source 1..22: mol_type = genomic DNA
aagatcctgcctcaacctctgg

SEQ ID NO: 1259 - DNA, 23 bp, Homo sapiens
  source 1..23: mol_type = genomic DNA
aagataccaagctaatcctctgc

SEQ ID NO: 1260 - DNA, 23 bp, Homo sapiens
  source 1..23: mol_type = genomic DNA
gagatttctgaataacccaccct

SEQ ID NO: 1261 - DNA, 23 bp, Homo sapiens
  source 1..23: mol_type = genomic DNA
gagaggcctgagtagcccacggg

SEQ ID NO: 1262 - DNA, 23 bp, Homo sapiens
  source 1..23: mol_type = genomic DNA
aaggaaactggagaactctccgg

SEQ ID NO: 1263 - DNA, 23 bp, Homo sapiens
  source 1..23: mol_type = genomic DNA
aagatacttgaataaccatttca

SEQ ID NO: 1264 - DNA, 23 bp, Homo sapiens
  source 1..23: mol_type = genomic DNA
tgcttacatgaataaccctccag

SEQ ID NO: 1265 - DNA, 23 bp, Homo sapiens
  source 1..23: mol_type = genomic DNA
tctgtacctggataaccccctgg

SEQ ID NO: 1266 - DNA, 23 bp, Homo sapiens
  source 1..23: mol_type = genomic DNA
aaggtaactgacaaaccatctga

SEQ ID NO: 1267 - DNA, 23 bp, Homo sapiens
  source 1..23: mol_type = genomic DNA
aaaataaatgaataaaactgtgg

SEQ ID NO: 1268 - DNA, 23 bp, Homo sapiens
  source 1..23: mol_type = genomic DNA
aagtcaccagtttaacactcagg

SEQ ID NO: 1269 - DNA, 25 bp, Homo sapiens
  source 1..25: mol_type = genomic DNA
aagataccagaataaatcattctag

SEQ ID NO: 1270 - DNA, 23 bp, Homo sapiens
  source 1..23: mol_type = genomic DNA
taaatacatgaataaccattagg

SEQ ID NO: 1271 - DNA, 23 bp, Homo sapiens
  source 1..23: mol_type = genomic DNA
aaaagccctgatcaaacctcagg

SEQ ID NO: 1272 - DNA, 22 bp, Homo sapiens
  source 1..22: mol_type = genomic DNA
cacttacctgtataacctcagg

SEQ ID NO: 1273 - DNA, 23 bp, Homo sapiens
  source 1..23: mol_type = genomic DNA
aagatacttgcagaaccatctga

SEQ ID NO: 1274 - DNA, 21 bp, Homo sapiens
  source 1..21: mol_type = genomic DNA
aagatctgaatttccatcagg

SEQ ID NO: 1275 - DNA, 24 bp, Homo sapiens
  source 1..24: mol_type = genomic DNA
aagatatacatactaaccctctgg

SEQ ID NO: 1276 - DNA, 22 bp, Homo sapiens
  source 1..22: mol_type = genomic DNA
gagtaccataataaacctcagg

SEQ ID NO: 1277 - DNA, 23 bp, Homo sapiens
  source 1..23: mol_type = genomic DNA
aaagaacctaaataagcctcttg

SEQ ID NO: 1278 - DNA, 23 bp, Homo sapiens
  source 1..23: mol_type = genomic DNA
aagacattaaaataacccacagg

SEQ ID NO: 1279 - DNA, 23 bp, Homo sapiens
  source 1..23: mol_type = genomic DNA
aatatacctggaaaacccacacc

SEQ ID NO: 1280 - DNA, 23 bp, Homo sapiens
  source 1..23: mol_type = genomic DNA
aagacacatgaatatcactaatg

SEQ ID NO: 1281 - DNA, 22 bp, Homo sapiens
  source 1..22: mol_type = genomic DNA
aagatattgaataacccacatt

SEQ ID NO: 1282 - DNA, 23 bp, Homo sapiens
  source 1..23: mol_type = genomic DNA
aacatcccagaatgacccacagc

SEQ ID NO: 1283 - DNA, 23 bp, Homo sapiens
  source 1..23: mol_type = genomic DNA
aagaaagctggctagctctctgg

SEQ ID NO: 1284 - DNA, 24 bp, Homo sapiens
  source 1..24: mol_type = genomic DNA
aagataactgacttgaccctgtgg

SEQ ID NO: 1285 - DNA, 21 bp, Homo sapiens
  source 1..21: mol_type = genomic DNA
aagatatgaataaaactctgg

SEQ ID NO: 1286 - DNA, 23 bp, Homo sapiens
  source 1..23: mol_type = genomic DNA
aagctatctgagaaacccttttg

SEQ ID NO: 1287 - DNA, 22 bp, Homo sapiens
  source 1..22: mol_type = genomic DNA
cagatacctaataaccacacgg

SEQ ID NO: 1288 - DNA, 23 bp, Homo sapiens
  source 1..23: mol_type = genomic DNA
aagatacctgaaattatttcagg

SEQ ID NO: 1289 - DNA, 22 bp, Homo sapiens
  source 1..22: mol_type = genomic DNA
ttgatacctaaataccctgtgg

SEQ ID NO: 1290 - DNA, 23 bp, Homo sapiens
  source 1..23: mol_type = genomic DNA
taaatacatgaataatcctcggg

SEQ ID NO: 1291 - DNA, 23 bp, Homo sapiens
  source 1..23: mol_type = genomic DNA
aattaacctacataaccctcagt

SEQ ID NO: 1292 - DNA, 23 bp, Homo sapiens
  source 1..23: mol_type = genomic DNA
aagattcttaaataacccacttt

SEQ ID NO: 1293 - DNA, 23 bp, Homo sapiens
  source 1..23: mol_type = genomic DNA
aagatttaagaatgaacctcagg

SEQ ID NO: 1294 - DNA, 22 bp, Homo sapiens
  source 1..22: mol_type = genomic DNA
tggatacctgtcaaccctctgg

SEQ ID NO: 1295 - DNA, 23 bp, Homo sapiens
  source 1..23: mol_type = genomic DNA
aagatccgtgaataaaccacagc

SEQ ID NO: 1296 - DNA, 23 bp, Homo sapiens
  source 1..23: mol_type = genomic DNA
aacatacacgaatacctcacagg

SEQ ID NO: 1297 - DNA, 22 bp, Homo sapiens
  source 1..22: mol_type = genomic DNA
aagatgataaacaaccctctgg

SEQ ID NO: 1298 - DNA, 22 bp, Homo sapiens
  source 1..22: mol_type = genomic DNA
tagatcctaattaaccctcaga

SEQ ID NO: 1299 - DNA, 23 bp, Homo sapiens
  source 1..23: mol_type = genomic DNA
aagatacaggtgtagccctcctg

SEQ ID NO: 1300 - DNA, 23 bp, Homo sapiens
  source 1..23: mol_type = genomic DNA
ctgatatgtgaaaaaccctaagg

SEQ ID NO: 1301 - DNA, 22 bp, Homo sapiens
  source 1..22: mol_type = genomic DNA
aacatactgaaccagcctctgg

SEQ ID NO: 1302 - DNA, 23 bp, Homo sapiens
  source 1..23: mol_type = genomic DNA
aagacacgagaagaaccttctga

SEQ ID NO: 1303 - DNA, 23 bp, Homo sapiens
  source 1..23: mol_type = genomic DNA
aagacacttgaataccactcttt

SEQ ID NO: 1304 - DNA, 23 bp, Homo sapiens
  source 1..23: mol_type = genomic DNA
tacataccttgataaccttcagg

SEQ ID NO: 1305 - DNA, 23 bp, Homo sapiens
  source 1..23: mol_type = genomic DNA
aagttacctgaacaaacctgcaa

SEQ ID NO: 1306 - DNA, 23 bp, Homo sapiens
  source 1..23: mol_type = genomic DNA
aaaaaactagaagaaccctttgg

SEQ ID NO: 1307 - DNA, 23 bp, Homo sapiens
  source 1..23: mol_type = genomic DNA
aagatccctgaatttccatcaga

SEQ ID NO: 1308 - DNA, 22 bp, Homo sapiens
  source 1..22: mol_type = genomic DNA
aaaatacctgcataccctcagg

SEQ ID NO: 1309 - DNA, 23 bp, Homo sapiens
  source 1..23: mol_type = genomic DNA
aacttacatgaattactcttagg

SEQ ID NO: 1310 - DNA, 23 bp, Homo sapiens
  source 1..23: mol_type = genomic DNA
aacatttctcaatatccctttgg

SEQ ID NO: 1311 - DNA, 23 bp, Homo sapiens
  source 1..23: mol_type = genomic DNA
cagataactgaataaccctctgt

SEQ ID NO: 1312 - DNA, 21 bp, Homo sapiens
  source 1..21: mol_type = genomic DNA
taaatacctataacccactgg

SEQ ID NO: 1313 - DNA, 23 bp, Homo sapiens
  source 1..23: mol_type = genomic DNA
gagatacctgaatattcttccaa

SEQ ID NO: 1314 - DNA, 22 bp, Homo sapiens
  source 1..22: mol_type = genomic DNA
attatatctgaatatcctctgg

SEQ ID NO: 1315 - DNA, 22 bp, Homo sapiens
  source 1..22: mol_type = genomic DNA
atgatacccaatacccctccag

SEQ ID NO: 1316 - DNA, 23 bp, Homo sapiens
  source 1..23: mol_type = genomic DNA
cagatacctgaatctccttcttt

SEQ ID NO: 1317 - DNA, 23 bp, Homo sapiens
  source 1..23: mol_type = genomic DNA
cagttacctggataactccctgg

SEQ ID NO: 1318 - DNA, 23 bp, Homo sapiens
  source 1..23: mol_type = genomic DNA
aaaatactagaataaccagcttg

SEQ ID NO: 1319 - DNA, 23 bp, Homo sapiens
  source 1..23: mol_type = genomic DNA
aagactcaggaatatcactcagg

SEQ ID NO: 1320 - DNA, 22 bp, Homo sapiens
  source 1..22: mol_type = genomic DNA
aagatccagaagaatcatctgg

SEQ ID NO: 1321 - DNA, 23 bp, Homo sapiens
  source 1..23: mol_type = genomic DNA
aaaacacctgaataaatcccatg

SEQ ID NO: 1322 - DNA, 23 bp, Homo sapiens
  source 1..23: mol_type = genomic DNA
aacatcactgaagaaccctgaag

SEQ ID NO: 1323 - DNA, 22 bp, Homo sapiens
  source 1..22: mol_type = genomic DNA
aaaatacctcatagccctctgc

SEQ ID NO: 1324 - DNA, 23 bp, Homo sapiens
  source 1..23: mol_type = genomic DNA
aaaatagcttaataatgctcagt

SEQ ID NO: 1325 - DNA, 23 bp, Homo sapiens
  source 1..23: mol_type = genomic DNA
aagttccctgaacacacctctgg

SEQ ID NO: 1326 - DNA, 22 bp, Homo sapiens
  source 1..22: mol_type = genomic DNA
actatactgactaaccctctag

SEQ ID NO: 1327 - DNA, 23 bp, Homo sapiens
  source 1..23: mol_type = genomic DNA
agaatatcttcataaccttcggg

SEQ ID NO: 1328 - DNA, 22 bp, Homo sapiens
  source 1..22: mol_type = genomic DNA
agaaaacctgaataacctatgg

SEQ ID NO: 1329 - DNA, 23 bp, Homo sapiens
  source 1..23: mol_type = genomic DNA
aagatattcaaataaccctgctg

SEQ ID NO: 1330 - DNA, 22 bp, Homo sapiens
  source 1..22: mol_type = genomic DNA
gagatactgaataacctctggg

SEQ ID NO: 1331 - DNA, 22 bp, Homo sapiens
  source 1..22: mol_type = genomic DNA
aagatagctgctaaccctgagt

SEQ ID NO: 1332 - DNA, 23 bp, Homo sapiens
  source 1..23: mol_type = genomic DNA
aaaataaatgaataaccatcaga

SEQ ID NO: 1333 - DNA, 22 bp, Homo sapiens
  source 1..22: mol_type = genomic DNA
aaggtactagaaaaccctgtgg

SEQ ID NO: 1334 - DNA, 22 bp, Homo sapiens
  source 1..22: mol_type = genomic DNA
aagacactgccaaaccctccgg

SEQ ID NO: 1335 - DNA, 23 bp, Homo sapiens
  source 1..23: mol_type = genomic DNA
aagatacatgaatggccaacgcg

SEQ ID NO: 1336 - DNA, 23 bp, Homo sapiens
  source 1..23: mol_type = genomic DNA
cagagacctgcatagcactgagg

SEQ ID NO: 1337 - DNA, 23 bp, Homo sapiens
  source 1..23: mol_type = genomic DNA
aagatatctgaaaatccctgcgc

SEQ ID NO: 1338 - DNA, 24 bp, Homo sapiens
  source 1..24: mol_type = genomic DNA
aagaacactgagaaaaccctctgg

SEQ ID NO: 1339 - DNA, 23 bp, Homo sapiens
  source 1..23: mol_type = genomic DNA
aagaaacctccatatccatcgtg

SEQ ID NO: 1340 - DNA, 23 bp, Homo sapiens
  source 1..23: mol_type = genomic DNA
aaggtaccttaacaacattttgg

SEQ ID NO: 1341 - DNA, 23 bp, Homo sapiens
  source 1..23: mol_type = genomic DNA
aaggtgactgaaggacccttggg

SEQ ID NO: 1342 - DNA, 23 bp, Homo sapiens
  source 1..23: mol_type = genomic DNA
acgataactgaacagctctcaag

SEQ ID NO: 1343 - DNA, 23 bp, Homo sapiens
  source 1..23: mol_type = genomic DNA
aagagggcttaataaccttcaag

SEQ ID NO: 1344 - DNA, 23 bp, Homo sapiens
  source 1..23: mol_type = genomic DNA
aagataactggatagctctatga

SEQ ID NO: 1345 - DNA, 22 bp, Homo sapiens
  source 1..22: mol_type = genomic DNA
aagattcagcaataccctctgg

SEQ ID NO: 1346 - DNA, 22 bp, Homo sapiens
  source 1..22: mol_type = genomic DNA
caaaaaccagaaaaccctcagg

SEQ ID NO: 1347 - DNA, 23 bp, Homo sapiens
  source 1..23: mol_type = genomic DNA
catataccaaaataacccatggg

SEQ ID NO: 1348 - DNA, 21 bp, Homo sapiens
  source 1..21: mol_type = genomic DNA
aaaatacaaataaccctcaga

SEQ ID NO: 1349 - DNA, 23 bp, Homo sapiens
  source 1..23: mol_type = genomic DNA
aaaatacctgaataaacctgaag

SEQ ID NO: 1350 - DNA, 23 bp, Homo sapiens
  source 1..23: mol_type = genomic DNA
aagataacttaataggcctccac

SEQ ID NO: 1351 - DNA, 23 bp, Homo sapiens
  source 1..23: mol_type = genomic DNA
aagatggctgaaaaagcctttcg

SEQ ID NO: 1352 - DNA, 22 bp, Homo sapiens
  source 1..22: mol_type = genomic DNA
aagttaccagataacccacagg

SEQ ID NO: 1353 - DNA, 23 bp, Homo sapiens
  source 1..23: mol_type = genomic DNA
cagatacctggttaaacatcacg

SEQ ID NO: 1354 - DNA, 23 bp, Homo sapiens
  source 1..23: mol_type = genomic DNA
aagatacatgaatggccaacagg

SEQ ID NO: 1355 - DNA, 23 bp, Homo sapiens
  source 1..23: mol_type = genomic DNA
aagctaccagcatagcccactag

SEQ ID NO: 1356 - DNA, 23 bp, Homo sapiens
  source 1..23: mol_type = genomic DNA
aagaaagctggaaaacactccag

SEQ ID NO: 1357 - DNA, 23 bp, Homo sapiens
  source 1..23: mol_type = genomic DNA
aagatgcctgagtctcccccgtg

SEQ ID NO: 1358 - DNA, 23 bp, Homo sapiens
  source 1..23: mol_type = genomic DNA
aaggaaactgaataaccctcaga

SEQ ID NO: 1359 - DNA, 23 bp, Homo sapiens
  source 1..23: mol_type = genomic DNA
ctgagaactgaataaacctcgag

SEQ ID NO: 1360 - DNA, 23 bp, Homo sapiens
  source 1..23: mol_type = genomic DNA
aaggttacagaataaaactctgg

SEQ ID NO: 1361 - DNA, 23 bp, Homo sapiens
  source 1..23: mol_type = genomic DNA
caggatactgaataaccctcaga

SEQ ID NO: 1362 - DNA, 23 bp, Homo sapiens
  source 1..23: mol_type = genomic DNA
ccattacatgaataaccttcagg

SEQ ID NO: 1363 - DNA, 23 bp, Homo sapiens
  source 1..23: mol_type = genomic DNA
aagacacctggataaccatcagg

SEQ ID NO: 1364 - DNA, 21 bp, Homo sapiens
  source 1..21: mol_type = genomic DNA
aaattatgaaaaaccctcagg

SEQ ID NO: 1365 - DNA, 22 bp, Homo sapiens
  source 1..22: mol_type = genomic DNA
aagatacttgacaactctctga

SEQ ID NO: 1366 - DNA, 23 bp, Homo sapiens
  source 1..23: mol_type = genomic DNA
aagatagatgaatgacccactac

SEQ ID NO: 1367 - DNA, 23 bp, Homo sapiens
  source 1..23: mol_type = genomic DNA
aagatacttaaatgatccttggc

SEQ ID NO: 1368 - DNA, 23 bp, Homo sapiens
  source 1..23: mol_type = genomic DNA
aatatacctaaataacttacagc

SEQ ID NO: 1369 - DNA, 23 bp, Homo sapiens
  source 1..23: mol_type = genomic DNA
aagataactggatagccatatgc

SEQ ID NO: 1370 - DNA, 23 bp, Homo sapiens
  source 1..23: mol_type = genomic DNA
aacaaacatgaaaaacactcagc

SEQ ID NO: 1371 - DNA, 23 bp, Homo sapiens
  source 1..23: mol_type = genomic DNA
aagatacctaaatatatatctga

SEQ ID NO: 1372 - DNA, 23 bp, Homo sapiens
  source 1..23: mol_type = genomic DNA
aggatgactgaaaaatccccagg

SEQ ID NO: 1373 - DNA, 23 bp, Homo sapiens
  source 1..23: mol_type = genomic DNA
aagatgactgcttaacccccagt

SEQ ID NO: 1374 - DNA, 23 bp, Homo sapiens
  source 1..23: mol_type = genomic DNA
aagataccaaaatgtaactcagg

SEQ ID NO: 1375 - DNA, 23 bp, Homo sapiens
  source 1..23: mol_type = genomic DNA
aagataacttaaaaactctaagg

SEQ ID NO: 1376 - DNA, 23 bp, Homo sapiens
  source 1..23: mol_type = genomic DNA
acagaacctgaatagccctaggg

SEQ ID NO: 1377 - DNA, 24 bp, Homo sapiens
  source 1..24: mol_type = genomic DNA
aagatgcctgaactagtccttggg

SEQ ID NO: 1378 - DNA, 22 bp, Homo sapiens
  source 1..22: mol_type = genomic DNA
aaaataactgaaaaccctcaac

SEQ ID NO: 1379 - DNA, 23 bp, Homo sapiens
  source 1..23: mol_type = genomic DNA
aacatacatccacaaccatcagg

SEQ ID NO: 1380 - DNA, 23 bp, Homo sapiens
  source 1..23: mol_type = genomic DNA
aagatacatgaataagcaccatg

SEQ ID NO: 1381 - DNA, 23 bp, Homo sapiens
  source 1..23: mol_type = genomic DNA
catatacttgaataaccaactgg

SEQ ID NO: 1382 - DNA, 21 bp, Homo sapiens
  source 1..21: mol_type = genomic DNA
aagatcttaataatcatctgg

SEQ ID NO: 1383 - DNA, 21 bp, Homo sapiens
  source 1..21: mol_type = genomic DNA
aagaaacccgagtccctctgg

SEQ ID NO: 1384 - DNA, 22 bp, Homo sapiens
  source 1..22: mol_type = genomic DNA
aagatatctcatatcactcagg

SEQ ID NO: 1385 - DNA, 24 bp, Homo sapiens
  source 1..24: mol_type = genomic DNA
acaataccttgaataacccacaag

SEQ ID NO: 1386 - DNA, 23 bp, Homo sapiens
  source 1..23: mol_type = genomic DNA
aagatacataaataacctcacag

SEQ ID NO: 1387 - DNA, 22 bp, Homo sapiens
  source 1..22: mol_type = genomic DNA
aagtaacagaataatcctaagg

SEQ ID NO: 1388 - DNA, 23 bp, Homo sapiens
  source 1..23: mol_type = genomic DNA
gaataacctgaataacccccaga

SEQ ID NO: 1389 - DNA, 23 bp, Homo sapiens
  source 1..23: mol_type = genomic DNA
aaattacctaaataacccaaggc

SEQ ID NO: 1390 - DNA, 23 bp, Homo sapiens
  source 1..23: mol_type = genomic DNA
aaggtacctgaatattgttctgt

SEQ ID NO: 1391 - DNA, 23 bp, Homo sapiens
  source 1..23: mol_type = genomic DNA
aagacagctgggtatctctctgg

SEQ ID NO: 1392 - DNA, 22 bp, Homo sapiens
  source 1..22: mol_type = genomic DNA
ctgatagtgaataagcctcagg

SEQ ID NO: 1393 - DNA, 22 bp, Homo sapiens
  source 1..22: mol_type = genomic DNA
atgatagtgaataagtctcagg

SEQ ID NO: 1394 - DNA, 23 bp, Homo sapiens
  source 1..23: mol_type = genomic DNA
tagatatttgaataaccatttag

SEQ ID NO: 1395 - DNA, 24 bp, Homo sapiens
  source 1..24: mol_type = genomic DNA
aagatgccctgagcaaccctcctg

SEQ ID NO: 1396 - DNA, 23 bp, Homo sapiens
  source 1..23: mol_type = genomic DNA
atgatctctgaatggccttcagg

SEQ ID NO: 1397 - DNA, 23 bp, Homo sapiens
  source 1..23: mol_type = genomic DNA
cgtgtacctgaatgacccacggg

SEQ ID NO: 1398 - DNA, 22 bp, Homo sapiens
  source 1..22: mol_type = genomic DNA
tagatactgagaaagcctctgg

SEQ ID NO: 1399 - DNA, 22 bp, Homo sapiens
  source 1..22: mol_type = genomic DNA
aagttatctaaaaaccctctag

SEQ ID NO: 1400 - DNA, 23 bp, Homo sapiens
  source 1..23: mol_type = genomic DNA
aagatatctgaaaaattctcaaa

SEQ ID NO: 1401 - DNA, 22 bp, Homo sapiens
  source 1..22: mol_type = genomic DNA
aagtaaactgaaaaccttctgg

SEQ ID NO: 1402 - DNA, 23 bp, Homo sapiens
  source 1..23: mol_type = genomic DNA
aatataactgaataaaactcttt

SEQ ID NO: 1403 - DNA, 22 bp, Homo sapiens
  source 1..22: mol_type = genomic DNA
tagctacatgaaaaccctgggg

SEQ ID NO: 1404 - DNA, 22 bp, Homo sapiens
  source 1..22: mol_type = genomic DNA
ataatactgaataaccctttga

SEQ ID NO: 1405 - DNA, 22 bp, Homo sapiens
  source 1..22: mol_type = genomic DNA
cttttacctgaataccctcagg

SEQ ID NO: 1406 - DNA, 23 bp, Homo sapiens
  source 1..23: mol_type = genomic DNA
aagatgactgaagagcccttggg

SEQ ID NO: 1407 - DNA, 23 bp, Homo sapiens
  source 1..23: mol_type = genomic DNA
atgagcccagaagaaccctcttg

SEQ ID NO: 1408 - DNA, 23 bp, Homo sapiens
  source 1..23: mol_type = genomic DNA
gagatacctgaaaaatcctggct

SEQ ID NO: 1409 - DNA, 23 bp, Homo sapiens
  source 1..23: mol_type = genomic DNA
tgtataccagaatcaccctaggg

SEQ ID NO: 1410 - DNA, 22 bp, Homo sapiens
  source 1..22: mol_type = genomic DNA
cagatacctggtaactctcagg

SEQ ID NO: 1411 - DNA, 23 bp, Homo sapiens
  source 1..23: mol_type = genomic DNA
aaattacctggacaaccttcgcg

SEQ ID NO: 1412 - DNA, 23 bp, Homo sapiens
  source 1..23: mol_type = genomic DNA
aagatacatgaataaccttgtca

SEQ ID NO: 1413 - DNA, 22 bp, Homo sapiens
  source 1..22: mol_type = genomic DNA
aagatacattagaaccctctgt

SEQ ID NO: 1414 - DNA, 23 bp, Homo sapiens
  source 1..23: mol_type = genomic DNA
aagatatatgaatggccctgaag

SEQ ID NO: 1415 - DNA, 23 bp, Homo sapiens
  source 1..23: mol_type = genomic DNA
aagatacacaaacagcccacagg

SEQ ID NO: 1416 - DNA, 23 bp, Homo sapiens
  source 1..23: mol_type = genomic DNA
aacatacctgaaaaaacctcagc

SEQ ID NO: 1417 - DNA, 23 bp, Homo sapiens
  source 1..23: mol_type = genomic DNA
aggattccagaagaagcctgtgg

SEQ ID NO: 1418 - DNA, 23 bp, Homo sapiens
  source 1..23: mol_type = genomic DNA
aagaaacctggatttacctctgt

SEQ ID NO: 1419 - DNA, 23 bp, Homo sapiens
  source 1..23: mol_type = genomic DNA
agaatagctgaaggaccctgggg

SEQ ID NO: 1420 - DNA, 23 bp, Homo sapiens
  source 1..23: mol_type = genomic DNA
aggatgccagggtaacccactgg

SEQ ID NO: 1421 - DNA, 22 bp, Homo sapiens
  source 1..22: mol_type = genomic DNA
taggtacctgaatgacctcagg

SEQ ID NO: 1422 - DNA, 23 bp, Homo sapiens
  source 1..23: mol_type = genomic DNA
aagatacctgacataccctcccc

SEQ ID NO: 1423 - DNA, 23 bp, Homo sapiens
  source 1..23: mol_type = genomic DNA
gagatacatgaatgaccctttca

SEQ ID NO: 1424 - DNA, 22 bp, Homo sapiens
  source 1..22: mol_type = genomic DNA
gtgatagtgaataactctcagg

SEQ ID NO: 1425 - DNA, 23 bp, Homo sapiens
  source 1..23: mol_type = genomic DNA
aggaaagctgaataactctctta

SEQ ID NO: 1426 - DNA, 23 bp, Homo sapiens
  source 1..23: mol_type = genomic DNA
aagaaacgctaataaacctcagg

SEQ ID NO: 1427 - DNA, 23 bp, Homo sapiens
  source 1..23: mol_type = genomic DNA
aacattccacactaaccatcagg

SEQ ID NO: 1428 - DNA, 23 bp, Homo sapiens
  source 1..23: mol_type = genomic DNA
aagatacgagagaaacgcccggg

SEQ ID NO: 1429 - DNA, 23 bp, Homo sapiens
  source 1..23: mol_type = genomic DNA
caattaccagaataacccacaga

SEQ ID NO: 1430 - DNA, 22 bp, Homo sapiens
  source 1..22: mol_type = genomic DNA
aagagatttgataaccttctgg

SEQ ID NO: 1431 - DNA, 23 bp, Homo sapiens
  source 1..23: mol_type = genomic DNA
aagattcctgattcagcctctga

SEQ ID NO: 1432 - DNA, 23 bp, Homo sapiens
  source 1..23: mol_type = genomic DNA
aagaagccagactaacactgggg

SEQ ID NO: 1433 - DNA, 23 bp, Homo sapiens
  source 1..23: mol_type = genomic DNA
caaataaatgaataatcatcagg

SEQ ID NO: 1434 - DNA, 23 bp, Homo sapiens
  source 1..23: mol_type = genomic DNA
aagaggcctgactctccctccag

SEQ ID NO: 1435 - DNA, 23 bp, Homo sapiens
  source 1..23: mol_type = genomic DNA
aagatacttgtataacctcaaga

SEQ ID NO: 1436 - DNA, 23 bp, Homo sapiens
  source 1..23: mol_type = genomic DNA
aacatacctgaacaaccctcagg

SEQ ID NO: 1437 - DNA, 23 bp, Homo sapiens
  source 1..23: mol_type = genomic DNA
aagatatttatatacccctccag

SEQ ID NO: 1438 - DNA, 23 bp, Homo sapiens
  source 1..23: mol_type = genomic DNA
tagttacatgaagaaacctctag

SEQ ID NO: 1439 - DNA, 24 bp, Homo sapiens
  source 1..24: mol_type = genomic DNA
aagatacatgcgtgaagcctctgg

SEQ ID NO: 1440 - DNA, 23 bp, Homo sapiens
  source 1..23: mol_type = genomic DNA
atggtacctgtacaaacttcagg

SEQ ID NO: 1441 - DNA, 22 bp, Homo sapiens
  source 1..22: mol_type = genomic DNA
aaggcacctgaaagctctctgg

SEQ ID NO: 1442 - DNA, 23 bp, Homo sapiens
  source 1..23: mol_type = genomic DNA
gagatacctggaaaaccccaggc

SEQ ID NO: 1443 - DNA, 23 bp, Homo sapiens
  source 1..23: mol_type = genomic DNA
atgttaacagaagacccctctgg

SEQ ID NO: 1444 - DNA, 23 bp, Homo sapiens
  source 1..23: mol_type = genomic DNA
tagataactggataccccactgc

SEQ ID NO: 1445 - DNA, 23 bp, Homo sapiens
  source 1..23: mol_type = genomic DNA
aaaattcctgtccagccctctgg

SEQ ID NO: 1446 - DNA, 23 bp, Homo sapiens
  source 1..23: mol_type = genomic DNA
aggatgcctgaaaaaacctcaaa

SEQ ID NO: 1447 - DNA, 22 bp, Homo sapiens
  source 1..22: mol_type = genomic DNA
aagatacatgagaaccctttgc

SEQ ID NO: 1448 - DNA, 23 bp, Homo sapiens
  source 1..23: mol_type = genomic DNA
aagatacatgaatagccctccac

SEQ ID NO: 1449 - DNA, 23 bp, Homo sapiens
  source 1..23: mol_type = genomic DNA
taaatacctgaataacccatagt

SEQ ID NO: 1450 - DNA, 23 bp, Homo sapiens
  source 1..23: mol_type = genomic DNA
tatatacatgtataacccacagg

SEQ ID NO: 1451 - DNA, 23 bp, Homo sapiens
  source 1..23: mol_type = genomic DNA
aagatacattcttagccctcaag

SEQ ID NO: 1452 - DNA, 23 bp, Homo sapiens
  source 1..23: mol_type = genomic DNA
aagaaaccttgtgaaccctcagt

SEQ ID NO: 1453 - DNA, 21 bp, Homo sapiens
  source 1..21: mol_type = genomic DNA
aagaaatggatagccctctgg

SEQ ID NO: 1454 - DNA, 23 bp, Homo sapiens
  source 1..23: mol_type = genomic DNA
aaaatagcttaaaaagcctgtgg

SEQ ID NO: 1455 - DNA, 23 bp, Homo sapiens
  source 1..23: mol_type = genomic DNA
agggtgccccaacaaccctcggg

SEQ ID NO: 1456 - DNA, 23 bp, Homo sapiens
  source 1..23: mol_type = genomic DNA
aagaaatgtgggtaagcctcagg

SEQ ID NO: 1457 - DNA, 23 bp, Homo sapiens
  source 1..23: mol_type = genomic DNA
atcatatctgaataactctcaac

SEQ ID NO: 1458 - DNA, 23 bp, Homo sapiens
  source 1..23: mol_type = genomic DNA
aacaagcctgtataaccctcatg

SEQ ID NO: 1459 - DNA, 22 bp, Homo sapiens
  source 1..22: mol_type = genomic DNA
gtgatactgaataagtctcagg

SEQ ID NO: 1460 - DNA, 23 bp, Homo sapiens
  source 1..23: mol_type = genomic DNA
aacatacatgaataatcttcaaa

SEQ ID NO: 1461 - DNA, 23 bp, Homo sapiens
  source 1..23: mol_type = genomic DNA
attatacctcaatatccctctgg

SEQ ID NO: 1462 - DNA, 23 bp, Homo sapiens
  source 1..23: mol_type = genomic DNA
aagatacatgaaaaacactggct

SEQ ID NO: 1463 - DNA, 23 bp, Homo sapiens
  source 1..23: mol_type = genomic DNA
aagatacctgtacaacactatac

SEQ ID NO: 1464 - DNA, 23 bp, Homo sapiens
  source 1..23: mol_type = genomic DNA
cagatacctcatttaccctgatg

SEQ ID NO: 1465 - DNA, 21 bp, Homo sapiens
  source 1..21: mol_type = genomic DNA
cagatacttataaccctctgg

SEQ ID NO: 1466 - DNA, 24 bp, Homo sapiens
  source 1..24: mol_type = genomic DNA
aaaatacttgaaaaatccctcagt

SEQ ID NO: 1467 - DNA, 22 bp, Homo sapiens
  source 1..22: mol_type = genomic DNA
aagatcaagaataactgtcagg

SEQ ID NO: 1468 - DNA, 23 bp, Homo sapiens
  source 1..23: mol_type = genomic DNA
aagacacttgtctagtcctctgg

SEQ ID NO: 1469 - DNA, 23 bp, Homo sapiens
  source 1..23: mol_type = genomic DNA
aagaatccggaaaaaccctatgc

SEQ ID NO: 1470 - DNA, 23 bp, Homo sapiens
  source 1..23: mol_type = genomic DNA
aagacagctggagaactctcagg

SEQ ID NO: 1471 - DNA, 23 bp, Homo sapiens
  source 1..23: mol_type = genomic DNA
aagaaaaatgaacaaacctcaga

SEQ ID NO: 1472 - DNA, 23 bp, Homo sapiens
  source 1..23: mol_type = genomic DNA
aagttacgtgaataggactcagt

SEQ ID NO: 1473 - DNA, 22 bp, Homo sapiens
  source 1..22: mol_type = genomic DNA
aagataaagaacaactctctgg

SEQ ID NO: 1474 - DNA, 23 bp, Homo sapiens
  source 1..23: mol_type = genomic DNA
cagatacacagataacccccagg

SEQ ID NO: 1475 - DNA, 22 bp, Homo sapiens
  source 1..22: mol_type = genomic DNA
aagaaacttgaaaaatcccagg

SEQ ID NO: 1476 - DNA, 23 bp, Homo sapiens
  source 1..23: mol_type = genomic DNA
cagataacagaaaaaccctgttg

SEQ ID NO: 1477 - DNA, 23 bp, Homo sapiens
  source 1..23: mol_type = genomic DNA
aagatacccagatccccctccag

SEQ ID NO: 1478 - DNA, 24 bp, Homo sapiens
  source 1..24: mol_type = genomic DNA
tagatattctgaatatacctctgg

SEQ ID NO: 1479 - DNA, 24 bp, Homo sapiens
  source 1..24: mol_type = genomic DNA
cagatacatgaaataatcctccag

SEQ ID NO: 1480 - DNA, 23 bp, Homo sapiens
  source 1..23: mol_type = genomic DNA
agtcatcctgaataaccctcatg

SEQ ID NO: 1481 - DNA, 22 bp, Homo sapiens
  source 1..22: mol_type = genomic DNA
gccataccaaataaccctctgg

SEQ ID NO: 1482 - DNA, 23 bp, Homo sapiens
  source 1..23: mol_type = genomic DNA
aagatacctggataagcaactgc

SEQ ID NO: 1483 - DNA, 23 bp, Homo sapiens
  source 1..23: mol_type = genomic DNA
aagaaacctatagaaccctgagt

SEQ ID NO: 1484 - DNA, 23 bp, Homo sapiens
  source 1..23: mol_type = genomic DNA
aagaaaacagaataaacctctaa

SEQ ID NO: 1485 - DNA, 23 bp, Homo sapiens
  source 1..23: mol_type = genomic DNA
aagataccttatcaaccctaaag

SEQ ID NO: 1486 - DNA, 23 bp, Homo sapiens
  source 1..23: mol_type = genomic DNA
cagaaatataaaaaaccctcagg

SEQ ID NO: 1487 - DNA, 23 bp, Homo sapiens
  source 1..23: mol_type = genomic DNA
aagattcaagaaagaccctctgc

SEQ ID NO: 1488 - DNA, 22 bp, Homo sapiens
  source 1..22: mol_type = genomic DNA
taaatactgaataaccctgtga

SEQ ID NO: 1489 - DNA, 23 bp, Homo sapiens
  source 1..23: mol_type = genomic DNA
gagatctcagcataactctctgg

SEQ ID NO: 1490 - DNA, 22 bp, Homo sapiens
  source 1..22: mol_type = genomic DNA
aagataccttatttacctatgg

SEQ ID NO: 1491 - DNA, 23 bp, Homo sapiens
  source 1..23: mol_type = genomic DNA
ttcatacctaaataacccttaga

SEQ ID NO: 1492 - DNA, 23 bp, Homo sapiens
  source 1..23: mol_type = genomic DNA
aagatacctgaataacctaagac

SEQ ID NO: 1493 - DNA, 22 bp, Homo sapiens
  source 1..22: mol_type = genomic DNA
aagatacataataatcatctgt

SEQ ID NO: 1494 - DNA, 23 bp, Homo sapiens
  source 1..23: mol_type = genomic DNA
aagagcccttgctaaccatctgg

SEQ ID NO: 1495 - DNA, 23 bp, Homo sapiens
  source 1..23: mol_type = genomic DNA
aaagtatctgaataacacttctg

SEQ ID NO: 1496 - DNA, 23 bp, Homo sapiens
  source 1..23: mol_type = genomic DNA
agcctacctaaatagccctaggg

SEQ ID NO: 1497 - DNA, 23 bp, Homo sapiens
  source 1..23: mol_type = genomic DNA
cagacacctgaatgaccccaggc

SEQ ID NO: 1498 - DNA, 23 bp, Homo sapiens
  source 1..23: mol_type = genomic DNA
cactgacctgaatcacccccagg

SEQ ID NO: 1499 - DNA, 22 bp, Homo sapiens
  source 1..22: mol_type = genomic DNA
gaaatactgaataatcctcagg

SEQ ID NO: 1500 - DNA, 23 bp, Homo sapiens
  source 1..23: mol_type = genomic DNA
aagacacagaaagatccctctgg

SEQ ID NO: 1501 - DNA, 23 bp, Homo sapiens
  source 1..23: mol_type = genomic DNA
aaggtaccagatgagcccttggg

SEQ ID NO: 1502 - DNA, 23 bp, Homo sapiens
  source 1..23: mol_type = genomic DNA
aggatacctcccaaatcctctgg

SEQ ID NO: 1503 - DNA, 23 bp, Homo sapiens
  source 1..23: mol_type = genomic DNA
caaatacttgaaaagccctcgag

SEQ ID NO: 1504 - DNA, 21 bp, Homo sapiens
  source 1..21: mol_type = genomic DNA
taaatatgaatgaccctcagg

SEQ ID NO: 1505 - DNA, 23 bp, Homo sapiens
  source 1..23: mol_type = genomic DNA
cagatatctgaagatccctccag

SEQ ID NO: 1506 - DNA, 23 bp, Homo sapiens
  source 1..23: mol_type = genomic DNA
acagaacctgtataaccctccag

SEQ ID NO: 1507 - DNA, 24 bp, Homo sapiens
  source 1..24: mol_type = genomic DNA
aagaaatctagaatacccctaggg

SEQ ID NO: 1508 - DNA, 25 bp, Homo sapiens
  source 1..25: mol_type = genomic DNA
aagttaaatgaatgaccctgaccgg

SEQ ID NO: 1509 - DNA, 23 bp, Homo sapiens
  source 1..23: mol_type = genomic DNA
aagatatttgatcaacccttgga

SEQ ID NO: 1510 - DNA, 23 bp, Homo sapiens
  source 1..23: mol_type = genomic DNA
aggtaacatcaatatccctccgg

SEQ ID NO: 1511 - DNA, 23 bp, Homo sapiens
  source 1..23: mol_type = genomic DNA
aacgtacctgaataactcataag

SEQ ID NO: 1512 - DNA, 23 bp, Homo sapiens
  source 1..23: mol_type = genomic DNA
aagataccagcatagtcctcctg

SEQ ID NO: 1513 - DNA, 23 bp, Homo sapiens
  source 1..23: mol_type = genomic DNA
aagatatctgaagagccttccca

SEQ ID NO: 1514 - DNA, 23 bp, Homo sapiens
  source 1..23: mol_type = genomic DNA
aagatacctgaatttaccatgag

SEQ ID NO: 1515 - DNA, 23 bp, Homo sapiens
  source 1..23: mol_type = genomic DNA
aagatactttattaactctcaag

SEQ ID NO: 1516 - DNA, 23 bp, Homo sapiens
  source 1..23: mol_type = genomic DNA
tagatatgtgaattaacttctgg

SEQ ID NO: 1517 - DNA, 23 bp, Homo sapiens
  source 1..23: mol_type = genomic DNA
aagatacctgatcacacatcaga

SEQ ID NO: 1518 - DNA, 23 bp, Homo sapiens
  source 1..23: mol_type = genomic DNA
cagatacctcaataaccctgatg

SEQ ID NO: 1519 - DNA, 23 bp, Homo sapiens
  source 1..23: mol_type = genomic DNA
aagatacttggataatgcttggt

SEQ ID NO: 1520 - DNA, 23 bp, Homo sapiens
  source 1..23: mol_type = genomic DNA
aaggtatctgaattaccctcaag

SEQ ID NO: 1521 - DNA, 23 bp, Homo sapiens
  source 1..23: mol_type = genomic DNA
ctgagacctgagtaactctcatg

SEQ ID NO: 1522 - DNA, 22 bp, Homo sapiens
  source 1..22: mol_type = genomic DNA
aagaaaatgaataaccctacag

SEQ ID NO: 1523 - DNA, 23 bp, Homo sapiens
  source 1..23: mol_type = genomic DNA
tagatacatgaaaaacccttcag

SEQ ID NO: 1524 - DNA, 23 bp, Homo sapiens
  source 1..23: mol_type = genomic DNA
tagatgcttaaatgaccctctgc

SEQ ID NO: 1525 - DNA, 23 bp, Homo sapiens
  source 1..23: mol_type = genomic DNA
taggatcctggataaccctccag

SEQ ID NO: 1526 - DNA, 23 bp, Homo sapiens
  source 1..23: mol_type = genomic DNA
ttgatacttgaataaccatctga

SEQ ID NO: 1527 - DNA, 21 bp, Homo sapiens
  source 1..21: mol_type = genomic DNA
aagaaaccaataaccctcagg

SEQ ID NO: 1528 - DNA, 23 bp, Homo sapiens
  source 1..23: mol_type = genomic DNA
aaggaaccagaattactctcagt

SEQ ID NO: 1529 - DNA, 23 bp, Homo sapiens
  source 1..23: mol_type = genomic DNA
cagaaaccagaataaccttcagg

SEQ ID NO: 1530 - DNA, 23 bp, Homo sapiens
  source 1..23: mol_type = genomic DNA
aaaattcctgaatagctctctgg

SEQ ID NO: 1531 - DNA, 22 bp, Homo sapiens
  source 1..22: mol_type = genomic DNA
atgatagtgaataacactcatg

SEQ ID NO: 1532 - DNA, 22 bp, Homo sapiens
  source 1..22: mol_type = genomic DNA
aggatacagaatatccatctgg

SEQ ID NO: 1533 - DNA, 23 bp, Homo sapiens
  source 1..23: mol_type = genomic DNA
aatctacctgaaaagccctctgg

SEQ ID NO: 1534 - DNA, 22 bp, Homo sapiens
  source 1..22: mol_type = genomic DNA
ctgataccagataaccctgagg

SEQ ID NO: 1535 - DNA, 23 bp, Homo sapiens
  source 1..23: mol_type = genomic DNA
cagatatctgaataacccaccag

SEQ ID NO: 1536 - DNA, 23 bp, Homo sapiens
  source 1..23: mol_type = genomic DNA
aagatacatggataatgttcagg

SEQ ID NO: 1537 - DNA, 23 bp, Homo sapiens
  source 1..23: mol_type = genomic DNA
aagaaacatgaagaaaactcagc

SEQ ID NO: 1538 - DNA, 23 bp, Homo sapiens
  source 1..23: mol_type = genomic DNA
aaaatacatggaaaatcctcatg

SEQ ID NO: 1539 - DNA, 23 bp, Homo sapiens
  source 1..23: mol_type = genomic DNA
attatacctgaataaacctgact

SEQ ID NO: 1540 - DNA, 23 bp, Homo sapiens
  source 1..23: mol_type = genomic DNA
gatttaccagaaaaaccctctgg

SEQ ID NO: 1541 - DNA, 23 bp, Homo sapiens
  source 1..23: mol_type = genomic DNA
gattgaccagaataaccctctgg

SEQ ID NO: 1542 - DNA, 24 bp, Homo sapiens
  source 1..24: mol_type = genomic DNA
aagatacatcgaataacccttcta

SEQ ID NO: 1543 - DNA, 23 bp, Homo sapiens
  source 1..23: mol_type = genomic DNA
aaggcaactgaagatccttcagg

SEQ ID NO: 1544 - DNA, 23 bp, Homo sapiens
  source 1..23: mol_type = genomic DNA
aagatatctgaattcagctcttg

SEQ ID NO: 1545 - DNA, 23 bp, Homo sapiens
  source 1..23: mol_type = genomic DNA
aagaaaacagaataaacctctca

SEQ ID NO: 1546 - DNA, 23 bp, Homo sapiens
  source 1..23: mol_type = genomic DNA
aagatagctgatgaaatatcagg

SEQ ID NO: 1547 - DNA, 22 bp, Homo sapiens
  source 1..22: mol_type = genomic DNA
atgatagtgaataagcctcagg

SEQ ID NO: 1548 - DNA, 23 bp, Homo sapiens
  source 1..23: mol_type = genomic DNA
aagattcatgtacaaacctcatg

SEQ ID NO: 1549 - DNA, 23 bp, Homo sapiens
  source 1..23: mol_type = genomic DNA
aagacacatgaagaaaactgagg

SEQ ID NO: 1550 - DNA, 21 bp, Homo sapiens
  source 1..21: mol_type = genomic DNA
aagttgactgaaaccctctgg

SEQ ID NO: 1551 - DNA, 24 bp, Homo sapiens
  source 1..24: mol_type = genomic DNA
gagataccctagataaccctcaga

SEQ ID NO: 1552 - DNA, 23 bp, Homo sapiens
  source 1..23: mol_type = genomic DNA
gtgataactgaataaccctgctc

SEQ ID NO: 1553 - DNA, 23 bp, Homo sapiens
  source 1..23: mol_type = genomic DNA
gagataactgcatagccctaggt

SEQ ID NO: 1554 - DNA, 22 bp, Homo sapiens
  source 1..22: mol_type = genomic DNA
gagacacctgaacgacctcagg

SEQ ID NO: 1555 - DNA, 23 bp, Homo sapiens
  source 1..23: mol_type = genomic DNA
aagacacctgactaaccccaggc

SEQ ID NO: 1556 - DNA, 23 bp, Homo sapiens
  source 1..23: mol_type = genomic DNA
tagacacctgaacaaccccaggc

SEQ ID NO: 1557 - DNA, 22 bp, Homo sapiens
  source 1..22: mol_type = genomic DNA
aagacacctggctgaccccagg

SEQ ID NO: 1558 - DNA, 22 bp, Homo sapiens
  source 1..22: mol_type = genomic DNA
aagacacctgagcaacctcagg

SEQ ID NO: 1559 - DNA, 23 bp, Homo sapiens
  source 1..23: mol_type = genomic DNA
aagatatctgagcaacactctgt

SEQ ID NO: 1560 - DNA, 23 bp, Homo sapiens
  source 1..23: mol_type = genomic DNA
gagatatgtgaataaaactctga

SEQ ID NO: 1561 - DNA, 22 bp, Homo sapiens
  source 1..22: mol_type = genomic DNA
cagaagctgaatgaccctttgg

SEQ ID NO: 1562 - DNA, 23 bp, Homo sapiens
  source 1..23: mol_type = genomic DNA
aaaataactgataaatcctctga

SEQ ID NO: 1563 - DNA, 22 bp, Homo sapiens
  source 1..22: mol_type = genomic DNA
aagctcctgcatagcccacagg

SEQ ID NO: 1564 - DNA, 22 bp, Homo sapiens
  source 1..22: mol_type = genomic DNA
aacatacctaaatataccctgg

SEQ ID NO: 1565 - DNA, 23 bp, Homo sapiens
  source 1..23: mol_type = genomic DNA
tagatacctgactttcccacttg

SEQ ID NO: 1566 - DNA, 23 bp, Homo sapiens
  source 1..23: mol_type = genomic DNA
aagattcctgaagcctcctcaga

SEQ ID NO: 1567 - DNA, 22 bp, Homo sapiens
  source 1..22: mol_type = genomic DNA
catatactgaataaccatctgg

SEQ ID NO: 1568 - DNA, 23 bp, Homo sapiens
  source 1..23: mol_type = genomic DNA
aagatatctgaaatgccctagag

SEQ ID NO: 1569 - DNA, 23 bp, Homo sapiens
  source 1..23: mol_type = genomic DNA
aaatagcctgaataaccctagtg

SEQ ID NO: 1570 - DNA, 23 bp, Homo sapiens
  source 1..23: mol_type = genomic DNA
aacaaacatgaataacactaagc

SEQ ID NO: 1571 - DNA, 23 bp, Homo sapiens
  source 1..23: mol_type = genomic DNA
aagaaatctgacaaacctttagg

SEQ ID NO: 1572 - DNA, 22 bp, Homo sapiens
  source 1..22: mol_type = genomic DNA
aagatccagaagaactctctga

SEQ ID NO: 1573 - DNA, 23 bp, Homo sapiens
  source 1..23: mol_type = genomic DNA
tagatacctaaatagcccatggg

SEQ ID NO: 1574 - DNA, 23 bp, Homo sapiens
  source 1..23: mol_type = genomic DNA
aagaaacctctataagcctctta

SEQ ID NO: 1575 - DNA, 22 bp, Homo sapiens
  source 1..22: mol_type = genomic DNA
aatctactgaataactctcagg

SEQ ID NO: 1576 - DNA, 23 bp, Homo sapiens
  source 1..23: mol_type = genomic DNA
atgaatactgaataacattcagg

SEQ ID NO: 1577 - DNA, 21 bp, Homo sapiens
  source 1..21: mol_type = genomic DNA
aagataccaataaccctcaaa

SEQ ID NO: 1578 - DNA, 23 bp, Homo sapiens
  source 1..23: mol_type = genomic DNA
aatgtacccgaacaaccctcagg

SEQ ID NO: 1579 - DNA, 24 bp, Homo sapiens
  source 1..24: mol_type = genomic DNA
cagatagctgaaagaacactcagg

SEQ ID NO: 1580 - DNA, 23 bp, Homo sapiens
  source 1..23: mol_type = genomic DNA
aacataactgaataaccataagg

SEQ ID NO: 1581 - DNA, 23 bp, Homo sapiens
  source 1..23: mol_type = genomic DNA
aatcaacctgaatatccatcagt

SEQ ID NO: 1582 - DNA, 22 bp, Homo sapiens
  source 1..22: mol_type = genomic DNA
aagatacccattcaccctctgg

SEQ ID NO: 1583 - DNA, 23 bp, Homo sapiens
  source 1..23: mol_type = genomic DNA
aaagaacctaaaaaaccctcttg

SEQ ID NO: 1584 - DNA, 22 bp, Homo sapiens
  source 1..22: mol_type = genomic DNA
aagataggggaaagccctctgg

SEQ ID NO: 1585 - DNA, 23 bp, Homo sapiens
  source 1..23: mol_type = genomic DNA
aaggcaaatgaataacccacagc

SEQ ID NO: 1586 - DNA, 21 bp, Homo sapiens
  source 1..21: mol_type = genomic DNA
aaaatacaaataaccctcagt

SEQ ID NO: 1587 - DNA, 22 bp, Homo sapiens
  source 1..22: mol_type = genomic DNA
aagatccagaagaattctctgg

SEQ ID NO: 1588 - DNA, 22 bp, Homo sapiens
  source 1..22: mol_type = genomic DNA
agaatacctgaatacccccaga

SEQ ID NO: 1589 - DNA, 23 bp, Homo sapiens
  source 1..23: mol_type = genomic DNA
caaataccttaatcaccatgagg

SEQ ID NO: 1590 - DNA, 23 bp, Homo sapiens
  source 1..23: mol_type = genomic DNA
aagatgccaacataaagctcagg

SEQ ID NO: 1591 - DNA, 21 bp, Homo sapiens
  source 1..21: mol_type = genomic DNA
taaatacctataaccctgagg

SEQ ID NO: 1592 - DNA, 23 bp, Homo sapiens
  source 1..23: mol_type = genomic DNA
agcacacatgaataaccctaagg

SEQ ID NO: 1593 - DNA, 22 bp, Homo sapiens
  source 1..22: mol_type = genomic DNA
aagatcccagaataactactgg

SEQ ID NO: 1594 - DNA, 19 bp, unidentified
  source 1..19: mol_type = unassigned DNA; note = protospacer sequence
ccaatggcctccttcagtt

SEQ ID NO: 1595 - DNA, 18 bp, unidentified
  source 1..18: mol_type = unassigned DNA; note = protospacer sequence
caatggcctccttcagtt

SEQ ID NO: 1596 - DNA, 17 bp, unidentified
  source 1..17: mol_type = unassigned DNA; note = protospacer sequence
aatggcctccttcagtt

SEQ ID NO: 1597 - DNA, 20 bp, unidentified
  source 1..20: mol_type = unassigned DNA; note = protospacer sequence
tccaatggcctccttcagtt

SEQ ID NO: 1598 - DNA, 20 bp, unidentified
  source 1..20: mol_type = unassigned DNA; note = protospacer sequence
gcgaatggcctcctgcagct

SEQ ID NO: 1599 - DNA, 20 bp, unidentified
  source 1..20: mol_type = unassigned DNA; note = protospacer sequence
agcccttcaacacaaggtca

SEQ ID NO: 1600 - DNA, 20 bp, unidentified
  source 1..20: mol_type = unassigned DNA; note = protospacer sequence
taagaccatgtcccaactga

SEQ ID NO: 1601 - DNA, 20 bp, unidentified
  source 1..20: mol_type = unassigned DNA; note = protospacer sequence
caatgtccccaatgcaatcc

SEQ ID NO: 1602 - DNA, 20 bp, unidentified
  source 1..20: mol_type = unassigned DNA; note = protospacer sequence
ttgttttccgggattgcatt

SEQ ID NO: 1603 - DNA, 20 bp, unidentified
  source 1..20: mol_type = unassigned DNA; note = protospacer sequence
tttgttttccgggattgcat

SEQ ID NO: 1604 - DNA, 20 bp, unidentified
  source 1..20: mol_type = unassigned DNA; note = protospacer sequence
aatcccggaaaacaaagatt

SEQ ID NO: 1605 - DNA, 20 bp, unidentified
  source 1..20: mol_type = unassigned DNA; note = protospacer sequence
tgttttccgggattgcattg

SEQ ID NO: 1606 - DNA, 18 bp, unidentified
  source 1..18: mol_type = unassigned DNA; note = protospacer sequence
gatacctgaataactctc

SEQ ID NO: 1607 - DNA, 17 bp, unidentified
  source 1..17: mol_type = unassigned DNA; note = protospacer sequence
atacctgaataactctc

SEQ ID NO: 1608 - DNA, 20 bp, unidentified
  source 1..20: mol_type = unassigned DNA; note = protospacer sequence
gcaaatcttgattttggctc

SEQ ID NO: 1609 - DNA, 20 bp, unidentified
  source 1..20: mol_type = unassigned DNA; note = protospacer sequence
gatgtaaaaattttagccaa

SEQ ID NO: 1610 - DNA, 20 bp, unidentified
  source 1..20: mol_type = unassigned DNA; note = protospacer sequence
atgaaaaacttgagagttgc

SEQ ID NO: 1611 - DNA, 20 bp, unidentified
  source 1..20: mol_type = unassigned DNA; note = protospacer sequence
acttgggatcacaaagcaaa

SEQ ID NO: 1612 - DNA, 20 bp, unidentified
  source 1..20: mol_type = unassigned DNA; note = protospacer sequence
aagatttggtgttttctact

SEQ ID NO: 1613 - DNA, 20 bp, unidentified
  source 1..20: mol_type = unassigned DNA; note = protospacer sequence
aaggagtacccggggctgca

SEQ ID NO: 1614 - DNA, 20 bp, unidentified
  source 1..20: mol_type = unassigned DNA; note = protospacer sequence
cagaggccaggagcgccagg

SEQ ID NO: 1615 - DNA, 20 bp, unidentified
  source 1..20: mol_type = unassigned DNA; note = protospacer sequence
agaggccaggagcgccagga

SEQ ID NO: 1616 - DNA, 20 bp, unidentified
  source 1..20: mol_type = unassigned DNA; note = protospacer sequence
ctcggcctctgaagctcctg

SEQ ID NO: 1617 - DNA, 19 bp, unidentified
  source 1..19: mol_type = unassigned DNA; note = protospacer sequence
cagctccaggcggtcctgg

SEQ ID NO: 1618 - RNA, 100 nt, synthetic construct; identical to SEQ ID NO: 253
  source 1..100: mol_type = other RNA
  modified_base 1: mod_base = OTHER; note = 2'-O-methyl ribonucleotide
  modified_base 2: mod_base = OTHER; note = 2'-O-methyl ribonucleotide
  modified_base 3: mod_base = OTHER; note = 2'-O-methyl ribonucleotide
  modified_base 21: mod_base = OTHER; note = 2'-O-methyl ribonucleotide
  modified_base 28: mod_base = OTHER; note = 2'-O-methyl ribonucleotide
  modified_base 29: mod_base = OTHER; note = 2'-O-methyl ribonucleotide
  modified_base 30: mod_base = OTHER; note = 2'-O-methyl ribonucleotide
  modified_base 31: mod_base = OTHER; note = 2'-O-methyl ribonucleotide
  modified_base 32: mod_base = OTHER; note = 2'-O-methyl ribonucleotide
  modified_base 33: mod_base = OTHER; note = 2'-O-methyl ribonucleotide
  modified_base 34: mod_base = OTHER; note = 2'-O-methyl ribonucleotide
  modified_base 35: mod_base = OTHER; note = 2'-O-methyl ribonucleotide
  modified_base 36: mod_base = OTHER; note = 2'-O-methyl ribonucleotide
  modified_base 37: mod_base = OTHER; note = 2'-O-methyl ribonucleotide
  modified_base 38: mod_base = OTHER; note = 2'-O-methyl ribonucleotide
  modified_base 39: mod_base = OTHER; note = 2'-O-methyl ribonucleotide
  modified_base 40: mod_base = OTHER; note = 2'-O-methyl ribonucleotide
  modified_base 41: mod_base = OTHER; note = 2'-O-methyl ribonucleotide
  modified_base 42: mod_base = OTHER; note = 2'-O-methyl ribonucleotide
  modified_base 46: mod_base = OTHER; note = 2'-O-methyl ribonucleotide
  modified_base 48: mod_base = OTHER; note = 2'-O-methyl ribonucleotide
  modified_base 50: mod_base = OTHER; note = 2'-O-methyl ribonucleotide
  modified_base 52: mod_base = OTHER; note = 2'-O-methyl ribonucleotide
  modified_base 53: mod_base = OTHER; note = 2'-O-methyl ribonucleotide
  modified_base 54: mod_base = OTHER; note = 2'-O-methyl ribonucleotide
  modified_base 55: mod_base = OTHER; note = 2'-O-methyl ribonucleotide
  modified_base 56: mod_base = OTHER; note = 2'-O-methyl ribonucleotide
  modified_base 57: mod_base = OTHER; note = 2'-O-methyl ribonucleotide
  modified_base 60: mod_base = OTHER; note = 2'-O-methyl ribonucleotide
  modified_base 61: mod_base = OTHER; note = 2'-O-methyl ribonucleotide
  modified_base 66: mod_base = OTHER; note = 2'-O-methyl ribonucleotide
  modified_base 67: mod_base = OTHER; note = 2'-O-methyl ribonucleotide
  modified_base 70: mod_base = OTHER; note = 2'-O-methyl ribonucleotide
  modified_base 71: mod_base = OTHER; note = 2'-O-methyl ribonucleotide
  modified_base 72: mod_base = OTHER; note = 2'-O-methyl ribonucleotide
  modified_base 73: mod_base = OTHER; note = 2'-O-methyl ribonucleotide
  modified_base 74: mod_base = OTHER; note = 2'-O-methyl ribonucleotide
  modified_base 75: mod_base = OTHER; note = 2'-O-methyl ribonucleotide
  modified_base 76: mod_base = OTHER; note = 2'-O-methyl ribonucleotide
  modified_base 77: mod_base = OTHER; note = 2'-O-methyl ribonucleotide
  modified_base 78: mod_base = OTHER; note = 2'-O-methyl ribonucleotide
  modified_base 79: mod_base = OTHER; note = 2'-O-methyl ribonucleotide
  modified_base 80: mod_base = OTHER; note = 2'-O-methyl ribonucleotide
  modified_base 81: mod_base = OTHER; note = 2'-O-methyl ribonucleotide
  modified_base 83: mod_base = OTHER; note = 2'-O-methyl ribonucleotide
  modified_base 84: mod_base = OTHER; note = 2'-O-methyl ribonucleotide
  modified_base 85: mod_base = OTHER; note = 2'-O-methyl ribonucleotide
  modified_base 86: mod_base = OTHER; note = 2'-O-methyl ribonucleotide
  modified_base 87: mod_base = OTHER; note = 2'-O-methyl ribonucleotide
  modified_base 88: mod_base = OTHER; note = 2'-O-methyl ribonucleotide
  modified_base 89: mod_base = OTHER; note = 2'-O-methyl ribonucleotide
  modified_base 90: mod_base = OTHER; note = 2'-O-methyl ribonucleotide
  modified_base 91: mod_base = OTHER; note = 2'-O-methyl ribonucleotide
  modified_base 92: mod_base = OTHER; note = 2'-O-methyl ribonucleotide
  modified_base 93: mod_base = OTHER; note = 2'-O-methyl ribonucleotide
  modified_base 94: mod_base = OTHER; note = 2'-O-methyl ribonucleotide
  modified_base 95: mod_base = OTHER; note = 2'-O-methyl ribonucleotide
  modified_base 96: mod_base = OTHER; note = 2'-O-methyl ribonucleotide
  modified_base 97: mod_base = OTHER; note = 2'-O-methyl ribonucleotide
  modified_base 98: mod_base = OTHER; note = 2'-O-methyl ribonucleotide
  modified_base 99: mod_base = OTHER; note = 2'-O-methyl ribonucleotide
  modified_base 100: mod_base = OTHER; note = 2'-O-methyl ribonucleotide
  modified_base 1..4: mod_base = OTHER; note = phosphorothioate linkage
  modified_base 98..100: mod_base = OTHER; note = phosphorothioate linkage

SEQ ID NO: 1619 - RNA, 100 nt, synthetic construct; identical to SEQ ID NO: 253
  source 1..100: mol_type = other RNA
  modified_base 1: mod_base = OTHER; note = 2'-O-methyl ribonucleotide
  modified_base 2: mod_base = OTHER; note = 2'-O-methyl ribonucleotide
  modified_base 3: mod_base = OTHER; note = 2'-O-methyl ribonucleotide
  modified_base 21: mod_base = OTHER; note = 2'-O-methyl ribonucleotide
  modified_base 28: mod_base = OTHER; note = 2'-O-methyl ribonucleotide
  modified_base 29: mod_base = OTHER; note = 2'-O-methyl ribonucleotide
  modified_base 30: mod_base = OTHER; note = 2'-O-methyl ribonucleotide
  modified_base 31: mod_base = OTHER; note = 2'-O-methyl ribonucleotide
  modified_base 32: mod_base = OTHER; note = 2'-O-methyl ribonucleotide
  modified_base 33: mod_base = OTHER; note = 2'-O-methyl ribonucleotide
  modified_base 34: mod_base = OTHER; note = 2'-O-methyl ribonucleotide
  modified_base 35: mod_base = OTHER; note = 2'-O-methyl ribonucleotide
  modified_base 36: mod_base = OTHER; note = 2'-O-methyl ribonucleotide
  modified_base 37: mod_base = OTHER; note = 2'-O-methyl ribonucleotide
  modified_base 38: mod_base = OTHER; note = 2'-O-methyl ribonucleotide
  modified_base 39: mod_base = OTHER; note = 2'-O-methyl ribonucleotide
  modified_base 40: mod_base = OTHER; note = 2'-O-methyl ribonucleotide
  modified_base 41: mod_base = OTHER; note = 2'-O-methyl ribonucleotide
  modified_base 42: mod_base = OTHER; note = 2'-O-methyl ribonucleotide
  modified_base 46: mod_base = OTHER; note = 2'-O-methyl ribonucleotide
  modified_base 48: mod_base = OTHER; note = 2'-O-methyl ribonucleotide
  modified_base 50: mod_base = OTHER; note = 2'-O-methyl ribonucleotide
  modified_base 52: mod_base = OTHER; note = 2'-O-methyl ribonucleotide
  modified_base 53: mod_base = OTHER; note = 2'-O-methyl ribonucleotide
  modified_base 54: mod_base = OTHER; note = 2'-O-methyl ribonucleotide
  modified_base 55: mod_base = OTHER; note = 2'-O-methyl ribonucleotide
  modified_base 56: mod_base = OTHER; note = 2'-O-methyl ribonucleotide
  modified_base 57: mod_base = OTHER; note = 2'-O-methyl ribonucleotide
  modified_base 60: mod_base = OTHER; note = 2'-O-methyl ribonucleotide
  modified_base 61: mod_base = OTHER; note = 2'-O-methyl ribonucleotide
  modified_base 66: mod_base = OTHER; note = 2'-O-methyl ribonucleotide
  modified_base 67: mod_base = OTHER; note = 2'-O-methyl ribonucleotide
  modified_base 70: mod_base = OTHER; note = 2'-O-methyl ribonucleotide
  modified_base 71: mod_base = OTHER; note = 2'-O-methyl ribonucleotide
  modified_base 72: mod_base = OTHER; note = 2'-O-methyl ribonucleotide
  modified_base 73: mod_base = OTHER; note = 2'-O-methyl ribonucleotide
  modified_base 74: mod_base = OTHER; note = 2'-O-methyl ribonucleotide
  modified_base 75: mod_base = OTHER; note = 2'-O-methyl ribonucleotide
  modified_base 76: mod_base = OTHER; note = 2'-O-methyl ribonucleotide
  modified_base 77: mod_base = OTHER; note = 2'-O-methyl ribonucleotide
  modified_base 78: mod_base = OTHER; note = 2'-O-methyl ribonucleotide
  modified_base 79: mod_base = OTHER; note = 2'-O-methyl ribonucleotide
  modified_base 80: mod_base = OTHER; note = 2'-O-methyl ribonucleotide
  modified_base 81: mod_base = OTHER; note = 2'-O-methyl ribonucleotide
  modified_base 83: mod_base = OTHER; note = 2'-O-methyl ribonucleotide
  modified_base 84: mod_base = OTHER; note = 2'-O-methyl ribonucleotide
  modified_base 85: mod_base = OTHER; note = 2'-O-methyl ribonucleotide
  modified_base 86: mod_base = OTHER; note = 2'-O-methyl ribonucleotide
  modified_base 87: mod_base = OTHER; note = 2'-O-methyl ribonucleotide
  modified_base 88: mod_base = OTHER; note = 2'-O-methyl ribonucleotide
  modified_base 89: mod_base = OTHER; note = 2'-O-methyl ribonucleotide
  modified_base 90: mod_base = OTHER; note = 2'-O-methyl ribonucleotide
  modified_base 91: mod_base = OTHER; note = 2'-O-methyl ribonucleotide
  modified_base 92: mod_base = OTHER; note = 2'-O-methyl ribonucleotide
  modified_base 93: mod_base = OTHER; note = 2'-O-methyl ribonucleotide
  modified_base 94: mod_base = OTHER; note = 2'-O-methyl ribonucleotide
  modified_base 95: mod_base = OTHER; note = 2'-O-methyl ribonucleotide
  modified_base 96: mod_base = OTHER; note = 2'-O-methyl ribonucleotide
  modified_base 97: mod_base = OTHER; note = 2'-O-methyl ribonucleotide
  modified_base 98: mod_base = OTHER; note = 2'-O-methyl ribonucleotide
  modified_base 99: mod_base = OTHER; note = 2'-O-methyl ribonucleotide
  modified_base 100: mod_base = OTHER; note = 2'-O-methyl ribonucleotide
  modified_base 1..3: mod_base = OTHER; note = phosphorothioate linkage
  modified_base 97..100: mod_base = OTHER; note = phosphorothioate linkage

SEQ ID NO: 1620 - RNA, 100 nt, synthetic construct; identical to SEQ ID NO: 253
  source 1..100: mol_type = other RNA
  modified_base 1: mod_base = OTHER; note = 2'-O-methyl ribonucleotide
  modified_base 2: mod_base = OTHER; note = 2'-O-methyl ribonucleotide
  modified_base 3: mod_base = OTHER; note = 2'-O-methyl ribonucleotide
  modified_base 21: mod_base = OTHER; note = 2'-O-methyl ribonucleotide
  modified_base 28: mod_base = OTHER; note = 2'-O-methyl ribonucleotide
  modified_base 29: mod_base = OTHER; note = 2'-O-methyl ribonucleotide
  modified_base 30: mod_base = OTHER; note = 2'-O-methyl ribonucleotide
  modified_base 31: mod_base = OTHER; note = 2'-O-methyl ribonucleotide
  modified_base 32: mod_base = OTHER; note = 2'-O-methyl ribonucleotide
  modified_base 33: mod_base = OTHER; note = 2'-O-methyl ribonucleotide
  modified_base 34: mod_base = OTHER; note = 2'-O-methyl ribonucleotide
  modified_base 35: mod_base = OTHER; note = 2'-O-methyl ribonucleotide
  modified_base 36: mod_base = OTHER; note = 2'-O-methyl ribonucleotide
  modified_base 37: mod_base = OTHER; note = 2'-O-methyl ribonucleotide
  modified_base 38: mod_base = OTHER; note = 2'-O-methyl ribonucleotide
  modified_base 39: mod_base = OTHER; note = 2'-O-methyl ribonucleotide
  modified_base 40: mod_base = OTHER; note = 2'-O-methyl ribonucleotide
  modified_base 41: mod_base = OTHER; note = 2'-O-methyl ribonucleotide
  modified_base 42: mod_base = OTHER; note = 2'-O-methyl ribonucleotide
  modified_base 46: mod_base = OTHER; note = 2'-O-methyl ribonucleotide
  modified_base 48: mod_base = OTHER; note = 2'-O-methyl ribonucleotide
  modified_base 50: mod_base = OTHER; note = 2'-O-methyl ribonucleotide
  modified_base 52: mod_base = OTHER; note = 2'-O-methyl ribonucleotide
  modified_base 53: mod_base = OTHER; note = 2'-O-methyl ribonucleotide
  modified_base 54: mod_base = OTHER; note = 2'-O-methyl ribonucleotide
  modified_base 55: mod_base = OTHER; note = 2'-O-methyl ribonucleotide
  modified_base 56: mod_base = OTHER; note = 2'-O-methyl ribonucleotide
  modified_base 57: mod_base = OTHER; note = 2'-O-methyl ribonucleotide
  modified_base 60: mod_base = OTHER; note = 2'-O-methyl ribonucleotide
  modified_base 61: mod_base = OTHER; note = 2'-O-methyl ribonucleotide
  modified_base 66: mod_base = OTHER; note = 2'-O-methyl ribonucleotide
  modified_base 67: mod_base = OTHER; note = 2'-O-methyl ribonucleotide
  modified_base 70: mod_base = OTHER; note = 2'-O-methyl ribonucleotide
  modified_base 71: mod_base = OTHER; note = 2'-O-methyl ribonucleotide
  modified_base 72: mod_base = OTHER; note = 2'-O-methyl ribonucleotide
  modified_base 73: mod_base = OTHER; note = 2'-O-methyl ribonucleotide
  modified_base 74: mod_base = OTHER; note = 2'-O-methyl ribonucleotide
  modified_base 75: mod_base = OTHER; note = 2'-O-methyl ribonucleotide
  modified_base 76: mod_base = OTHER; note = 2'-O-methyl ribonucleotide
  modified_base 77: mod_base = OTHER; note = 2'-O-methyl ribonucleotide
  modified_base 78: mod_base = OTHER; note = 2'-O-methyl ribonucleotide
  modified_base 79: mod_base = OTHER; note = 2'-O-methyl ribonucleotide
  modified_base 80: mod_base = OTHER; note = 2'-O-methyl ribonucleotide
  modified_base 81: mod_base = OTHER; note = 2'-O-methyl ribonucleotide
  modified_base 83: mod_base = OTHER; note = 2'-O-methyl ribonucleotide
  modified_base 84: mod_base = OTHER; note = 2'-O-methyl ribonucleotide
  modified_base 85: mod_base = OTHER; note = 2'-O-methyl ribonucleotide
  modified_base 86: mod_base = OTHER; note = 2'-O-methyl ribonucleotide
  modified_base 87: mod_base = OTHER; note = 2'-O-methyl ribonucleotide
  modified_base 88: mod_base = OTHER; note = 2'-O-methyl ribonucleotide
  modified_base 89: mod_base = OTHER; note = 2'-O-methyl ribonucleotide
  modified_base 90: mod_base = OTHER; note = 2'-O-methyl ribonucleotide
  modified_base 91: mod_base = OTHER; note = 2'-O-methyl ribonucleotide
  modified_base 92: mod_base = OTHER; note = 2'-O-methyl ribonucleotide
  modified_base 93: mod_base = OTHER; note = 2'-O-methyl ribonucleotide
  modified_base 94: mod_base = OTHER; note = 2'-O-methyl ribonucleotide
  modified_base 95: mod_base = OTHER; note = 2'-O-methyl ribonucleotide
  modified_base 96: mod_base = OTHER; note = 2'-O-methyl ribonucleotide
  modified_base 97: mod_base = OTHER; note = 2'-O-methyl ribonucleotide
  modified_base 98: mod_base = OTHER; note = 2'-O-methyl ribonucleotide
  modified_base 99: mod_base = OTHER; note = 2'-O-methyl ribonucleotide
  modified_base 100: mod_base = OTHER; note = 2'-O-methyl ribonucleotide
  modified_base 1..3: mod_base = OTHER; note = phosphorothioate linkage
  modified_base 98..100: mod_base = OTHER; note = phosphorothioate linkage

SEQ ID NO: 1621 - RNA, 100 nt, synthetic construct; identical to SEQ ID NO: 253
  source 1..100: mol_type = other RNA
  modified_base 1: mod_base = OTHER; note = 2'-O-methyl ribonucleotide
  modified_base 2: mod_base = OTHER; note = 2'-O-methyl ribonucleotide
  modified_base 3: mod_base = OTHER; note = 2'-O-methyl ribonucleotide
  modified_base 21: mod_base = OTHER; note = 2'-O-methyl ribonucleotide
  modified_base 28: mod_base = OTHER; note = 2'-O-methyl ribonucleotide
  modified_base 29: mod_base = OTHER; note = 2'-O-methyl ribonucleotide
  modified_base 30: mod_base = OTHER; note = 2'-O-methyl ribonucleotide
  modified_base 31: mod_base = OTHER; note = 2'-O-methyl ribonucleotide
  modified_base 32: mod_base = OTHER; note = 2'-O-methyl ribonucleotide
  modified_base 33: mod_base = OTHER; note = 2'-O-methyl ribonucleotide
  modified_base 34: mod_base = OTHER; note = 2'-O-methyl ribonucleotide
  modified_base 35: mod_base = OTHER; note = 2'-O-methyl ribonucleotide
  modified_base 36: mod_base = OTHER; note = 2'-O-methyl ribonucleotide
  modified_base 37: mod_base = OTHER; note = 2'-O-methyl ribonucleotide
  modified_base 38: mod_base = OTHER; note = 2'-O-methyl ribonucleotide
  modified_base 39: mod_base = OTHER; note = 2'-O-methyl ribonucleotide
  modified_base 40: mod_base = OTHER; note = 2'-O-methyl ribonucleotide
  modified_base 41: mod_base = OTHER; note = 2'-O-methyl ribonucleotide
  modified_base 42: mod_base = OTHER; note = 2'-O-methyl ribonucleotide
  modified_base 46: mod_base = OTHER; note = 2'-O-methyl ribonucleotide
  modified_base 48: mod_base = OTHER; note = 2'-O-methyl ribonucleotide
  modified_base 50: mod_base = OTHER; note = 2'-O-methyl ribonucleotide
  modified_base 52: mod_base = OTHER; note = 2'-O-methyl ribonucleotide
  modified_base 53: mod_base = OTHER; note = 2'-O-methyl ribonucleotide
  modified_base 54: mod_base = OTHER; note = 2'-O-methyl ribonucleotide
  modified_base 55: mod_base = OTHER; note = 2'-O-methyl ribonucleotide
  modified_base 56: mod_base = OTHER; note = 2'-O-methyl ribonucleotide
  modified_base 57: mod_base = OTHER; note = 2'-O-methyl ribonucleotide
  modified_base 60: mod_base = OTHER; note = 2'-O-methyl ribonucleotide
  modified_base 61: mod_base = OTHER; note = 2'-O-methyl ribonucleotide
  modified_base 66: mod_base = OTHER; note = 2'-O-methyl ribonucleotide
  modified_base 67: mod_base = OTHER; note = 2'-O-methyl ribonucleotide
  modified_base 70: mod_base = OTHER; note = 2'-O-methyl ribonucleotide
  modified_base 71: mod_base = OTHER; note = 2'-O-methyl ribonucleotide
  modified_base 72: mod_base = OTHER; note = 2'-O-methyl ribonucleotide
  modified_base 73: mod_base = OTHER; note = 2'-O-methyl ribonucleotide
  modified_base 74: mod_base = OTHER; note = 2'-O-methyl ribonucleotide
  modified_base 75: mod_base = OTHER; note = 2'-O-methyl ribonucleotide
  modified_base 76: mod_base = OTHER; note = 2'-O-methyl ribonucleotide
  modified_base 77: mod_base = OTHER; note = 2'-O-methyl ribonucleotide
  modified_base 78: mod_base = OTHER; note = 2'-O-methyl ribonucleotide
  modified_base 79: mod_base = OTHER; note = 2'-O-methyl ribonucleotide
  modified_base 80: mod_base = OTHER; note = 2'-O-methyl ribonucleotide
  modified_base 81: mod_base = OTHER; note = 2'-O-methyl ribonucleotide
  modified_base 83: mod_base = OTHER; note = 2'-O-methyl ribonucleotide
  modified_base 84: mod_base = OTHER; note = 2'-O-methyl ribonucleotide
  modified_base 85: mod_base = OTHER; note = 2'-O-methyl ribonucleotide
  modified_base 86: mod_base = OTHER; note = 2'-O-methyl ribonucleotide
  modified_base 87: mod_base = OTHER; note = 2'-O-methyl ribonucleotide
  modified_base 88: mod_base = OTHER; note = 2'-O-methyl ribonucleotide
  modified_base 89: mod_base = OTHER; note = 2'-O-methyl ribonucleotide
  modified_base 90: mod_base = OTHER; note = 2'-O-methyl ribonucleotide
  modified_base 91: mod_base = OTHER; note = 2'-O-methyl ribonucleotide
  modified_base 92: mod_base = OTHER; note = 2'-O-methyl ribonucleotide
  modified_base 93: mod_base = OTHER; note = 2'-O-methyl ribonucleotide
  modified_base 94: mod_base = OTHER; note = 2'-O-methyl ribonucleotide
  modified_base 95: mod_base = OTHER; note = 2'-O-methyl ribonucleotide
  modified_base 96: mod_base = OTHER; note = 2'-O-methyl ribonucleotide
  modified_base 97: mod_base = OTHER; note = 2'-O-methyl ribonucleotide
  modified_base 98: mod_base = OTHER; note = 2'-O-methyl ribonucleotide
  modified_base 99: mod_base = OTHER; note = 2'-O-methyl ribonucleotide
  modified_base 100: mod_base = OTHER; note = 2'-O-methyl ribonucleotide
  modified_base 1..3: mod_base = OTHER; note = phosphorothioate linkage
  modified_base 99..100: mod_base = OTHER; note = phosphorothioate linkage

SEQ ID NO: 1622 - RNA, 100 nt, synthetic construct
  source 1..100: mol_type = other RNA
  modified_base 1: mod_base = OTHER; note = 2'-O-methyl ribonucleotide
  modified_base 2: mod_base = OTHER; note = 2'-O-methyl ribonucleotide
  modified_base 3: mod_base = OTHER; note = 2'-O-methyl ribonucleotide
  modified_base 29: mod_base = OTHER; note = 2'-O-methyl ribonucleotide
  modified_base 30: mod_base = OTHER; note = 2'-O-methyl ribonucleotide
  modified_base 31: mod_base = OTHER; note = 2'-O-methyl ribonucleotide
  modified_base 32: mod_base = OTHER; note = 2'-O-methyl ribonucleotide
  modified_base 33: mod_base = OTHER; note = 2'-O-methyl ribonucleotide
  modified_base 34: mod_base = OTHER; note = 2'-O-methyl ribonucleotide
  modified_base 35: mod_base = OTHER; note = 2'-O-methyl ribonucleotide
  modified_base 36: mod_base = OTHER; note = 2'-O-methyl ribonucleotide
  modified_base 37: mod_base = OTHER; note = 2'-O-methyl ribonucleotide
  modified_base 38: mod_base = OTHER; note = 2'-O-methyl ribonucleotide
  modified_base 39: mod_base = OTHER; note = 2'-O-methyl ribonucleotide
  modified_base 40: mod_base = OTHER; note = 2'-O-methyl ribonucleotide
  modified_base 69: mod_base = OTHER; note = 2'-O-methyl ribonucleotide
  modified_base 70: mod_base = OTHER; note = 2'-O-methyl ribonucleotide
  modified_base 71: mod_base = OTHER; note = 2'-O-methyl ribonucleotide
  modified_base 72: mod_base = OTHER; note = 2'-O-methyl ribonucleotide
  modified_base 73: mod_base = OTHER; note = 2'-O-methyl ribonucleotide
  modified_base 74: mod_base = OTHER; note = 2'-O-methyl ribonucleotide
  modified_base 75: mod_base = OTHER; note = 2'-O-methyl ribonucleotide
  modified_base 76: mod_base = OTHER; note = 2'-O-methyl ribonucleotide
  modified_base 77: mod_base = OTHER; note = 2'-O-methyl ribonucleotide
  modified_base 78: mod_base = OTHER; note = 2'-O-methyl ribonucleotide
  modified_base 79: mod_base = OTHER; note = 2'-O-methyl ribonucleotide
  modified_base 80: mod_base = OTHER; note = 2'-O-methyl ribonucleotide
  modified_base 81: mod_base = OTHER; note = 2'-O-methyl ribonucleotide
  modified_base 82: mod_base = OTHER; note = 2'-O-methyl ribonucleotide
  modified_base 83: mod_base = OTHER; note = 2'-O-methyl ribonucleotide
  modified_base 84: mod_base = OTHER; note = 2'-O-methyl ribonucleotide
  modified_base 85: mod_base = OTHER; note = 2'-O-methyl ribonucleotide
  modified_base 86: mod_base = OTHER; note = 2'-O-methyl ribonucleotide
  modified_base 87: mod_base = OTHER; note = 2'-O-methyl ribonucleotide
  modified_base 88: mod_base = OTHER; note = 2'-O-methyl ribonucleotide
  modified_base 89: mod_base = OTHER; note = 2'-O-methyl ribonucleotide
  modified_base 90: mod_base = OTHER; note = 2'-O-methyl ribonucleotide
  modified_base 91: mod_base = OTHER; note = 2'-O-methyl ribonucleotide
  modified_base 92: mod_base = OTHER; note = 2'-O-methyl ribonucleotide
  modified_base 93: mod_base = OTHER; note = 2'-O-methyl ribonucleotide
  modified_base 94: mod_base = OTHER; note = 2'-O-methyl ribonucleotide
  modified_base 95: mod_base = OTHER; note = 2'-O-methyl ribonucleotide
  modified_base 96: mod_base = OTHER; note = 2'-O-methyl ribonucleotide
  modified_base 97: mod_base = OTHER; note = 2'-O-methyl ribonucleotide
  modified_base 98: mod_base = OTHER; note = 2'-O-methyl ribonucleotide
  modified_base 99: mod_base = OTHER; note = 2'-O-methyl ribonucleotide
  modified_base 100: mod_base = OTHER; note = 2'-O-methyl ribonucleotide
  modified_base 1: mod_base = OTHER; note = inosine
  modified_base 1..4: mod_base = OTHER; note = phosphorothioate linkage
  modified_base 97..100: mod_base = OTHER; note = phosphorothioate linkage
nccaatggcctccttcagttgttttagagctagaaatagcaagttaaaataaggctagtccgttatcaacttgaaaaagtggcaccgagtcggtgctttt

SEQ ID NO: 1623 - RNA, 99 nt, synthetic construct
  source 1..99: mol_type = other RNA
  modified_base 1: mod_base = OTHER; note = 2'-O-methyl ribonucleotide
  modified_base 2: mod_base = OTHER; note = 2'-O-methyl ribonucleotide
  modified_base 28: mod_base = OTHER; note = 2'-O-methyl ribonucleotide
  modified_base 29: mod_base = OTHER; note = 2'-O-methyl ribonucleotide
  modified_base 30: mod_base = OTHER; note = 2'-O-methyl ribonucleotide
  modified_base 31: mod_base = OTHER; note = 2'-O-methyl ribonucleotide
  modified_base 32: mod_base = OTHER; note = 2'-O-methyl ribonucleotide
  modified_base 33: mod_base = OTHER; note = 2'-O-methyl ribonucleotide
  modified_base 34: mod_base = OTHER; note = 2'-O-methyl ribonucleotide
  modified_base 35: mod_base = OTHER; note = 2'-O-methyl ribonucleotide
  modified_base 36: mod_base = OTHER; note = 2'-O-methyl ribonucleotide
  modified_base 37: mod_base = OTHER; note = 2'-O-methyl ribonucleotide
  modified_base 38: mod_base = OTHER; note = 2'-O-methyl ribonucleotide
  modified_base 39: mod_base = OTHER; note = 2'-O-methyl ribonucleotide
  modified_base 68: mod_base = OTHER; note = 2'-O-methyl ribonucleotide
  modified_base 69: mod_base = OTHER; note = 2'-O-methyl ribonucleotide
  modified_base 70: mod_base = OTHER; note = 2'-O-methyl ribonucleotide
  modified_base 71: mod_base = OTHER; note = 2'-O-methyl ribonucleotide
  modified_base 72: mod_base = OTHER; note = 2'-O-methyl ribonucleotide
  modified_base 73: mod_base = OTHER; note = 2'-O-methyl ribonucleotide
  modified_base 74: mod_base = OTHER; note = 2'-O-methyl ribonucleotide
  modified_base 75: mod_base = OTHER; note = 2'-O-methyl ribonucleotide
  modified_base 76: mod_base = OTHER; note = 2'-O-methyl ribonucleotide
  modified_base 77: mod_base = OTHER; note = 2'-O-methyl ribonucleotide
  modified_base 78: mod_base = OTHER; note = 2'-O-methyl ribonucleotide
  modified_base 79: mod_base = OTHER; note = 2'-O-methyl ribonucleotide
  modified_base 80: mod_base = OTHER; note = 2'-O-methyl ribonucleotide
  modified_base 81: mod_base = OTHER; note = 2'-O-methyl ribonucleotide
  modified_base 82: mod_base = OTHER; note = 2'-O-methyl ribonucleotide
  modified_base 83: mod_base = OTHER; note = 2'-O-methyl ribonucleotide
  modified_base 84: mod_base = OTHER; note = 2'-O-methyl ribonucleotide
  modified_base 85: mod_base = OTHER; note = 2'-O-methyl ribonucleotide
  modified_base 86: mod_base = OTHER; note = 2'-O-methyl ribonucleotide
  modified_base 87: mod_base = OTHER; note = 2'-O-methyl ribonucleotide
  modified_base 88: mod_base = OTHER; note = 2'-O-methyl ribonucleotide
  modified_base 89: mod_base = OTHER; note = 2'-O-methyl ribonucleotide
  modified_base 90: mod_base = OTHER; note = 2'-O-methyl ribonucleotide
  modified_base 91: mod_base = OTHER; note = 2'-O-methyl ribonucleotide
  modified_base 92: mod_base = OTHER; note = 2'-O-methyl ribonucleotide
  modified_base 93: mod_base = OTHER; note = 2'-O-methyl ribonucleotide
  modified_base 94: mod_base = OTHER; note = 2'-O-methyl ribonucleotide
  modified_base 95: mod_base = OTHER; note = 2'-O-methyl ribonucleotide
  modified_base 96: mod_base = OTHER; note = 2'-O-methyl ribonucleotide
  modified_base 97: mod_base = OTHER; note = 2'-O-methyl ribonucleotide
  modified_base 98: mod_base = OTHER; note = 2'-O-methyl ribonucleotide
  modified_base 99: mod_base = OTHER; note = 2'-O-methyl ribonucleotide
  modified_base 1..3: mod_base = OTHER; note = phosphorothioate linkage
  modified_base 96..99: mod_base = OTHER; note = phosphorothioate linkage
ccaatggcctccttcagttgttttagagctagaaatagcaagttaaaataaggctagtccgttatcaacttgaaaaagtggcaccgagtcggtgctttt

SEQ ID NO: 1624 - RNA, 98 nt, synthetic construct
  source 1..98: mol_type = other RNA
  modified_base 1: mod_base = OTHER; note = 2'-O-methyl ribonucleotide
  modified_base 27: mod_base = OTHER; note = 2'-O-methyl ribonucleotide
  modified_base 28: mod_base = OTHER; note = 2'-O-methyl ribonucleotide
  modified_base 29: mod_base = OTHER; note = 2'-O-methyl ribonucleotide
  modified_base 30: mod_base = OTHER; note = 2'-O-methyl ribonucleotide
  modified_base 31: mod_base = OTHER; note = 2'-O-methyl ribonucleotide
  modified_base 32: mod_base = OTHER; note = 2'-O-methyl ribonucleotide
  modified_base 33: mod_base = OTHER; note = 2'-O-methyl ribonucleotide
  modified_base 34: mod_base = OTHER; note = 2'-O-methyl ribonucleotide
  modified_base 35: mod_base = OTHER; note = 2'-O-methyl ribonucleotide
  modified_base 36: mod_base = OTHER; note = 2'-O-methyl ribonucleotide
  modified_base 37: mod_base = OTHER; note = 2'-O-methyl ribonucleotide
  modified_base 38: mod_base = OTHER; note = 2'-O-methyl ribonucleotide
  modified_base 67: mod_base = OTHER; note = 2'-O-methyl ribonucleotide
  modified_base 68: mod_base = OTHER; note = 2'-O-methyl ribonucleotide
  modified_base 69: mod_base = OTHER; note = 2'-O-methyl ribonucleotide
  modified_base 70: mod_base = OTHER; note = 2'-O-methyl ribonucleotide
  modified_base 71: mod_base = OTHER; note = 2'-O-methyl ribonucleotide
  modified_base 72: mod_base = OTHER; note = 2'-O-methyl ribonucleotide
  modified_base 73: mod_base = OTHER; note = 2'-O-methyl ribonucleotide
  modified_base 74: mod_base = OTHER; note = 2'-O-methyl ribonucleotide
  modified_base 75: mod_base = OTHER; note = 2'-O-methyl ribonucleotide
  modified_base 76: mod_base = OTHER; note = 2'-O-methyl ribonucleotide
  modified_base 77: mod_base = OTHER; note = 2'-O-methyl ribonucleotide
  modified_base 78: mod_base = OTHER; note = 2'-O-methyl ribonucleotide
  modified_base 79: mod_base = OTHER; note = 2'-O-methyl ribonucleotide
  modified_base 80: mod_base = OTHER; note = 2'-O-methyl ribonucleotide
  modified_base 81: mod_base = OTHER; note = 2'-O-methyl ribonucleotide
  modified_base 82: mod_base = OTHER; note = 2'-O-methyl ribonucleotide
  modified_base 83: mod_base = OTHER; note = 2'-O-methyl ribonucleotide
  modified_base 84: mod_base = OTHER; note = 2'-O-methyl ribonucleotide
  modified_base 85: mod_base = OTHER; note = 2'-O-methyl ribonucleotide
  modified_base 86: mod_base = OTHER; note = 2'-O-methyl ribonucleotide
  modified_base 87: mod_base = OTHER; note = 2'-O-methyl ribonucleotide
  modified_base 88: mod_base = OTHER; note = 2'-O-methyl ribonucleotide
  modified_base 89: mod_base = OTHER; note = 2'-O-methyl ribonucleotide
  modified_base 90: mod_base = OTHER; note = 2'-O-methyl ribonucleotide
  modified_base 91: mod_base = OTHER; note = 2'-O-methyl ribonucleotide
  modified_base 92: mod_base = OTHER; note = 2'-O-methyl ribonucleotide
  modified_base 93: mod_base = OTHER; note = 2'-O-methyl ribonucleotide
  modified_base 94: mod_base = OTHER; note = 2'-O-methyl ribonucleotide
  modified_base 95: mod_base = OTHER; note = 2'-O-methyl ribonucleotide
  modified_base 96: mod_base = OTHER; note = 2'-O-methyl ribonucleotide
  modified_base 97: mod_base = OTHER; note = 2'-O-methyl ribonucleotide
  modified_base 98: mod_base = OTHER; note = 2'-O-methyl ribonucleotide
  modified_base 1..2: mod_base = OTHER; note = phosphorothioate linkage
  modified_base 95..98: mod_base = OTHER; note = phosphorothioate linkage
caatggcctccttcagttgttttagagctagaaatagcaagttaaaataaggctagtccgttatcaacttgaaaaagtggcaccgagtcggtgctttt

SEQ ID NO: 1625 - RNA, 98 nt, synthetic construct; identical to SEQ ID NO: 1624
  source 1..98: mol_type = other RNA
  modified_base 1: mod_base = OTHER; note = 2'-O-methyl ribonucleotide
  modified_base 2: mod_base = OTHER; note = 2'-O-methyl ribonucleotide
  modified_base 27: mod_base = OTHER; note = 2'-O-methyl ribonucleotide
  modified_base 28: mod_base = OTHER; note = 2'-O-methyl ribonucleotide
  modified_base 29: mod_base = OTHER; note = 2'-O-methyl ribonucleotide
  modified_base 30: mod_base = OTHER; note = 2'-O-methyl ribonucleotide
  modified_base 31: mod_base = OTHER; note = 2'-O-methyl ribonucleotide
  modified_base 32: mod_base = OTHER; note = 2'-O-methyl ribonucleotide
  modified_base 33: mod_base = OTHER; note = 2'-O-methyl ribonucleotide
  modified_base 34: mod_base = OTHER; note = 2'-O-methyl ribonucleotide
  modified_base 35: mod_base = OTHER; note = 2'-O-methyl ribonucleotide
  modified_base 36: mod_base = OTHER; note = 2'-O-methyl ribonucleotide
  modified_base 37: mod_base = OTHER; note = 2'-O-methyl ribonucleotide
  modified_base 38: mod_base = OTHER; note = 2'-O-methyl ribonucleotide
  modified_base 67: mod_base = OTHER; note = 2'-O-methyl ribonucleotide
  modified_base 68: mod_base = OTHER; note = 2'-O-methyl ribonucleotide
  modified_base 69: mod_base = OTHER; note = 2'-O-methyl ribonucleotide
  modified_base 70: mod_base = OTHER; note = 2'-O-methyl ribonucleotide
  modified_base 71: mod_base = OTHER; note = 2'-O-methyl ribonucleotide
  modified_base 72: mod_base = OTHER; note = 2'-O-methyl ribonucleotide
  modified_base 73: mod_base = OTHER; note = 2'-O-methyl ribonucleotide
  modified_base 74: mod_base = OTHER; note = 2'-O-methyl ribonucleotide
  modified_base 75: mod_base = OTHER; note = 2'-O-methyl ribonucleotide
  modified_base 76: mod_base = OTHER; note = 2'-O-methyl ribonucleotide
  modified_base 77: mod_base = OTHER; note = 2'-O-methyl ribonucleotide
  modified_base 78: mod_base = OTHER; note = 2'-O-methyl ribonucleotide
  modified_base 79: mod_base = OTHER; note = 2'-O-methyl ribonucleotide
  modified_base 80: mod_base = OTHER; note = 2'-O-methyl ribonucleotide
  modified_base 81: mod_base = OTHER; note = 2'-O-methyl ribonucleotide
  modified_base 82: mod_base = OTHER; note = 2'-O-methyl ribonucleotide
  modified_base 83: mod_base = OTHER; note = 2'-O-methyl ribonucleotide
  modified_base 84: mod_base = OTHER; note = 2'-O-methyl ribonucleotide
  modified_base 85: mod_base = OTHER; note = 2'-O-methyl ribonucleotide
  modified_base 86: mod_base = OTHER; note = 2'-O-methyl ribonucleotide
  modified_base 87: mod_base = OTHER; note = 2'-O-methyl ribonucleotide
  modified_base 88: mod_base = OTHER; note = 2'-O-methyl ribonucleotide
  modified_base 89: mod_base = OTHER; note = 2'-O-methyl ribonucleotide
  modified_base 90: mod_base = OTHER; note = 2'-O-methyl ribonucleotide
  modified_base 91: mod_base = OTHER; note = 2'-O-methyl ribonucleotide
  modified_base 92: mod_base = OTHER; note = 2'-O-methyl ribonucleotide
  modified_base 93: mod_base = OTHER; note = 2'-O-methyl ribonucleotide
  modified_base 94: mod_base = OTHER; note = 2'-O-methyl ribonucleotide
  modified_base 95: mod_base = OTHER; note = 2'-O-methyl ribonucleotide
  modified_base 96: mod_base = OTHER; note = 2'-O-methyl ribonucleotide
  modified_base 97: mod_base = OTHER; note = 2'-O-methyl ribonucleotide
  modified_base 98: mod_base = OTHER; note = 2'-O-methyl ribonucleotide
  modified_base 1..3: mod_base = OTHER; note = phosphorothioate linkage
  modified_base 95..98: mod_base = OTHER; note = phosphorothioate linkage

SEQ ID NO: 1626 - RNA, 97 nt, synthetic construct
  source 1..97: mol_type = other RNA
  modified_base 26: mod_base = OTHER; note = 2'-O-methyl ribonucleotide
  modified_base 27: mod_base = OTHER; note = 2'-O-methyl ribonucleotide
  modified_base 28: mod_base = OTHER; note = 2'-O-methyl ribonucleotide
  modified_base 29: mod_base = OTHER; note = 2'-O-methyl ribonucleotide
  modified_base 30: mod_base = OTHER; note = 2'-O-methyl ribonucleotide
  modified_base 31: mod_base = OTHER; note = 2'-O-methyl ribonucleotide
  modified_base 32: mod_base = OTHER; note = 2'-O-methyl ribonucleotide
  modified_base 33: mod_base = OTHER; note = 2'-O-methyl ribonucleotide
  modified_base 34: mod_base = OTHER; note = 2'-O-methyl ribonucleotide
  modified_base 35: mod_base = OTHER; note = 2'-O-methyl ribonucleotide
  modified_base 36: mod_base = OTHER; note = 2'-O-methyl ribonucleotide
  modified_base 37: mod_base = OTHER; note = 2'-O-methyl ribonucleotide
  modified_base 66: mod_base = OTHER; note = 2'-O-methyl ribonucleotide
  modified_base 67: mod_base = OTHER; note = 2'-O-methyl ribonucleotide
  modified_base 68: mod_base = OTHER; note = 2'-O-methyl ribonucleotide
  modified_base 69: mod_base = OTHER; note = 2'-O-methyl ribonucleotide
  modified_base 70: mod_base = OTHER; note = 2'-O-methyl ribonucleotide
  modified_base 71: mod_base = OTHER; note = 2'-O-methyl ribonucleotide
  modified_base 72: mod_base = OTHER; note = 2'-O-methyl ribonucleotide
  modified_base 73: mod_base = OTHER; note = 2'-O-methyl ribonucleotide
  modified_base 74: mod_base = OTHER; note = 2'-O-methyl ribonucleotide
  modified_base 75: mod_base = OTHER; note = 2'-O-methyl ribonucleotide
  modified_base 76: mod_base = OTHER; note = 2'-O-methyl ribonucleotide
  modified_base 77: mod_base = OTHER; note = 2'-O-methyl ribonucleotide
  modified_base 78: mod_base = OTHER; note = 2'-O-methyl ribonucleotide
  modified_base 79: mod_base = OTHER; note = 2'-O-methyl ribonucleotide
  modified_base 80: mod_base = OTHER; note = 2'-O-methyl ribonucleotide
  modified_base 81: mod_base = OTHER; note = 2'-O-methyl ribonucleotide
  modified_base 82: mod_base = OTHER; note = 2'-O-methyl ribonucleotide
  modified_base 83: mod_base = OTHER; note = 2'-O-methyl ribonucleotide
  modified_base 84: mod_base = OTHER; note = 2'-O-methyl ribonucleotide
  modified_base 85: mod_base = OTHER; note = 2'-O-methyl ribonucleotide
  modified_base 86: mod_base = OTHER; note = 2'-O-methyl ribonucleotide
  modified_base 87: mod_base = OTHER; note = 2'-O-methyl ribonucleotide
  modified_base 88: mod_base = OTHER; note = 2'-O-methyl ribonucleotide
  modified_base 89: mod_base = OTHER; note = 2'-O-methyl ribonucleotide
  modified_base 90: mod_base = OTHER; note = 2'-O-methyl ribonucleotide
  modified_base 91: mod_base = OTHER; note = 2'-O-methyl ribonucleotide
  modified_base 92: mod_base = OTHER; note = 2'-O-methyl ribonucleotide
  modified_base 93: mod_base = OTHER; note = 2'-O-methyl ribonucleotide
  modified_base 94: mod_base = OTHER; note = 2'-O-methyl ribonucleotide
  modified_base 95: mod_base = OTHER; note = 2'-O-methyl ribonucleotide
  modified_base 96: mod_base = OTHER; note = 2'-O-methyl ribonucleotide
  modified_base 97: mod_base = OTHER; note = 2'-O-methyl ribonucleotide
  modified_base 94..97: mod_base = OTHER; note = phosphorothioate linkage
aatggcctccttcagttgttttagagctagaaatagcaagttaaaataaggctagtccgttatcaacttgaaaaagtggcaccgagtcggtgctttt

SEQ ID NO: 1627 - RNA, 97 nt, synthetic construct; identical to SEQ ID NO: 1626
  source 1..97: mol_type = other RNA
  modified_base 1: mod_base = OTHER; note = 2'-O-methyl ribonucleotide
  modified_base 2: mod_base = OTHER; note = 2'-O-methyl ribonucleotide
  modified_base 26: mod_base = OTHER; note = 2'-O-methyl ribonucleotide
  modified_base 27: mod_base = OTHER; note = 2'-O-methyl ribonucleotide
  modified_base 28: mod_base = OTHER; note = 2'-O-methyl ribonucleotide
  modified_base 29: mod_base = OTHER; note = 2'-O-methyl ribonucleotide
  modified_base 30: mod_base = OTHER; note = 2'-O-methyl ribonucleotide
  modified_base 31: mod_base = OTHER; note = 2'-O-methyl ribonucleotide
  modified_base 32: mod_base = OTHER; note = 2'-O-methyl ribonucleotide
  modified_base 33: mod_base = OTHER; note = 2'-O-methyl ribonucleotide
  modified_base 34: mod_base = OTHER; note = 2'-O-methyl ribonucleotide
  modified_base 35: mod_base = OTHER; note = 2'-O-methyl ribonucleotide
  modified_base 36: mod_base = OTHER; note = 2'-O-methyl ribonucleotide
  modified_base 37: mod_base = OTHER; note = 2'-O-methyl ribonucleotide
  modified_base 66: mod_base = OTHER; note = 2'-O-methyl ribonucleotide
  modified_base 67: mod_base = OTHER; note = 2'-O-methyl ribonucleotide
  modified_base 68: mod_base = OTHER; note = 2'-O-methyl ribonucleotide
  modified_base 69: mod_base = OTHER; note = 2'-O-methyl ribonucleotide
  modified_base 70: mod_base = OTHER; note = 2'-O-methyl ribonucleotide
  modified_base 71: mod_base = OTHER; note = 2'-O-methyl ribonucleotide
  modified_base 72: mod_base = OTHER; note = 2'-O-methyl ribonucleotide
  modified_base 73: mod_base = OTHER; note = 2'-O-methyl ribonucleotide
  modified_base 74: mod_base = OTHER; note = 2'-O-methyl ribonucleotide
  modified_base 75: mod_base = OTHER; note = 2'-O-methyl ribonucleotide
  modified_base 76: mod_base = OTHER; note = 2'-O-methyl ribonucleotide
  modified_base 77: mod_base = OTHER; note = 2'-O-methyl ribonucleotide
  modified_base 78: mod_base = OTHER; note = 2'-O-methyl ribonucleotide
  modified_base 79: mod_base = OTHER; note = 2'-O-methyl ribonucleotide
  modified_base 80: mod_base = OTHER; note = 2'-O-methyl ribonucleotide
  modified_base 81: mod_base = OTHER; note = 2'-O-methyl ribonucleotide
  modified_base 82: mod_base = OTHER; note = 2'-O-methyl ribonucleotide
  modified_base 83: mod_base = OTHER; note = 2'-O-methyl ribonucleotide
  modified_base 84: mod_base = OTHER; note = 2'-O-methyl ribonucleotide
  modified_base 85: mod_base = OTHER; note = 2'-O-methyl ribonucleotide
  modified_base 86: mod_base = OTHER; note = 2'-O-methyl ribonucleotide
  modified_base 87: mod_base = OTHER; note = 2'-O-methyl ribonucleotide
  modified_base 88: mod_base = OTHER; note = 2'-O-methyl ribonucleotide
  modified_base 89: mod_base = OTHER; note = 2'-O-methyl ribonucleotide
  modified_base 90: mod_base = OTHER; note = 2'-O-methyl ribonucleotide
  modified_base 91: mod_base = OTHER; note = 2'-O-methyl ribonucleotide
  modified_base 92: mod_base = OTHER; note = 2'-O-methyl ribonucleotide
  modified_base 93: mod_base = OTHER; note = 2'-O-methyl ribonucleotide
  modified_base 94: mod_base = OTHER; note = 2'-O-methyl ribonucleotide
  modified_base 95: mod_base = OTHER; note = 2'-O-methyl ribonucleotide
  modified_base 96: mod_base = OTHER; note = 2'-O-methyl ribonucleotide
  modified_base 97: mod_base = OTHER; note = 2'-O-methyl ribonucleotide
  modified_base 1..3: mod_base = OTHER; note = phosphorothioate linkage
  modified_base 94..97: mod_base = OTHER; note = phosphorothioate linkage

SEQ ID NO: 1628 - RNA, 100 nt, synthetic construct
  source 1..100: mol_type = other RNA
  modified_base 1: mod_base = OTHER; note = 2'-O-methyl ribonucleotide
  modified_base 2: mod_base = OTHER; note = 2'-O-methyl ribonucleotide
  modified_base 3: mod_base = OTHER; note = 2'-O-methyl ribonucleotide
  modified_base 29: mod_base = OTHER; note = 2'-O-methyl ribonucleotide
  modified_base 30: mod_base = OTHER; note = 2'-O-methyl ribonucleotide
  modified_base 31: mod_base = OTHER; note = 2'-O-methyl ribonucleotide
  modified_base 32: mod_base = OTHER; note = 2'-O-methyl ribonucleotide
  modified_base 33: mod_base = OTHER; note = 2'-O-methyl ribonucleotide
  modified_base 34: mod_base = OTHER; note = 2'-O-methyl ribonucleotide
  modified_base 35: mod_base = OTHER; note = 2'-O-methyl ribonucleotide
  modified_base 36: mod_base = OTHER; note = 2'-O-methyl ribonucleotide
  modified_base 37: mod_base = OTHER; note = 2'-O-methyl ribonucleotide
  modified_base 38: mod_base = OTHER; note = 2'-O-methyl ribonucleotide
  modified_base 39: mod_base = OTHER; note = 2'-O-methyl ribonucleotide
  modified_base 40: mod_base = OTHER; note = 2'-O-methyl ribonucleotide
  modified_base 69: mod_base = OTHER; note = 2'-O-methyl ribonucleotide
  modified_base 70: mod_base = OTHER; note = 2'-O-methyl ribonucleotide
  modified_base 71: mod_base = OTHER; note = 2'-O-methyl ribonucleotide
  modified_base 72: mod_base = OTHER; note = 2'-O-methyl ribonucleotide
  modified_base 73: mod_base = OTHER; note = 2'-O-methyl ribonucleotide
  modified_base 74: mod_base = OTHER; note = 2'-O-methyl ribonucleotide
  modified_base 75: mod_base = OTHER; note = 2'-O-methyl ribonucleotide
  modified_base 76: mod_base = OTHER; note = 2'-O-methyl ribonucleotide
  modified_base 77: mod_base = OTHER; note = 2'-O-methyl ribonucleotide
  modified_base 78: mod_base = OTHER; note = 2'-O-methyl ribonucleotide
  modified_base 79: mod_base = OTHER; note = 2'-O-methyl ribonucleotide
  modified_base 80: mod_base = OTHER; note = 2'-O-methyl ribonucleotide
  modified_base 81: mod_base = OTHER; note = 2'-O-methyl ribonucleotide
  modified_base 82: mod_base = OTHER; note = 2'-O-methyl ribonucleotide
  modified_base 83: mod_base = OTHER; note = 2'-O-methyl ribonucleotide
  modified_base 84: mod_base = OTHER; note = 2'-O-methyl ribonucleotide
  modified_base 85: mod_base = OTHER; note = 2'-O-methyl ribonucleotide
  modified_base 86: mod_base = OTHER; note = 2'-O-methyl ribonucleotide
  modified_base 87: mod_base = OTHER; note = 2'-O-methyl ribonucleotide
  modified_base 88: mod_base = OTHER; note = 2'-O-methyl ribonucleotide
  modified_base 89: mod_base = OTHER; note = 2'-O-methyl ribonucleotide
  modified_base 90: mod_base = OTHER; note = 2'-O-methyl ribonucleotide
  modified_base 91: mod_base = OTHER; note = 2'-O-methyl ribonucleotide
  modified_base 92: mod_base = OTHER; note = 2'-O-methyl ribonucleotide
  modified_base 93: mod_base = OTHER; note = 2'-O-methyl ribonucleotide
  modified_base 94: mod_base = OTHER; note = 2'-O-methyl ribonucleotide
  modified_base 95: mod_base = OTHER; note = 2'-O-methyl ribonucleotide
  modified_base 96: mod_base = OTHER; note = 2'-O-methyl ribonucleotide
  modified_base 97: mod_base = OTHER; note = 2'-O-methyl ribonucleotide
  modified_base 98: mod_base = OTHER; note = 2'-O-methyl ribonucleotide
  modified_base 99: mod_base = OTHER; note = 2'-O-methyl ribonucleotide
  modified_base 100: mod_base = OTHER; note = 2'-O-methyl ribonucleotide
  modified_base 18: mod_base = OTHER; note = inosine
  modified_base 1..4: mod_base = OTHER; note = phosphorothioate linkage
  modified_base 97..100: mod_base = OTHER; note = phosphorothioate linkage
gccaatggcctccttcanttgttttagagctagaaatagcaagttaaaataaggctagtccgttatcaacttgaaaaagtggcaccgagtcggtgctttt

SEQ ID NO: 1629 - RNA, 100 nt, synthetic construct
  source 1..100: mol_type = other RNA
  modified_base 1: mod_base = OTHER; note = 2'-O-methyl ribonucleotide
  modified_base 2: mod_base = OTHER; note = 2'-O-methyl ribonucleotide
  modified_base 3: mod_base = OTHER; note = 2'-O-methyl ribonucleotide
  modified_base 29: mod_base = OTHER; note = 2'-O-methyl ribonucleotide
  modified_base 30: mod_base = OTHER; note = 2'-O-methyl ribonucleotide
  modified_base 31: mod_base = OTHER; note = 2'-O-methyl ribonucleotide
  modified_base 32: mod_base = OTHER; note = 2'-O-methyl ribonucleotide
  modified_base 33: mod_base = OTHER; note = 2'-O-methyl ribonucleotide
  modified_base 34: mod_base = OTHER; note = 2'-O-methyl ribonucleotide
  modified_base 35: mod_base = OTHER; note = 2'-O-methyl ribonucleotide
  modified_base 36: mod_base = OTHER; note = 2'-O-methyl ribonucleotide
  modified_base 37: mod_base = OTHER; note = 2'-O-methyl ribonucleotide
  modified_base 38: mod_base = OTHER; note = 2'-O-methyl ribonucleotide
  modified_base 39: mod_base = OTHER; note = 2'-O-methyl ribonucleotide
  modified_base 40: mod_base = OTHER; note = 2'-O-methyl ribonucleotide
  modified_base 69: mod_base = OTHER; note = 2'-O-methyl ribonucleotide
  modified_base 70: mod_base = OTHER; note = 2'-O-methyl ribonucleotide
  modified_base 71: mod_base = OTHER; note = 2'-O-methyl ribonucleotide
  modified_base 72: mod_base = OTHER; note = 2'-O-methyl ribonucleotide
  modified_base 73: mod_base = OTHER; note = 2'-O-methyl ribonucleotide
  modified_base 74: mod_base = OTHER; note = 2'-O-methyl ribonucleotide
  modified_base 75: mod_base = OTHER; note = 2'-O-methyl ribonucleotide
  modified_base 76: mod_base = OTHER; note = 2'-O-methyl ribonucleotide
  modified_base 77: mod_base = OTHER; note = 2'-O-methyl ribonucleotide
  modified_base 78: mod_base = OTHER; note = 2'-O-methyl ribonucleotide
  modified_base 79: mod_base = OTHER; note = 2'-O-methyl ribonucleotide
  modified_base 80: mod_base = OTHER; note = 2'-O-methyl ribonucleotide
  modified_base 81: mod_base = OTHER; note = 2'-O-methyl ribonucleotide
  modified_base 82: mod_base = OTHER; note = 2'-O-methyl ribonucleotide
  modified_base 83: mod_base = OTHER; note = 2'-O-methyl ribonucleotide
  modified_base 84: mod_base = OTHER; note = 2'-O-methyl ribonucleotide
  modified_base 85: mod_base = OTHER; note = 2'-O-methyl ribonucleotide
  modified_base 86: mod_base = OTHER; note = 2'-O-methyl ribonucleotide
  modified_base 87: mod_base = OTHER; note = 2'-O-methyl ribonucleotide
  modified_base 88: mod_base = OTHER; note = 2'-O-methyl ribonucleotide
  modified_base 89: mod_base = OTHER; note = 2'-O-methyl ribonucleotide
  modified_base 90: mod_base = OTHER; note = 2'-O-methyl ribonucleotide
  modified_base 91: mod_base = OTHER; note = 2'-O-methyl ribonucleotide
  modified_base 92: mod_base = OTHER; note = 2'-O-methyl ribonucleotide
  modified_base 93: mod_base = OTHER; note = 2'-O-methyl ribonucleotide
  modified_base 94: mod_base = OTHER; note = 2'-O-methyl ribonucleotide
  modified_base 95: mod_base = OTHER; note = 2'-O-methyl ribonucleotide
  modified_base 96: mod_base = OTHER; note = 2'-O-methyl ribonucleotide
  modified_base 97: mod_base = OTHER; note = 2'-O-methyl ribonucleotide
  modified_base 98: mod_base = OTHER; note = 2'-O-methyl ribonucleotide
  modified_base 99: mod_base = OTHER; note = 2'-O-methyl ribonucleotide
  modified_base 100: mod_base = OTHER; note = 2'-O-methyl ribonucleotide
  modified_base 1: mod_base = OTHER; note = inosine
  modified_base 18: mod_base = OTHER; note = inosine
  modified_base 1..4: mod_base = OTHER; note = phosphorothioate linkage
  modified_base 97..100: mod_base = OTHER; note = phosphorothioate linkage
nccaatggcctccttcanttgttttagagctagaaatagcaagttaaaataaggctagtccgttatcaacttgaaaaagtggcaccgagtcggtgctttt

SEQ ID NO: 1630 - RNA, 100 nt, synthetic construct
  source 1..100: mol_type = other RNA
  modified_base 1: mod_base = OTHER; note = 2'-O-methyl ribonucleotide
  modified_base 2: mod_base = OTHER; note = 2'-O-methyl ribonucleotide
  modified_base 3: mod_base = OTHER; note = 2'-O-methyl ribonucleotide
  modified_base 29: mod_base = OTHER; note = 2'-O-methyl ribonucleotide
  modified_base 30: mod_base = OTHER; note = 2'-O-methyl ribonucleotide
  modified_base 31: mod_base = OTHER; note = 2'-O-methyl ribonucleotide
  modified_base 32: mod_base = OTHER; note = 2'-O-methyl ribonucleotide
  modified_base 33: mod_base = OTHER; note = 2'-O-methyl ribonucleotide
  modified_base 34: mod_base = OTHER; note = 2'-O-methyl ribonucleotide
  modified_base 35: mod_base = OTHER; note = 2'-O-methyl ribonucleotide
  modified_base 36: mod_base = OTHER; note = 2'-O-methyl ribonucleotide
  modified_base 37: mod_base = OTHER; note = 2'-O-methyl ribonucleotide
  modified_base 38: mod_base = OTHER; note = 2'-O-methyl ribonucleotide
  modified_base 39: mod_base = OTHER; note = 2'-O-methyl ribonucleotide
  modified_base 40: mod_base = OTHER; note = 2'-O-methyl ribonucleotide
  modified_base 69: mod_base = OTHER; note = 2'-O-methyl ribonucleotide
  modified_base 70: mod_base = OTHER; note = 2'-O-methyl ribonucleotide
  modified_base 71: mod_base = OTHER; note = 2'-O-methyl ribonucleotide
  modified_base 72: mod_base = OTHER; note = 2'-O-methyl ribonucleotide
  modified_base 73: mod_base = OTHER; note = 2'-O-methyl ribonucleotide
  modified_base 74: mod_base = OTHER; note = 2'-O-methyl ribonucleotide
  modified_base 75: mod_base = OTHER; note = 2'-O-methyl ribonucleotide
  modified_base 76: mod_base = OTHER; note = 2'-O-methyl ribonucleotide
  modified_base 77: mod_base = OTHER; note = 2'-O-methyl ribonucleotide
  modified_base 78: mod_base = OTHER; note = 2'-O-methyl ribonucleotide
  modified_base 79: mod_base = OTHER; note = 2'-O-methyl ribonucleotide
  modified_base 80: mod_base = OTHER; note = 2'-O-methyl ribonucleotide
  modified_base 81: mod_base = OTHER; note = 2'-O-methyl ribonucleotide
  modified_base 82: mod_base = OTHER; note = 2'-O-methyl ribonucleotide
  modified_base 83: mod_base = OTHER; note = 2'-O-methyl ribonucleotide
  modified_base 84: mod_base = OTHER; note = 2'-O-methyl ribonucleotide
  modified_base 85: mod_base = OTHER; note = 2'-O-methyl ribonucleotide
  modified_base 86: mod_base = OTHER; note = 2'-O-methyl ribonucleotide
  modified_base 87: mod_base = OTHER; note = 2'-O-methyl ribonucleotide
  modified_base 88: mod_base = OTHER; note = 2'-O-methyl ribonucleotide
  modified_base 89: mod_base = OTHER; note = 2'-O-methyl ribonucleotide
  modified_base 90: mod_base = OTHER; note = 2'-O-methyl ribonucleotide
  modified_base 91: mod_base = OTHER; note = 2'-O-methyl ribonucleotide
  modified_base 92: mod_base = OTHER; note = 2'-O-methyl ribonucleotide
  modified_base 93: mod_base = OTHER; note = 2'-O-methyl ribonucleotide
  modified_base 94: mod_base = OTHER; note = 2'-O-methyl ribonucleotide
  modified_base 95: mod_base = OTHER; note = 2'-O-methyl ribonucleotide
  modified_base 96: mod_base = OTHER; note = 2'-O-methyl ribonucleotide
  modified_base 97: mod_base = OTHER; note = 2'-O-methyl ribonucleotide
  modified_base 98: mod_base = OTHER; note = 2'-O-methyl ribonucleotide
  modified_base 99: mod_base = OTHER; note = 2'-O-methyl ribonucleotide
  modified_base 100: mod_base = OTHER; note = 2'-O-methyl ribonucleotide
  modified_base 7: mod_base = OTHER; note = inosine
  modified_base 8: mod_base = OTHER; note = inosine
  modified_base 18: mod_base = OTHER; note = inosine
  modified_base 1..4: mod_base = OTHER; note = phosphorothioate linkage
  modified_base 97..100: mod_base = OTHER; note = phosphorothioate linkage
gccaatnncctccttcanttgttttagagctagaaatagcaagttaaaataaggctagtccgttatcaacttgaaaaagtggcaccgagtcggtgctttt

SEQ ID NO: 1631 - RNA, 100 nt, synthetic construct
  source 1..100: mol_type = other RNA
  modified_base 1: mod_base = OTHER; note = 2'-O-methyl ribonucleotide
  modified_base 2: mod_base = OTHER; note = 2'-O-methyl ribonucleotide
  modified_base 3: mod_base = OTHER; note = 2'-O-methyl ribonucleotide
  modified_base 29: mod_base = OTHER; note = 2'-O-methyl ribonucleotide
  modified_base 30: mod_base = OTHER; note = 2'-O-methyl ribonucleotide
  modified_base 31: mod_base = OTHER; note = 2'-O-methyl ribonucleotide
  modified_base 32: mod_base = OTHER; note = 2'-O-methyl ribonucleotide
  modified_base 33: mod_base = OTHER; note = 2'-O-methyl ribonucleotide
  modified_base 34: mod_base = OTHER; note = 2'-O-methyl ribonucleotide
  modified_base 35: mod_base = OTHER; note = 2'-O-methyl ribonucleotide
  modified_base 36: mod_base = OTHER; note = 2'-O-methyl ribonucleotide
  modified_base 37: mod_base = OTHER; note = 2'-O-methyl ribonucleotide
  modified_base 38: mod_base = OTHER; note = 2'-O-methyl ribonucleotide
  modified_base 39: mod_base = OTHER; note = 2'-O-methyl ribonucleotide
  modified_base 40: mod_base = OTHER; note = 2'-O-methyl ribonucleotide
  modified_base 69: mod_base = OTHER; note = 2'-O-methyl ribonucleotide
  modified_base 70: mod_base = OTHER; note = 2'-O-methyl ribonucleotide
  modified_base 71: mod_base = OTHER; note = 2'-O-methyl ribonucleotide
  modified_base 72: mod_base = OTHER; note = 2'-O-methyl ribonucleotide
  modified_base 73: mod_base = OTHER; note = 2'-O-methyl ribonucleotide
  modified_base 74: mod_base = OTHER; note = 2'-O-methyl ribonucleotide
  modified_base 75: mod_base = OTHER; note = 2'-O-methyl ribonucleotide
  modified_base 76: mod_base = OTHER; note = 2'-O-methyl ribonucleotide
  modified_base 77: mod_base = OTHER; note = 2'-O-methyl ribonucleotide
  modified_base 78: mod_base = OTHER; note = 2'-O-methyl ribonucleotide
  modified_base 79: mod_base = OTHER; note = 2'-O-methyl ribonucleotide
  modified_base 80: mod_base = OTHER; note = 2'-O-methyl ribonucleotide
  modified_base 81: mod_base = OTHER; note = 2'-O-methyl ribonucleotide
  modified_base 82: mod_base = OTHER; note = 2'-O-methyl ribonucleotide
  modified_base 83: mod_base = OTHER; note = 2'-O-methyl ribonucleotide
  modified_base 84: mod_base = OTHER; note = 2'-O-methyl ribonucleotide
  modified_base 85: mod_base = OTHER; note = 2'-O-methyl ribonucleotide
  modified_base 86: mod_base = OTHER; note = 2'-O-methyl ribonucleotide
  modified_base 87: mod_base = OTHER; note = 2'-O-methyl ribonucleotide
  modified_base 88: mod_base = OTHER; note = 2'-O-methyl ribonucleotide
  modified_base 89: mod_base = OTHER; note = 2'-O-methyl ribonucleotide
  modified_base 90: mod_base = OTHER; note = 2'-O-methyl ribonucleotide
  modified_base 91: mod_base = OTHER; note = 2'-O-methyl ribonucleotide
  modified_base 92: mod_base = OTHER; note = 2'-O-methyl ribonucleotide
  modified_base 93: mod_base = OTHER; note = 2'-O-methyl ribonucleotide
  modified_base 94: mod_base = OTHER; note = 2'-O-methyl ribonucleotide
  modified_base 95: mod_base = OTHER; note = 2'-O-methyl ribonucleotide
  modified_base 96: mod_base = OTHER; note = 2'-O-methyl ribonucleotide
  modified_base 97: mod_base = OTHER; note = 2'-O-methyl ribonucleotide
  modified_base 98: mod_base = OTHER; note = 2'-O-methyl ribonucleotide
  modified_base 99: mod_base = OTHER; note = 2'-O-methyl ribonucleotide
  modified_base 100: mod_base = OTHER; note = 2'-O-methyl ribonucleotide
  modified_base 1..4: mod_base = OTHER; note = phosphorothioate linkage
  modified_base 97..100: mod_base = OTHER; note = phosphorothioate linkage
accaatggcctccttcagttgttttagagctagaaatagcaagttaaaataaggctagtccgttatcaacttgaaaaagtggcaccgagtcggtgctttt

SEQ ID NO: 1632 - RNA, 100 nt, synthetic construct
  source 1..100: mol_type = other RNA
  modified_base 1: mod_base = OTHER; note = 2'-O-methyl ribonucleotide
  modified_base 2: mod_base = OTHER; note = 2'-O-methyl ribonucleotide
  modified_base 3: mod_base = OTHER; note = 2'-O-methyl ribonucleotide
  modified_base 7: mod_base = OTHER; note = 2'-O-methyl ribonucleotide
  modified_base 29: mod_base = OTHER; note = 2'-O-methyl ribonucleotide
  modified_base 30: mod_base = OTHER; note = 2'-O-methyl ribonucleotide
  modified_base 31: mod_base = OTHER; note = 2'-O-methyl ribonucleotide
  modified_base 32: mod_base = OTHER; note = 2'-O-methyl ribonucleotide
  modified_base 33: mod_base = OTHER; note = 2'-O-methyl ribonucleotide
  modified_base 34: mod_base = OTHER; note = 2'-O-methyl ribonucleotide
  modified_base 35: mod_base = OTHER; note = 2'-O-methyl ribonucleotide
  modified_base 36: mod_base = OTHER; note = 2'-O-methyl ribonucleotide
  modified_base 37: mod_base = OTHER; note = 2'-O-methyl ribonucleotide
  modified_base 38: mod_base = OTHER; note = 2'-O-methyl ribonucleotide
  modified_base 39: mod_base = OTHER; note = 2'-O-methyl ribonucleotide
  modified_base 40: mod_base = OTHER; note = 2'-O-methyl ribonucleotide
  modified_base 69: mod_base = OTHER; note = 2'-O-methyl ribonucleotide
  modified_base 70: mod_base = OTHER; note = 2'-O-methyl ribonucleotide
  modified_base 71: mod_base = OTHER; note = 2'-O-methyl ribonucleotide
  modified_base 72: mod_base = OTHER; note = 2'-O-methyl ribonucleotide
  modified_base 73: mod_base = OTHER; note = 2'-O-methyl ribonucleotide
  modified_base 74: mod_base = OTHER; note = 2'-O-methyl ribonucleotide
  modified_base 75: mod_base = OTHER; note = 2'-O-methyl ribonucleotide
  modified_base 76: mod_base = OTHER; note = 2'-O-methyl ribonucleotide
  modified_base 77: mod_base = OTHER; note = 2'-O-methyl ribonucleotide
  modified_base 78: mod_base = OTHER; note = 2'-O-methyl ribonucleotide
  modified_base 79: mod_base = OTHER; note = 2'-O-methyl ribonucleotide
  modified_base 80: mod_base = OTHER; note = 2'-O-methyl ribonucleotide
  modified_base 81: mod_base = OTHER; note = 2'-O-methyl ribonucleotide
  modified_base 82: mod_base = OTHER; note = 2'-O-methyl ribonucleotide
  modified_base 83: mod_base = OTHER; note = 2'-O-methyl ribonucleotide
  modified_base 84: mod_base = OTHER; note = 2'-O-methyl ribonucleotide
  modified_base 85: mod_base = OTHER; note = 2'-O-methyl ribonucleotide
  modified_base 86: mod_base = OTHER; note = 2'-O-methyl ribonucleotide
  modified_base 87: mod_base = OTHER; note = 2'-O-methyl ribonucleotide
  modified_base 88: mod_base = OTHER; note = 2'-O-methyl ribonucleotide
  modified_base 89: mod_base = OTHER; note = 2'-O-methyl ribonucleotide
  modified_base 90: mod_base = OTHER; note = 2'-O-methyl ribonucleotide
  modified_base 91: mod_base = OTHER; note = 2'-O-methyl ribonucleotide
  modified_base 92: mod_base = OTHER; note = 2'-O-methyl ribonucleotide
  modified_base 93: mod_base = OTHER; note = 2'-O-methyl ribonucleotide
  modified_base 94: mod_base = OTHER; note = 2'-O-methyl ribonucleotide
  modified_base 95: mod_base = OTHER; note = 2'-O-methyl ribonucleotide
  modified_base 96: mod_base = OTHER; note = 2'-O-methyl ribonucleotide
  modified_base 97: mod_base = OTHER; note = 2'-O-methyl ribonucleotide
  modified_base 98: mod_base = OTHER; note = 2'-O-methyl ribonucleotide
  modified_base 99: mod_base = OTHER; note = 2'-O-methyl ribonucleotide
  modified_base 100: mod_base = OTHER; note = 2'-O-methyl ribonucleotide
  modified_base 1: mod_base = OTHER; note = inosine
  modified_base 7: mod_base = OTHER; note = inosine
  modified_base 1..4: mod_base = OTHER; note = phosphorothioate linkage
  modified_base 97..100: mod_base = OTHER; note = phosphorothioate linkage
nccaatngcctccttcagttgttttagagctagaaatagcaagttaaaataaggctagtccgttatcaacttgaaaaagtggcaccgagtcggtgctttt

SEQ ID NO: 1633 - RNA, 100 nt, synthetic construct
  source 1..100: mol_type = other RNA
  modified_base 1: mod_base = OTHER; note = 2'-O-methyl ribonucleotide
  modified_base 2: mod_base = OTHER; note = 2'-O-methyl ribonucleotide
  modified_base 3: mod_base = OTHER; note = 2'-O-methyl ribonucleotide
  modified_base 7: mod_base = OTHER; note = 2'-O-methyl ribonucleotide
  modified_base 29: mod_base = OTHER; note = 2'-O-methyl ribonucleotide
  modified_base 30: mod_base = OTHER; note = 2'-O-methyl ribonucleotide
  modified_base 31: mod_base = OTHER; note = 2'-O-methyl ribonucleotide
  modified_base 32: mod_base = OTHER; note = 2'-O-methyl ribonucleotide
  modified_base 33: mod_base = OTHER; note = 2'-O-methyl ribonucleotide
  modified_base 34: mod_base = OTHER; note = 2'-O-methyl ribonucleotide
  modified_base 35: mod_base = OTHER; note = 2'-O-methyl ribonucleotide
  modified_base 36: mod_base = OTHER; note = 2'-O-methyl ribonucleotide
  modified_base 37: mod_base = OTHER; note = 2'-O-methyl ribonucleotide
  modified_base 38: mod_base = OTHER; note = 2'-O-methyl ribonucleotide
  modified_base 39: mod_base = OTHER; note = 2'-O-methyl ribonucleotide
  modified_base 40: mod_base = OTHER; note = 2'-O-methyl ribonucleotide
  modified_base 69: mod_base = OTHER; note = 2'-O-methyl ribonucleotide
  modified_base 70: mod_base = OTHER; note = 2'-O-methyl ribonucleotide
  modified_base 71: mod_base = OTHER; note = 2'-O-methyl ribonucleotide
  modified_base 72: mod_base = OTHER; note = 2'-O-methyl ribonucleotide
  modified_base 73: mod_base = OTHER; note = 2'-O-methyl ribonucleotide
  modified_base 74: mod_base = OTHER; note = 2'-O-methyl ribonucleotide
  modified_base 75: mod_base = OTHER; note = 2'-O-methyl ribonucleotide
  modified_base 76: mod_base = OTHER; note = 2'-O-methyl ribonucleotide
  modified_base 77: mod_base = OTHER; note = 2'-O-methyl ribonucleotide
  modified_base 78: mod_base = OTHER; note = 2'-O-methyl ribonucleotide
  modified_base 79: mod_base = OTHER; note = 2'-O-methyl ribonucleotide
  modified_base 80: mod_base = OTHER; note = 2'-O-methyl ribonucleotide
  modified_base 81: mod_base = OTHER; note = 2'-O-methyl ribonucleotide
  modified_base 82: mod_base = OTHER; note = 2'-O-methyl ribonucleotide
  modified_base 83: mod_base = OTHER; note = 2'-O-methyl ribonucleotide
  modified_base 84: mod_base = OTHER; note = 2'-O-methyl ribonucleotide
  modified_base 85: mod_base = OTHER; note = 2'-O-methyl ribonucleotide
  modified_base 86: mod_base = OTHER; note = 2'-O-methyl ribonucleotide
  modified_base 87: mod_base = OTHER; note = 2'-O-methyl ribonucleotide
  modified_base 88: mod_base = OTHER; note = 2'-O-methyl ribonucleotide
  modified_base 89: mod_base = OTHER; note = 2'-O-methyl ribonucleotide
  modified_base 90: mod_base = OTHER; note = 2'-O-methyl ribonucleotide
  modified_base 91: mod_base = OTHER; note = 2'-O-methyl ribonucleotide
  modified_base 92: mod_base = OTHER; note = 2'-O-methyl ribonucleotide
  modified_base 93: mod_base = OTHER; note = 2'-O-methyl ribonucleotide
  modified_base 94: mod_base = OTHER; note = 2'-O-methyl ribonucleotide
  modified_base 95: mod_base = OTHER; note = 2'-O-methyl ribonucleotide
  modified_base 96: mod_base = OTHER; note = 2'-O-methyl ribonucleotide
  modified_base 97: mod_base = OTHER; note = 2'-O-methyl ribonucleotide
  modified_base 98: mod_base = OTHER; note = 2'-O-methyl ribonucleotide
  modified_base 99: mod_base = OTHER; note = 2'-O-methyl ribonucleotide
  modified_base 100: mod_base = OTHER; note = 2'-O-methyl ribonucleotide
  modified_base 7: mod_base = OTHER; note = inosine
  modified_base 1..4: mod_base = OTHER; note = phosphorothioate linkage
  modified_base 97..100: mod_base = OTHER; note = phosphorothioate linkage
gccaatngcctccttcagttgttttagagctagaaatagcaagttaaaataaggctagtccgttatcaacttgaaaaagtggcaccgagtcggtgctttt

SEQ ID NO: 1634 - RNA, 100 nt, synthetic construct
  source 1..100: mol_type = other RNA
  modified_base 1: mod_base = OTHER; note = 2'-O-methyl ribonucleotide
  modified_base 2: mod_base = OTHER; note = 2'-O-methyl ribonucleotide
  modified_base 3: mod_base = OTHER; note = 2'-O-methyl ribonucleotide
  modified_base 98: mod_base = OTHER; note = 2'-O-methyl ribonucleotide
  modified_base 99: mod_base = OTHER; note = 2'-O-methyl ribonucleotide
  modified_base 100: mod_base = OTHER; note = 2'-O-methyl ribonucleotide
  modified_base 1..4: mod_base = OTHER; note = phosphorothioate linkage
  modified_base 97..100: mod_base = OTHER; note = phosphorothioate linkage
gcgaatggcctcctgcagctgttttagagctagaaatagcaagttaaaataaggctagtccgttatcaacttgaaaaagtggcaccgagtcggtgctttt

SEQ ID NO: 1635 - RNA, 100 nt, synthetic construct
  source 1..100: mol_type = other RNA
  modified_base 1: mod_base = OTHER; note = 2'-O-methyl ribonucleotide
  modified_base 2: mod_base = OTHER; note = 2'-O-methyl ribonucleotide
  modified_base 3: mod_base = OTHER; note = 2'-O-methyl ribonucleotide
  modified_base 98: mod_base = OTHER; note = 2'-O-methyl ribonucleotide
  modified_base 99: mod_base = OTHER; note = 2'-O-methyl ribonucleotide
  modified_base 100: mod_base = OTHER; note = 2'-O-methyl ribonucleotide
  modified_base 1..4: mod_base = OTHER; note = phosphorothioate linkage
  modified_base 97..100: mod_base = OTHER; note = phosphorothioate linkage
agcccttcaacacaaggtcagttttagagctagaaatagcaagttaaaataaggctagtccgttatcaacttgaaaaagtggcaccgagtcggtgctttt

SEQ ID NO: 1636 - RNA, 100 nt, synthetic construct
  source 1..100: mol_type = other RNA
taagaccatgtcccaactgagttttagagctagaaatagcaagttaaaataaggctagtccgttatcaacttgaaaaagtggcaccgagtcggtgctttt

SEQ ID NO: 1637 - RNA, 100 nt, synthetic construct
  source 1..100: mol_type = other RNA
  modified_base 1: mod_base = OTHER; note = 2'-O-methyl ribonucleotide
  modified_base 2: mod_base = OTHER; note = 2'-O-methyl ribonucleotide
  modified_base 3: mod_base = OTHER; note = 2'-O-methyl ribonucleotide
  modified_base 98: mod_base = OTHER; note = 2'-O-methyl ribonucleotide
  modified_base 99: mod_base = OTHER; note = 2'-O-methyl ribonucleotide
  modified_base 100: mod_base = OTHER; note = 2'-O-methyl ribonucleotide
  modified_base 1..4: mod_base = OTHER; note = phosphorothioate linkage
  modified_base 97..100: mod_base = OTHER; note = phosphorothioate linkage
caatgtccccaatgcaatccgttttagagctagaaatagcaagttaaaataaggctagtccgttatcaacttgaaaaagtggcaccgagtcggtgctttt

SEQ ID NO: 1638 - RNA, 100 nt, synthetic construct
  source 1..100: mol_type = other RNA
  modified_base 1: mod_base = OTHER; note = 2'-O-methyl ribonucleotide
  modified_base 2: mod_base = OTHER; note = 2'-O-methyl ribonucleotide
  modified_base 3: mod_base = OTHER; note = 2'-O-methyl ribonucleotide
  modified_base 98: mod_base = OTHER; note = 2'-O-methyl ribonucleotide
  modified_base 99: mod_base = OTHER; note = 2'-O-methyl ribonucleotide
  modified_base 100: mod_base = OTHER; note = 2'-O-methyl ribonucleotide
  modified_base 1..4: mod_base = OTHER; note = phosphorothioate linkage
  modified_base 97..100: mod_base = OTHER; note = phosphorothioate linkage
ttgttttccgggattgcattgttttagagctagaaatagcaagttaaaataaggctagtccgttatcaacttgaaaaagtggcaccgagtcggtgctttt

SEQ ID NO: 1639 - RNA, 100 nt, synthetic construct
  source 1..100: mol_type = other RNA
  modified_base 1: mod_base = OTHER; note = 2'-O-methyl ribonucleotide
  modified_base 2: mod_base = OTHER; note = 2'-O-methyl ribonucleotide
  modified_base 3: mod_base = OTHER; note = 2'-O-methyl ribonucleotide
  modified_base 98: mod_base = OTHER; note = 2'-O-methyl ribonucleotide
  modified_base 99: mod_base = OTHER; note = 2'-O-methyl ribonucleotide
  modified_base 100: mod_base = OTHER; note = 2'-O-methyl ribonucleotide
  modified_base 1..4: mod_base = OTHER; note = phosphorothioate linkage
  modified_base 97..100: mod_base = OTHER; note = phosphorothioate linkage
tttgttttccgggattgcatgttttagagctagaaatagcaagttaaaataaggctagtccgttatcaacttgaaaaagtggcaccgagtcggtgctttt

SEQ ID NO: 1640 - RNA, 100 nt, synthetic construct
  source 1..100: mol_type = other RNA
  modified_base 1: mod_base = OTHER; note = 2'-O-methyl ribonucleotide
  modified_base 2: mod_base = OTHER; note = 2'-O-methyl ribonucleotide
  modified_base 3: mod_base = OTHER; note = 2'-O-methyl ribonucleotide
  modified_base 98: mod_base = OTHER; note = 2'-O-methyl ribonucleotide
  modified_base 99: mod_base = OTHER; note = 2'-O-methyl ribonucleotide
  modified_base 100: mod_base = OTHER; note = 2'-O-methyl ribonucleotide
  modified_base 1..4: mod_base = OTHER; note = phosphorothioate linkage
  modified_base 97..100: mod_base = OTHER; note = phosphorothioate linkage
aatcccggaaaacaaagattgttttagagctagaaatagcaagttaaaataaggctagtccgttatcaacttgaaaaagtggcaccgagtcggtgctttt

SEQ ID NO: 1641 - RNA, 100 nt, synthetic construct
  source 1..100: mol_type = other RNA
  modified_base 1: mod_base = OTHER; note = 2'-O-methyl ribonucleotide
  modified_base 2: mod_base = OTHER; note = 2'-O-methyl ribonucleotide
  modified_base 3: mod_base = OTHER; note = 2'-O-methyl ribonucleotide
  modified_base 98: mod_base = OTHER; note = 2'-O-methyl ribonucleotide
  modified_base 99: mod_base = OTHER; note = 2'-O-methyl ribonucleotide
  modified_base 100: mod_base = OTHER; note = 2'-O-methyl ribonucleotide
  modified_base 1..4: mod_base = OTHER; note = phosphorothioate linkage
  modified_base 97..100: mod_base = OTHER; note = phosphorothioate linkage
tgttttccgggattgcattggttttagagctagaaatagcaagttaaaataaggctagtccgttatcaacttgaaaaagtggcaccgagtcggtgctttt

SEQ ID NO: 1642 - RNA, 100 nt, synthetic construct; identical to SEQ ID NO: 421
  source 1..100: mol_type = other RNA
  modified_base 1: mod_base = OTHER; note = 2'-O-methyl ribonucleotide
  modified_base 2: mod_base = OTHER; note = 2'-O-methyl ribonucleotide
  modified_base 3: mod_base = OTHER; note = 2'-O-methyl ribonucleotide
  modified_base 21: mod_base = OTHER; note = 2'-O-methyl ribonucleotide
  modified_base 28: mod_base = OTHER; note = 2'-O-methyl ribonucleotide
  modified_base 29: mod_base = OTHER; note = 2'-O-methyl ribonucleotide
  modified_base 30: mod_base = OTHER; note = 2'-O-methyl ribonucleotide
  modified_base 31: mod_base = OTHER; note = 2'-O-methyl ribonucleotide
  modified_base 32: mod_base = OTHER; note = 2'-O-methyl ribonucleotide
  modified_base 34: mod_base = OTHER; note = 2'-O-methyl ribonucleotide
  modified_base 35: mod_base = OTHER; note = 2'-O-methyl ribonucleotide
  modified_base 36: mod_base = OTHER; note = 2'-O-methyl ribonucleotide
  modified_base 37: mod_base = OTHER; note = 2'-O-methyl ribonucleotide
  modified_base 38: mod_base = OTHER; note = 2'-O-methyl ribonucleotide
  modified_base 39: mod_base = OTHER; note = 2'-O-methyl ribonucleotide
  modified_base 40: mod_base = OTHER; note = 2'-O-methyl ribonucleotide
  modified_base 41: mod_base = OTHER; note = 2'-O-methyl ribonucleotide
  modified_base 42: mod_base = OTHER; note = 2'-O-methyl ribonucleotide
  modified_base 46: mod_base = OTHER; note = 2'-O-methyl ribonucleotide
  modified_base 48: mod_base = OTHER; note = 2'-O-methyl ribonucleotide
  modified_base 50: mod_base = OTHER; note = 2'-O-methyl ribonucleotide
  modified_base 52: mod_base = OTHER; note = 2'-O-methyl ribonucleotide
  modified_base 53: mod_base = OTHER; note = 2'-O-methyl ribonucleotide
  modified_base 54: mod_base = OTHER; note = 2'-O-methyl ribonucleotide
  modified_base 55: mod_base = OTHER; note = 2'-O-methyl ribonucleotide
  modified_base 56: mod_base = OTHER; note = 2'-O-methyl ribonucleotide
  modified_base 57: mod_base = OTHER; note = 2'-O-methyl ribonucleotide
  modified_base 60: mod_base = OTHER; note = 2'-O-methyl ribonucleotide
  modified_base 61: mod_base = OTHER; note = 2'-O-methyl ribonucleotide
  modified_base 66: mod_base = OTHER; note = 2'-O-methyl ribonucleotide
  modified_base 67: mod_base = OTHER; note = 2'-O-methyl ribonucleotide
  modified_base 70: mod_base = OTHER; note = 2'-O-methyl ribonucleotide
  modified_base 71: mod_base = OTHER; note = 2'-O-methyl ribonucleotide
  modified_base 72: mod_base = OTHER; note = 2'-O-methyl ribonucleotide
  modified_base 74: mod_base = OTHER; note = 2'-O-methyl ribonucleotide
  modified_base 75: mod_base = OTHER; note = 2'-O-methyl ribonucleotide
  modified_base 76: mod_base = OTHER; note = 2'-O-methyl ribonucleotide
  modified_base 77: mod_base = OTHER; note = 2'-O-methyl ribonucleotide
  modified_base 78: mod_base = OTHER; note = 2'-O-methyl ribonucleotide
  modified_base 79: mod_base = OTHER; note = 2'-O-methyl ribonucleotide
  modified_base 80: mod_base = OTHER; note = 2'-O-methyl ribonucleotide
  modified_base 81: mod_base = OTHER; note = 2'-O-methyl ribonucleotide
  modified_base 83: mod_base = OTHER; note = 2'-O-methyl ribonucleotide
  modified_base 84: mod_base = OTHER; note = 2'-O-methyl ribonucleotide
  modified_base 85: mod_base = OTHER; note = 2'-O-methyl ribonucleotide
  modified_base 86: mod_base = OTHER; note = 2'-O-methyl ribonucleotide
  modified_base 87: mod_base = OTHER; note = 2'-O-methyl ribonucleotide
  modified_base 88: mod_base = OTHER; note = 2'-O-methyl ribonucleotide
  modified_base 89: mod_base = OTHER; note = 2'-O-methyl ribonucleotide
  modified_base 90: mod_base = OTHER; note = 2'-O-methyl ribonucleotide
  modified_base 91: mod_base = OTHER; note = 2'-O-methyl ribonucleotide
  modified_base 92: mod_base = OTHER; note = 2'-O-methyl ribonucleotide
  modified_base 93: mod_base = OTHER; note = 2'-O-methyl ribonucleotide
  modified_base 94: mod_base = OTHER; note = 2'-O-methyl ribonucleotide
  modified_base 95: mod_base = OTHER; note = 2'-O-methyl ribonucleotide
  modified_base 96: mod_base = OTHER; note = 2'-O-methyl ribonucleotide
  modified_base 97: mod_base = OTHER; note = 2'-O-methyl ribonucleotide
  modified_base 98: mod_base = OTHER; note = 2'-O-methyl ribonucleotide
  modified_base 99: mod_base = OTHER; note = 2'-O-methyl ribonucleotide
  modified_base 100: mod_base = OTHER; note = 2'-O-methyl ribonucleotide
  modified_base 1..4: mod_base = OTHER; note = phosphorothioate linkage
  modified_base 98..100: mod_base = OTHER; note = phosphorothioate linkage

SEQ ID NO: 1643 - RNA, 103 nt, synthetic construct
  source 1..103: mol_type = other RNA
  modified_base 1: mod_base = OTHER; note = 2'-O-methyl ribonucleotide
  modified_base 2: mod_base = OTHER; note = 2'-O-methyl ribonucleotide
  modified_base 3: mod_base = OTHER; note = 2'-O-methyl ribonucleotide
  modified_base 21: mod_base = OTHER; note = 2'-O-methyl ribonucleotide
  modified_base 28: mod_base = OTHER; note = 2'-O-methyl ribonucleotide
  modified_base 29: mod_base = OTHER; note = 2'-O-methyl ribonucleotide
  modified_base 30: mod_base = OTHER; note = 2'-O-methyl ribonucleotide
  modified_base 31: mod_base = OTHER; note = 2'-O-methyl ribonucleotide
  modified_base 32: mod_base = OTHER; note = 2'-O-methyl ribonucleotide
  modified_base 34: mod_base = OTHER; note = 2'-O-methyl ribonucleotide
  modified_base 35: mod_base = OTHER; note = 2'-O-methyl ribonucleotide
  modified_base 36: mod_base = OTHER; note = 2'-O-methyl ribonucleotide
  modified_base 37: mod_base = OTHER; note = 2'-O-methyl ribonucleotide
  modified_base 38: mod_base = OTHER; note = 2'-O-methyl ribonucleotide
  modified_base 39: mod_base = OTHER; note = 2'-O-methyl ribonucleotide
  modified_base 40: mod_base = OTHER; note = 2'-O-methyl ribonucleotide
  modified_base 41: mod_base = OTHER; note = 2'-O-methyl ribonucleotide
  modified_base 42: mod_base = OTHER; note = 2'-O-methyl ribonucleotide
  modified_base 46: mod_base = OTHER; note = 2'-O-methyl ribonucleotide
  modified_base 48: mod_base = OTHER; note = 2'-O-methyl ribonucleotide
  modified_base 50: mod_base = OTHER; note = 2'-O-methyl ribonucleotide
  modified_base 52: mod_base = OTHER; note = 2'-O-methyl ribonucleotide
  modified_base 53: mod_base = OTHER; note = 2'-O-methyl ribonucleotide
  modified_base 54: mod_base = OTHER; note = 2'-O-methyl ribonucleotide
  modified_base 55: mod_base = OTHER; note = 2'-O-methyl ribonucleotide
  modified_base 56: mod_base = OTHER; note = 2'-O-methyl ribonucleotide
  modified_base 57: mod_base = OTHER; note = 2'-O-methyl ribonucleotide
  modified_base 60: mod_base = OTHER; note = 2'-O-methyl ribonucleotide
  modified_base 61: mod_base = OTHER; note = 2'-O-methyl ribonucleotide
  modified_base 66: mod_base = OTHER; note = 2'-O-methyl ribonucleotide
  modified_base 67: mod_base = OTHER; note = 2'-O-methyl ribonucleotide
  modified_base 70: mod_base = OTHER; note = 2'-O-methyl ribonucleotide
  modified_base 71: mod_base = OTHER; note = 2'-O-methyl ribonucleotide
  modified_base 72: mod_base = OTHER; note = 2'-O-methyl ribonucleotide
  modified_base 74: mod_base = OTHER; note = 2'-O-methyl ribonucleotide
  modified_base 75: mod_base = OTHER; note = 2'-O-methyl ribonucleotide
  modified_base 76: mod_base = OTHER; note = 2'-O-methyl ribonucleotide
  modified_base 77: mod_base = OTHER; note = 2'-O-methyl ribonucleotide
  modified_base 78: mod_base = OTHER; note = 2'-O-methyl ribonucleotide
  modified_base 79: mod_base = OTHER; note = 2'-O-methyl ribonucleotide
  modified_base 80: mod_base = OTHER; note = 2'-O-methyl ribonucleotide
  modified_base 81: mod_base = OTHER; note = 2'-O-methyl ribonucleotide
  modified_base 83: mod_base = OTHER; note = 2'-O-methyl ribonucleotide
  modified_base 84: mod_base = OTHER; note = 2'-O-methyl ribonucleotide
  modified_base 85: mod_base = OTHER; note = 2'-O-methyl ribonucleotide
  modified_base 86: mod_base = OTHER; note = 2'-O-methyl ribonucleotide
  modified_base 87: mod_base = OTHER; note = 2'-O-methyl ribonucleotide
  modified_base 88: mod_base = OTHER; note = 2'-O-methyl ribonucleotide
  modified_base 89: mod_base = OTHER; note = 2'-O-methyl ribonucleotide
  modified_base 90: mod_base = OTHER; note = 2'-O-methyl ribonucleotide
  modified_base 91: mod_base = OTHER; note = 2'-O-methyl ribonucleotide
  modified_base 92: mod_base = OTHER; note = 2'-O-methyl ribonucleotide
  modified_base 93: mod_base = OTHER; note = 2'-O-methyl ribonucleotide
  modified_base 94: mod_base = OTHER; note = 2'-O-methyl ribonucleotide
  modified_base 95: mod_base = OTHER; note = 2'-O-methyl ribonucleotide
  modified_base 96: mod_base = OTHER; note = 2'-O-methyl ribonucleotide
  modified_base 97: mod_base = OTHER; note = 2'-O-methyl ribonucleotide
  modified_base 98: mod_base = OTHER; note = 2'-O-methyl ribonucleotide
  modified_base 99: mod_base = OTHER; note = 2'-O-methyl ribonucleotide
  modified_base 100: mod_base = OTHER; note = 2'-O-methyl ribonucleotide
  modified_base 101: mod_base = OTHER; note = 2'-O-methyl ribonucleotide
  modified_base 102: mod_base = OTHER; note = 2'-O-methyl ribonucleotide
  modified_base 103: mod_base = OTHER; note = 2'-O-methyl ribonucleotide
  modified_base 1..4: mod_base = OTHER; note = phosphorothioate linkage
  modified_base 97..100: mod_base = OTHER; note = phosphorothioate linkage
cccataccttggagcaacgggttttagagctagaaatagcaagttaaaataaggctagtccgttatcaacttgaaaaagtggcaccgagtcggtgcttttttt

SEQ ID NO: 1644 - RNA, 103 nt, synthetic construct; identical to SEQ ID NO: 1643
  source 1..103: mol_type = other RNA
  modified_base 1: mod_base = OTHER; note = 2'-O-methyl ribonucleotide
  modified_base 2: mod_base = OTHER; note = 2'-O-methyl ribonucleotide
  modified_base 3: mod_base = OTHER; note = 2'-O-methyl ribonucleotide
  modified_base 21: mod_base = OTHER; note = 2'-O-methyl ribonucleotide
  modified_base 28: mod_base = OTHER; note = 2'-O-methyl ribonucleotide
  modified_base 29: mod_base = OTHER; note = 2'-O-methyl ribonucleotide
  modified_base 30: mod_base = OTHER; note = 2'-O-methyl ribonucleotide
  modified_base 31: mod_base = OTHER; note = 2'-O-methyl ribonucleotide
  modified_base 32: mod_base = OTHER; note = 2'-O-methyl ribonucleotide
  modified_base 34: mod_base = OTHER; note = 2'-O-methyl ribonucleotide
  modified_base 35: mod_base = OTHER; note = 2'-O-methyl ribonucleotide
  modified_base 36: mod_base = OTHER; note = 2'-O-methyl ribonucleotide
  modified_base 37: mod_base = OTHER; note = 2'-O-methyl ribonucleotide
  modified_base 38: mod_base = OTHER; note = 2'-O-methyl ribonucleotide
  modified_base 39: mod_base = OTHER; note = 2'-O-methyl ribonucleotide
  modified_base 40: mod_base = OTHER; note = 2'-O-methyl ribonucleotide
  modified_base 41: mod_base = OTHER; note = 2'-O-methyl ribonucleotide
  modified_base 42: mod_base = OTHER; note = 2'-O-methyl ribonucleotide
  modified_base 46: mod_base = OTHER; note = 2'-O-methyl ribonucleotide
  modified_base 48: mod_base = OTHER; note = 2'-O-methyl ribonucleotide
  modified_base 50: mod_base = OTHER; note = 2'-O-methyl ribonucleotide
  modified_base 52: mod_base = OTHER; note = 2'-O-methyl ribonucleotide
  modified_base 53: mod_base = OTHER; note = 2'-O-methyl ribonucleotide
  modified_base 54: mod_base = OTHER; note = 2'-O-methyl ribonucleotide
  modified_base 55: mod_base = OTHER; note = 2'-O-methyl ribonucleotide
  modified_base 56: mod_base = OTHER; note = 2'-O-methyl ribonucleotide
  modified_base 57: mod_base = OTHER; note = 2'-O-methyl ribonucleotide
  modified_base 60: mod_base = OTHER; note = 2'-O-methyl ribonucleotide
  modified_base 61: mod_base = OTHER; note = 2'-O-methyl ribonucleotide
  modified_base 66: mod_base = OTHER; note = 2'-O-methyl ribonucleotide
  modified_base 67: mod_base = OTHER; note = 2'-O-methyl ribonucleotide
  modified_base 70: mod_base = OTHER; note = 2'-O-methyl ribonucleotide
  modified_base 71: mod_base = OTHER; note = 2'-O-methyl ribonucleotide
  modified_base 72: mod_base = OTHER; note = 2'-O-methyl ribonucleotide
  modified_base 74: mod_base = OTHER; note = 2'-O-methyl ribonucleotide
  modified_base 75: mod_base = OTHER; note = 2'-O-methyl ribonucleotide
  modified_base 76: mod_base = OTHER; note = 2'-O-methyl ribonucleotide
  modified_base 77: mod_base = OTHER; note = 2'-O-methyl ribonucleotide
  modified_base 78: mod_base = OTHER; note = 2'-O-methyl ribonucleotide
  modified_base 79: mod_base = OTHER; note = 2'-O-methyl ribonucleotide
  modified_base 80: mod_base = OTHER; note = 2'-O-methyl ribonucleotide
  modified_base 81: mod_base = OTHER; note = 2'-O-methyl ribonucleotide
  modified_base 83: mod_base = OTHER; note = 2'-O-methyl ribonucleotide
  modified_base 84: mod_base = OTHER; note = 2'-O-methyl ribonucleotide
  modified_base 85: mod_base = OTHER; note = 2'-O-methyl ribonucleotide
  modified_base 86: mod_base = OTHER; note = 2'-O-methyl ribonucleotide
  modified_base 87: mod_base = OTHER; note = 2'-O-methyl ribonucleotide
  modified_base 88: mod_base = OTHER; note = 2'-O-methyl ribonucleotide
  modified_base 89: mod_base = OTHER; note = 2'-O-methyl ribonucleotide
  modified_base 90: mod_base = OTHER; note = 2'-O-methyl ribonucleotide
  modified_base 91: mod_base = OTHER; note = 2'-O-methyl ribonucleotide
  modified_base 92: mod_base = OTHER; note = 2'-O-methyl ribonucleotide
  modified_base 93: mod_base = OTHER; note = 2'-O-methyl ribonucleotide
  modified_base 94: mod_base = OTHER; note = 2'-O-methyl ribonucleotide
  modified_base 95: mod_base = OTHER; note = 2'-O-methyl ribonucleotide
  modified_base 96: mod_base = OTHER; note = 2'-O-methyl ribonucleotide
  modified_base 97: mod_base = OTHER; note = 2'-O-methyl ribonucleotide
  modified_base 98: mod_base = OTHER; note = 2'-O-methyl ribonucleotide
  modified_base 99: mod_base = OTHER; note = 2'-O-methyl ribonucleotide
  modified_base 100: mod_base = OTHER; note = 2'-O-methyl ribonucleotide
  modified_base 101: mod_base = OTHER; note = 2'-O-methyl ribonucleotide
  modified_base 102: mod_base = OTHER; note = 2'-O-methyl ribonucleotide
  modified_base 103: mod_base = OTHER; note = 2'-O-methyl ribonucleotide
  modified_base 1..4: mod_base = OTHER; note = phosphorothioate linkage
  modified_base 98..100: mod_base = OTHER; note = phosphorothioate linkage

SEQ ID NO: 1645 - RNA, 103 nt, synthetic construct; identical to SEQ ID NO: 1643
  source 1..103: mol_type = other RNA
  modified_base 1: mod_base = OTHER; note = 2'-O-methyl ribonucleotide
  modified_base 2: mod_base = OTHER; note = 2'-O-methyl ribonucleotide
  modified_base 3: mod_base = OTHER; note = 2'-O-methyl ribonucleotide
  modified_base 21: mod_base = OTHER; note = 2'-O-methyl ribonucleotide
  modified_base 28: mod_base = OTHER; note = 2'-O-methyl ribonucleotide
  modified_base 29: mod_base = OTHER; note = 2'-O-methyl ribonucleotide
  modified_base 30: mod_base = OTHER; note = 2'-O-methyl ribonucleotide
  modified_base 31: mod_base = OTHER; note = 2'-O-methyl ribonucleotide
  modified_base 32: mod_base = OTHER; note = 2'-O-methyl ribonucleotide
  modified_base 34: mod_base = OTHER; note = 2'-O-methyl ribonucleotide
  modified_base 35: mod_base = OTHER; note = 2'-O-methyl ribonucleotide
  modified_base 36: mod_base = OTHER; note = 2'-O-methyl ribonucleotide
  modified_base 37: mod_base = OTHER; note = 2'-O-methyl ribonucleotide
  modified_base 38: mod_base = OTHER; note = 2'-O-methyl ribonucleotide
  modified_base 39: mod_base = OTHER; note = 2'-O-methyl ribonucleotide
  modified_base 40: mod_base = OTHER; note = 2'-O-methyl ribonucleotide
  modified_base 41: mod_base = OTHER; note = 2'-O-methyl ribonucleotide
  modified_base 42: mod_base = OTHER; note = 2'-O-methyl ribonucleotide
  modified_base 46: mod_base = OTHER; note = 2'-O-methyl ribonucleotide
  modified_base 48: mod_base = OTHER; note = 2'-O-methyl ribonucleotide
  modified_base 50: mod_base = OTHER; note = 2'-O-methyl ribonucleotide
  modified_base 52: mod_base = OTHER; note = 2'-O-methyl ribonucleotide
  modified_base 53: mod_base = OTHER; note = 2'-O-methyl ribonucleotide
  modified_base 54: mod_base = OTHER; note = 2'-O-methyl ribonucleotide
  modified_base 55: mod_base = OTHER; note = 2'-O-methyl ribonucleotide
  modified_base 56: mod_base = OTHER; note = 2'-O-methyl ribonucleotide
  modified_base 57: mod_base = OTHER; note = 2'-O-methyl ribonucleotide
  modified_base 60: mod_base = OTHER; note = 2'-O-methyl ribonucleotide
  modified_base 61: mod_base = OTHER; note = 2'-O-methyl ribonucleotide
  modified_base 66: mod_base = OTHER; note = 2'-O-methyl ribonucleotide
  modified_base 67: mod_base = OTHER; note = 2'-O-methyl ribonucleotide
  modified_base 70: mod_base = OTHER; note = 2'-O-methyl ribonucleotide
  modified_base 71: mod_base = OTHER; note = 2'-O-methyl ribonucleotide
  modified_base 72: mod_base = OTHER; note = 2'-O-methyl ribonucleotide
  modified_base 74: mod_base = OTHER; note = 2'-O-methyl ribonucleotide
  modified_base 75: mod_base = OTHER; note = 2'-O-methyl ribonucleotide
  modified_base 76: mod_base = OTHER; note = 2'-O-methyl ribonucleotide
  modified_base 77: mod_base = OTHER; note = 2'-O-methyl ribonucleotide
  modified_base 78: mod_base = OTHER; note = 2'-O-methyl ribonucleotide
  modified_base 79: mod_base = OTHER; note = 2'-O-methyl ribonucleotide
  modified_base 80: mod_base = OTHER; note = 2'-O-methyl ribonucleotide
  modified_base 81: mod_base = OTHER; note = 2'-O-methyl ribonucleotide
  modified_base 83: mod_base = OTHER; note = 2'-O-methyl ribonucleotide
  modified_base 84: mod_base = OTHER; note = 2'-O-methyl ribonucleotide
  modified_base 85: mod_base = OTHER; note = 2'-O-methyl ribonucleotide
  modified_base 86: mod_base = OTHER; note = 2'-O-methyl ribonucleotide
  modified_base 87: mod_base = OTHER; note = 2'-O-methyl ribonucleotide
  modified_base 88: mod_base = OTHER; note = 2'-O-methyl ribonucleotide
  modified_base 89: mod_base = OTHER; note = 2'-O-methyl ribonucleotide
  modified_base 90: mod_base = OTHER; note = 2'-O-methyl ribonucleotide
  modified_base 91: mod_base = OTHER; note = 2'-O-methyl ribonucleotide
  modified_base 92: mod_base = OTHER; note = 2'-O-methyl ribonucleotide
  modified_base 93: mod_base = OTHER; note = 2'-O-methyl ribonucleotide
  modified_base 94: mod_base = OTHER; note = 2'-O-methyl ribonucleotide
  modified_base 95: mod_base = OTHER; note = 2'-O-methyl ribonucleotide
  modified_base 96: mod_base = OTHER; note = 2'-O-methyl ribonucleotide
  modified_base 97: mod_base = OTHER; note = 2'-O-methyl ribonucleotide
  modified_base 98: mod_base = OTHER; note = 2'-O-methyl ribonucleotide
  modified_base 99: mod_base = OTHER; note = 2'-O-methyl ribonucleotide
  modified_base 100: mod_base = OTHER; note = 2'-O-methyl ribonucleotide
  modified_base 101: mod_base = OTHER; note = 2'-O-methyl ribonucleotide
  modified_base 102: mod_base = OTHER; note = 2'-O-methyl ribonucleotide
  modified_base 103: mod_base = OTHER; note = 2'-O-methyl ribonucleotide
  modified_base 1..4: mod_base = OTHER; note = phosphorothioate linkage
  modified_base 45..46: mod_base = OTHER; note = phosphorothioate linkage
  modified_base 64..65: mod_base = OTHER; note = phosphorothioate linkage
  modified_base 98..100: mod_base = OTHER; note = phosphorothioate linkage

SEQ ID NO: 1646 - RNA, 103 nt, synthetic construct; identical to SEQ ID NO: 1643
  source 1..103: mol_type = other RNA
  modified_base 1: mod_base = OTHER; note = 2'-O-methyl ribonucleotide
  modified_base 2: mod_base = OTHER; note = 2'-O-methyl ribonucleotide
  modified_base 3: mod_base = OTHER; note = 2'-O-methyl ribonucleotide
  modified_base 21: mod_base = OTHER; note = 2'-O-methyl ribonucleotide
  modified_base 28: mod_base = OTHER; note = 2'-O-methyl ribonucleotide
  modified_base 29: mod_base = OTHER; note = 2'-O-methyl ribonucleotide
  modified_base 30: mod_base = OTHER; note = 2'-O-methyl ribonucleotide
  modified_base 31: mod_base = OTHER; note = 2'-O-methyl ribonucleotide
  modified_base 32: mod_base = OTHER; note = 2'-O-methyl ribonucleotide
  modified_base 34: mod_base = OTHER; note = 2'-O-methyl ribonucleotide
  modified_base 35: mod_base = OTHER; note = 2'-O-methyl ribonucleotide
  modified_base 36: mod_base = OTHER; note = 2'-O-methyl ribonucleotide
  modified_base 37: mod_base = OTHER; note = 2'-O-methyl ribonucleotide
  modified_base 38: mod_base = OTHER; note = 2'-O-methyl ribonucleotide
  modified_base 39: mod_base = OTHER; note = 2'-O-methyl ribonucleotide
  modified_base 40: mod_base = OTHER; note = 2'-O-methyl ribonucleotide
  modified_base 41: mod_base = OTHER; note = 2'-O-methyl ribonucleotide
  modified_base 42: mod_base = OTHER; note = 2'-O-methyl ribonucleotide
  modified_base 46: mod_base = OTHER; note = 2'-O-methyl ribonucleotide
  modified_base 48: mod_base = OTHER; note = 2'-O-methyl ribonucleotide
  modified_base 50: mod_base = OTHER; note = 2'-O-methyl ribonucleotide
  modified_base 52: mod_base = OTHER; note = 2'-O-methyl ribonucleotide
  modified_base 53: mod_base = OTHER; note = 2'-O-methyl ribonucleotide
  modified_base 54: mod_base = OTHER; note = 2'-O-methyl ribonucleotide
  modified_base 55: mod_base = OTHER; note = 2'-O-methyl ribonucleotide
  modified_base 56: mod_base = OTHER; note = 2'-O-methyl ribonucleotide
  modified_base 57: mod_base = OTHER; note = 2'-O-methyl ribonucleotide
  modified_base 60: mod_base = OTHER; note = 2'-O-methyl ribonucleotide
  modified_base 61: mod_base = OTHER; note = 2'-O-methyl ribonucleotide
  modified_base 66: mod_base = OTHER; note = 2'-O-methyl ribonucleotide
  modified_base 67: mod_base = OTHER; note = 2'-O-methyl ribonucleotide
  modified_base 70: mod_base = OTHER; note = 2'-O-methyl ribonucleotide
  modified_base 71: mod_base = OTHER; note = 2'-O-methyl ribonucleotide
  modified_base 72: mod_base = OTHER; note = 2'-O-methyl ribonucleotide
  modified_base 74: mod_base = OTHER; note = 2'-O-methyl ribonucleotide
  modified_base 75: mod_base = OTHER; note = 2'-O-methyl ribonucleotide
  modified_base 76: mod_base = OTHER; note = 2'-O-methyl ribonucleotide
  modified_base 77: mod_base = OTHER; note = 2'-O-methyl ribonucleotide
  modified_base 78: mod_base = OTHER; note = 2'-O-methyl ribonucleotide
  modified_base 79: mod_base = OTHER; note = 2'-O-methyl ribonucleotide
  modified_base 80: mod_base = OTHER; note = 2'-O-methyl ribonucleotide
  modified_base 81: mod_base = OTHER; note = 2'-O-methyl ribonucleotide
  modified_base 83: mod_base = OTHER; note = 2'-O-methyl ribonucleotide
  modified_base 84: mod_base = OTHER; note = 2'-O-methyl ribonucleotide
  modified_base 85: mod_base = OTHER; note = 2'-O-methyl ribonucleotide
  modified_base 86: mod_base = OTHER; note = 2'-O-methyl ribonucleotide
  modified_base 87: mod_base = OTHER; note = 2'-O-methyl ribonucleotide
  modified_base 88: mod_base = OTHER; note = 2'-O-methyl ribonucleotide
  modified_base 89: mod_base = OTHER; note = 2'-O-methyl ribonucleotide
  modified_base 90: mod_base = OTHER; note = 2'-O-methyl ribonucleotide
  modified_base 91: mod_base = OTHER; note = 2'-O-methyl ribonucleotide
  modified_base 92: mod_base = OTHER; note = 2'-O-methyl ribonucleotide
  modified_base 93: mod_base = OTHER; note = 2'-O-methyl ribonucleotide
  modified_base 94: mod_base = OTHER; note = 2'-O-methyl ribonucleotide
  modified_base 95: mod_base = OTHER; note = 2'-O-methyl ribonucleotide
  modified_base 96: mod_base = OTHER; note = 2'-O-methyl ribonucleotide
  modified_base 97: mod_base = OTHER; note = 2'-O-methyl ribonucleotide
  modified_base 98: mod_base = OTHER; note = 2'-O-methyl ribonucleotide
  modified_base 99: mod_base = OTHER; note = 2'-O-methyl ribonucleotide
  modified_base 100: mod_base = OTHER; note = 2'-O-methyl ribonucleotide
  modified_base 101: mod_base = OTHER; note = 2'-O-methyl ribonucleotide
  modified_base 102: mod_base = OTHER; note = 2'-O-methyl ribonucleotide
  modified_base 103: mod_base = OTHER; note = 2'-O-methyl ribonucleotide
  modified_base 1..4: mod_base = OTHER; note = phosphorothioate linkage
  modified_base 45..46: mod_base = OTHER; note = phosphorothioate linkage
  modified_base 98..100: mod_base = OTHER; note = phosphorothioate linkage

SEQ ID NO: 1647 - RNA, 103 nt, synthetic construct; identical to SEQ ID NO: 1643
  source 1..103: mol_type = other RNA
  modified_base 1: mod_base = OTHER; note = 2'-O-methyl ribonucleotide
  modified_base 2: mod_base = OTHER; note = 2'-O-methyl ribonucleotide
  modified_base 3: mod_base = OTHER; note = 2'-O-methyl ribonucleotide
  modified_base 21: mod_base = OTHER; note = 2'-O-methyl ribonucleotide
  modified_base 28: mod_base = OTHER; note = 2'-O-methyl ribonucleotide
  modified_base 29: mod_base = OTHER; note = 2'-O-methyl ribonucleotide
  modified_base 30: mod_base = OTHER; note = 2'-O-methyl ribonucleotide
  modified_base 31: mod_base = OTHER; note = 2'-O-methyl ribonucleotide
  modified_base 32: mod_base = OTHER; note = 2'-O-methyl ribonucleotide
  modified_base 34: mod_base = OTHER; note = 2'-O-methyl ribonucleotide
  modified_base 35: mod_base = OTHER; note = 2'-O-methyl ribonucleotide
  modified_base 36: mod_base = OTHER; note = 2'-O-methyl ribonucleotide
  modified_base 37: mod_base = OTHER; note = 2'-O-methyl ribonucleotide
  modified_base 38: mod_base = OTHER; note = 2'-O-methyl ribonucleotide
  modified_base 39: mod_base = OTHER; note = 2'-O-methyl ribonucleotide
  modified_base 40: mod_base = OTHER; note = 2'-O-methyl ribonucleotide
  modified_base 41: mod_base = OTHER; note = 2'-O-methyl ribonucleotide
  modified_base 42: mod_base = OTHER; note = 2'-O-methyl ribonucleotide
  modified_base 46: mod_base = OTHER; note = 2'-O-methyl ribonucleotide
  modified_base 48: mod_base = OTHER; note = 2'-O-methyl ribonucleotide
  modified_base 50: mod_base = OTHER; note = 2'-O-methyl ribonucleotide
  modified_base 52: mod_base = OTHER; note = 2'-O-methyl ribonucleotide
  modified_base 53: mod_base = OTHER; note = 2'-O-methyl ribonucleotide
  modified_base 54: mod_base = OTHER; note = 2'-O-methyl ribonucleotide
  modified_base 55: mod_base = OTHER; note = 2'-O-methyl ribonucleotide
  modified_base 56: mod_base = OTHER; note = 2'-O-methyl ribonucleotide
  modified_base 57: mod_base = OTHER; note = 2'-O-methyl ribonucleotide
  modified_base 60: mod_base = OTHER; note = 2'-O-methyl ribonucleotide
  modified_base 61: mod_base = OTHER; note = 2'-O-methyl ribonucleotide
  modified_base 66: mod_base = OTHER; note = 2'-O-methyl ribonucleotide
  modified_base 67: mod_base = OTHER; note = 2'-O-methyl ribonucleotide
  modified_base 70: mod_base = OTHER; note = 2'-O-methyl ribonucleotide
  modified_base 71: mod_base = OTHER; note = 2'-O-methyl ribonucleotide
  modified_base 72: mod_base = OTHER; note = 2'-O-methyl ribonucleotide
  modified_base 74: mod_base = OTHER; note = 2'-O-methyl ribonucleotide
  modified_base 75: mod_base = OTHER; note = 2'-O-methyl ribonucleotide
  modified_base 76: mod_base = OTHER; note = 2'-O-methyl ribonucleotide
  modified_base 77: mod_base = OTHER; note = 2'-O-methyl ribonucleotide
  modified_base 78: mod_base = OTHER; note = 2'-O-methyl ribonucleotide
  modified_base 79: mod_base = OTHER; note = 2'-O-methyl ribonucleotide
  modified_base 80: mod_base = OTHER; note = 2'-O-methyl ribonucleotide
  modified_base 81: mod_base = OTHER; note = 2'-O-methyl ribonucleotide
  modified_base 83: mod_base = OTHER; note = 2'-O-methyl ribonucleotide
  modified_base 84: mod_base = OTHER; note = 2'-O-methyl ribonucleotide
  modified_base 85: mod_base = OTHER; note = 2'-O-methyl ribonucleotide
  modified_base 86: mod_base = OTHER; note = 2'-O-methyl ribonucleotide
  modified_base 87: mod_base = OTHER; note = 2'-O-methyl ribonucleotide
  modified_base 88: mod_base = OTHER; note = 2'-O-methyl ribonucleotide
  modified_base 89: mod_base = OTHER; note = 2'-O-methyl ribonucleotide
  modified_base 90: mod_base = OTHER; note = 2'-O-methyl ribonucleotide
  modified_base 91: mod_base = OTHER; note = 2'-O-methyl ribonucleotide
  modified_base 92: mod_base = OTHER; note = 2'-O-methyl ribonucleotide
  modified_base 93: mod_base = OTHER; note = 2'-O-methyl ribonucleotide
  modified_base 94: mod_base = OTHER; note = 2'-O-methyl ribonucleotide
  modified_base 95: mod_base = OTHER; note = 2'-O-methyl ribonucleotide
  modified_base 96: mod_base = OTHER; note = 2'-O-methyl ribonucleotide
  modified_base 97: mod_base = OTHER; note = 2'-O-methyl ribonucleotide
  modified_base 98: mod_base = OTHER; note = 2'-O-methyl ribonucleotide
  modified_base 99: mod_base = OTHER; note = 2'-O-methyl ribonucleotide
  modified_base 100: mod_base = OTHER; note = 2'-O-methyl ribonucleotide
  modified_base 101: mod_base = OTHER; note = 2'-O-methyl ribonucleotide
  modified_base 102: mod_base = OTHER; note = 2'-O-methyl ribonucleotide
  modified_base 103: mod_base = OTHER; note = 2'-O-methyl ribonucleotide
  modified_base 1..4: mod_base = OTHER; note = phosphorothioate linkage
  modified_base 64..65: mod_base = OTHER; note = phosphorothioate linkage
  modified_base 98..100: mod_base = OTHER; note = phosphorothioate linkage

SEQ ID NO: 1648 - DNA, 100 bp, synthetic construct; identical to SEQ ID NO: 58
  source 1..100: mol_type = other DNA
  modified_base 1: mod_base = OTHER; note = 2'-O-methyl ribonucleotide
  modified_base 2: mod_base = OTHER; note = 2'-O-methyl ribonucleotide
  modified_base 3: mod_base = OTHER; note = 2'-O-methyl ribonucleotide
  modified_base 21: mod_base = OTHER; note = 2'-O-methyl ribonucleotide
  modified_base 28: mod_base = OTHER; note = 2'-O-methyl ribonucleotide
  modified_base 29: mod_base = OTHER; note = 2'-O-methyl ribonucleotide
  modified_base 30: mod_base = OTHER; note = 2'-O-methyl ribonucleotide
  modified_base 31: mod_base = OTHER; note = 2'-O-methyl ribonucleotide
  modified_base 32: mod_base = OTHER; note = 2'-O-methyl ribonucleotide
  modified_base 34: mod_base = OTHER; note = 2'-O-methyl ribonucleotide
  modified_base 35: mod_base = OTHER; note = 2'-O-methyl ribonucleotide
  modified_base 36: mod_base = OTHER; note = 2'-O-methyl ribonucleotide
  modified_base 37: mod_base = OTHER; note = 2'-O-methyl ribonucleotide
  modified_base 38: mod_base = OTHER; note = 2'-O-methyl ribonucleotide
  modified_base 39: mod_base = OTHER; note = 2'-O-methyl ribonucleotide
  modified_base 40: mod_base = OTHER; note = 2'-O-methyl ribonucleotide
  modified_base 41: mod_base = OTHER; note = 2'-O-methyl ribonucleotide
  modified_base 42: mod_base = OTHER; note = 2'-O-methyl ribonucleotide
  modified_base 46: mod_base = OTHER; note = 2'-O-methyl ribonucleotide
  modified_base 48: mod_base = OTHER; note = 2'-O-methyl ribonucleotide
  modified_base 50: mod_base = OTHER; note = 2'-O-methyl ribonucleotide
  modified_base 52: mod_base = OTHER; note = 2'-O-methyl ribonucleotide
  modified_base 53: mod_base = OTHER; note = 2'-O-methyl ribonucleotide
  modified_base 54: mod_base = OTHER; note = 2'-O-methyl ribonucleotide
  modified_base 55: mod_base = OTHER; note = 2'-O-methyl ribonucleotide
  modified_base 56: mod_base = OTHER; note = 2'-O-methyl ribonucleotide
  modified_base 57: mod_base = OTHER; note = 2'-O-methyl ribonucleotide
  modified_base 60: mod_base = OTHER; note = 2'-O-methyl ribonucleotide
  modified_base 61: mod_base = OTHER; note = 2'-O-methyl ribonucleotide
  modified_base 66: mod_base = OTHER; note = 2'-O-methyl ribonucleotide
  modified_base 67: mod_base = OTHER; note = 2'-O-methyl ribonucleotide
  modified_base 70: mod_base = OTHER; note = 2'-O-methyl ribonucleotide
  modified_base 71: mod_base = OTHER; note = 2'-O-methyl ribonucleotide
  modified_base 72: mod_base = OTHER; note = 2'-O-methyl ribonucleotide
  modified_base 74: mod_base = OTHER; note = 2'-O-methyl ribonucleotide
  modified_base 75: mod_base = OTHER; note = 2'-O-methyl ribonucleotide
  modified_base 76: mod_base = OTHER; note = 2'-O-methyl ribonucleotide
  modified_base 77: mod_base = OTHER; note = 2'-O-methyl ribonucleotide
  modified_base 78: mod_base = OTHER; note = 2'-O-methyl ribonucleotide
  modified_base 79: mod_base = OTHER; note = 2'-O-methyl ribonucleotide
  modified_base 80: mod_base = OTHER; note = 2'-O-methyl ribonucleotide
  modified_base 81: mod_base = OTHER; note = 2'-O-methyl ribonucleotide
  modified_base 83: mod_base = OTHER; note = 2'-O-methyl ribonucleotide
  modified_base 84: mod_base = OTHER; note = 2'-O-methyl ribonucleotide
  modified_base 85: mod_base = OTHER; note = 2'-O-methyl ribonucleotide
  modified_base 86: mod_base = OTHER; note = 2'-O-methyl ribonucleotide
  modified_base 87: mod_base = OTHER; note = 2'-O-methyl ribonucleotide
  modified_base 88: mod_base = OTHER; note = 2'-O-methyl ribonucleotide
  modified_base 89: mod_base = OTHER; note = 2'-O-methyl ribonucleotide
  modified_base 90: mod_base = OTHER; note = 2'-O-methyl ribonucleotide
  modified_base 91: mod_base = OTHER; note = 2'-O-methyl ribonucleotide
  modified_base 92: mod_base = OTHER; note = 2'-O-methyl ribonucleotide
  modified_base 93: mod_base = OTHER; note = 2'-O-methyl ribonucleotide
  modified_base 94: mod_base = OTHER; note = 2'-O-methyl ribonucleotide
  modified_base 95: mod_base = OTHER; note = 2'-O-methyl ribonucleotide
  modified_base 96: mod_base = OTHER; note = 2'-O-methyl ribonucleotide
  modified_base 97: mod_base = OTHER; note = 2'-O-methyl ribonucleotide
  modified_base 98: mod_base = OTHER; note = 2'-O-methyl ribonucleotide
  modified_base 99: mod_base = OTHER; note = 2'-O-methyl ribonucleotide
  modified_base 100: mod_base = OTHER; note = 2'-O-methyl ribonucleotide
  modified_base 10: mod_base = OTHER; note = deoxyuridine
  modified_base 1..4: mod_base = OTHER; note = phosphorothioate linkage
  modified_base 97..100: mod_base = OTHER; note = phosphorothioate linkage
  misc_feature 1: note = RNA
  misc_feature 2: note = RNA
  misc_feature 3: note = RNA
  misc_feature 4: note = RNA
  misc_feature 6: note = RNA
  misc_feature 7: note = RNA
  misc_feature 8: note = RNA
  misc_feature 9: note = RNA
  misc_feature 11: note = RNA
  misc_feature 12: note = RNA
  misc_feature 14: note = RNA
  misc_feature 16: note = RNA
  misc_feature 17: note = RNA
  misc_feature 19: note = RNA
  misc_feature 20: note = RNA
  misc_feature 21: note = RNA
  misc_feature 22: note = RNA
  misc_feature 23: note = RNA
  misc_feature 24: note = RNA
  misc_feature 25: note = RNA
  misc_feature 26: note = RNA
  misc_feature 27: note = RNA
  misc_feature 28: note = RNA
  misc_feature 29: note = RNA
  misc_feature 30: note = RNA
  misc_feature 31: note = RNA
  misc_feature 32: note = RNA
  misc_feature 33: note = RNA
  misc_feature 34: note = RNA
  misc_feature 35: note = RNA
  misc_feature 36: note = RNA
  misc_feature 37: note = RNA
  misc_feature 38: note = RNA
  misc_feature 39: note = RNA
  misc_feature 40: note = RNA
  misc_feature 41: note = RNA
  misc_feature 42: note = RNA
  misc_feature 43: note = RNA
  misc_feature 44: note = RNA
  misc_feature 45: note = RNA
  misc_feature 46: note = RNA
  misc_feature 47: note = RNA
  misc_feature 48: note = RNA
  misc_feature 49: note = RNA
  misc_feature 50: note = RNA
  misc_feature 51: note = RNA
  misc_feature 52: note = RNA
  misc_feature 53: note = RNA
  misc_feature 54: note = RNA
  misc_feature 55: note = RNA
  misc_feature 56: note = RNA
  misc_feature 57: note = RNA
  misc_feature 58: note = RNA
  misc_feature 59: note = RNA
  misc_feature 60: note = RNA
  misc_feature 61: note = RNA
  misc_feature 62: note = RNA
  misc_feature 63: note = RNA
  misc_feature 64: note = RNA
  misc_feature 65: note = RNA
  misc_feature 66: note = RNA
  misc_feature 67: note = RNA
  misc_feature 68: note = RNA
  misc_feature 69: note = RNA
  misc_feature 70: note = RNA
  misc_feature 71: note = RNA
  misc_feature 72: note = RNA
  misc_feature 73: note = RNA
  misc_feature 74: note = RNA
  misc_feature 75: note = RNA
  misc_feature 76: note = RNA
  misc_feature 77: note = RNA
  misc_feature 78: note = RNA
  misc_feature 79: note = RNA
  misc_feature 80: note = RNA
  misc_feature 81: note = RNA
  misc_feature 82: note = RNA
  misc_feature 83: note = RNA
  misc_feature 84: note = RNA
  misc_feature 85: note = RNA
  misc_feature 86: note = RNA
  misc_feature 87: note = RNA
  misc_feature 88: note = RNA
  misc_feature 89: note = RNA
  misc_feature 90: note = RNA
  misc_feature 91: note = RNA
  misc_feature 92: note = RNA
  misc_feature 93: note = RNA
  misc_feature 94: note = RNA
  misc_feature 95: note = RNA
  misc_feature 96: note = RNA
  misc_feature 97: note = RNA
  misc_feature 98: note = RNA
  misc_feature 99: note = RNA
  misc_feature 100: note = RNA
  misc_feature 5: note = DNA
  misc_feature 10: note = DNA
  misc_feature 13: note = DNA
  misc_feature 15: note = DNA
  misc_feature 18: note = DNA

SEQ ID NO: 1649 - DNA, 108 bp, synthetic construct
  source 1..108: mol_type = other DNA
  modified_base 1: mod_base = OTHER; note = 2'-O-methyl ribonucleotide
  modified_base 2: mod_base = OTHER; note = 2'-O-methyl ribonucleotide
  modified_base 3: mod_base = OTHER; note = 2'-O-methyl ribonucleotide
  modified_base 29: mod_base = OTHER; note = 2'-O-methyl ribonucleotide
  modified_base 36: mod_base = OTHER; note = 2'-O-methyl ribonucleotide
  modified_base 37: mod_base = OTHER; note = 2'-O-methyl ribonucleotide
  modified_base 38: mod_base = OTHER; note = 2'-O-methyl ribonucleotide
  modified_base 39: mod_base = OTHER; note = 2'-O-methyl ribonucleotide
  modified_base 40: mod_base = OTHER; note = 2'-O-methyl ribonucleotide
  modified_base 42: mod_base = OTHER; note = 2'-O-methyl ribonucleotide
  modified_base 43: mod_base = OTHER; note = 2'-O-methyl ribonucleotide
  modified_base 44: mod_base = OTHER; note = 2'-O-methyl ribonucleotide
  modified_base 45: mod_base = OTHER; note = 2'-O-methyl ribonucleotide
  modified_base 46: mod_base = OTHER; note = 2'-O-methyl ribonucleotide
  modified_base 47: mod_base = OTHER; note = 2'-O-methyl ribonucleotide
  modified_base 48: mod_base = OTHER; note = 2'-O-methyl ribonucleotide
  modified_base 49: mod_base = OTHER; note = 2'-O-methyl ribonucleotide
  modified_base 50: mod_base = OTHER; note = 2'-O-methyl ribonucleotide
  modified_base 54: mod_base = OTHER; note = 2'-O-methyl ribonucleotide
  modified_base 56: mod_base = OTHER; note = 2'-O-methyl ribonucleotide
  modified_base 58: mod_base = OTHER; note = 2'-O-methyl ribonucleotide
  modified_base 60: mod_base = OTHER; note = 2'-O-methyl ribonucleotide
  modified_base 61: mod_base = OTHER; note = 2'-O-methyl ribonucleotide
  modified_base 62: mod_base = OTHER; note = 2'-O-methyl ribonucleotide
  modified_base 63: mod_base = OTHER; note = 2'-O-methyl ribonucleotide
  modified_base 64: mod_base = OTHER; note = 2'-O-methyl ribonucleotide
  modified_base 65: mod_base = OTHER; note = 2'-O-methyl ribonucleotide
  modified_base 68: mod_base = OTHER; note = 2'-O-methyl ribonucleotide
  modified_base 69: mod_base = OTHER; note = 2'-O-methyl ribonucleotide
  modified_base 74: mod_base = OTHER; note = 2'-O-methyl ribonucleotide
  modified_base 75: mod_base = OTHER; note = 2'-O-methyl ribonucleotide
  modified_base 78: mod_base = OTHER; note = 2'-O-methyl ribonucleotide
  modified_base 79: mod_base = OTHER; note = 2'-O-methyl ribonucleotide
  modified_base 80: mod_base = OTHER; note = 2'-O-methyl ribonucleotide
  modified_base 82: mod_base = OTHER; note = 2'-O-methyl ribonucleotide
  modified_base 83: mod_base = OTHER; note = 2'-O-methyl ribonucleotide
  modified_base 84: mod_base = OTHER; note = 2'-O-methyl ribonucleotide
  modified_base 85: mod_base = OTHER; note = 2'-O-methyl ribonucleotide
  modified_base 86: mod_base = OTHER; note = 2'-O-methyl ribonucleotide
  modified_base 87: mod_base = OTHER; note = 2'-O-methyl ribonucleotide
  modified_base 88: mod_base = OTHER; note = 2'-O-methyl ribonucleotide
  modified_base 89: mod_base = OTHER; note = 2'-O-methyl ribonucleotide
  modified_base 91: mod_base = OTHER; note = 2'-O-methyl ribonucleotide
  modified_base 92: mod_base = OTHER; note = 2'-O-methyl ribonucleotide
  modified_base 93: mod_base = OTHER; note = 2'-O-methyl ribonucleotide
  modified_base 94: mod_base = OTHER; note = 2'-O-methyl ribonucleotide
  modified_base 95: mod_base = OTHER; note = 2'-O-methyl ribonucleotide
  modified_base 96: mod_base = OTHER; note = 2'-O-methyl ribonucleotide
  modified_base 97: mod_base = OTHER; note = 2'-O-methyl ribonucleotide
  modified_base 98: mod_base = OTHER; note = 2'-O-methyl ribonucleotide
  modified_base 99: mod_base = OTHER; note = 2'-O-methyl ribonucleotide
  modified_base 100: mod_base = OTHER; note = 2'-O-methyl ribonucleotide
  modified_base 101: mod_base = OTHER; note = 2'-O-methyl ribonucleotide
  modified_base 102: mod_base = OTHER; note = 2'-O-methyl ribonucleotide
  modified_base 103: mod_base = OTHER; note = 2'-O-methyl ribonucleotide
  modified_base 104: mod_base = OTHER; note = 2'-O-methyl ribonucleotide
  modified_base 105: mod_base = OTHER; note = 2'-O-methyl ribonucleotide
  modified_base 106: mod_base = OTHER; note = 2'-O-methyl ribonucleotide
  modified_base 107: mod_base = OTHER; note = 2'-O-methyl ribonucleotide
  modified_base 108: mod_base = OTHER; note = 2'-O-methyl ribonucleotide
  modified_base 1..4: mod_base = OTHER; note = phosphorothioate linkage
  modified_base 105..108: mod_base = OTHER; note = phosphorothioate linkage
  misc_feature 1: note = RNA
  misc_feature 2: note = RNA
  misc_feature 3: note = RNA
  misc_feature 4: note = RNA
  misc_feature 5: note = RNA
  misc_feature 7: note = RNA
  misc_feature 8: note = RNA
  misc_feature 9: note = RNA
  misc_feature 10: note = RNA
  misc_feature 12: note = RNA
  misc_feature 13: note = RNA
  misc_feature 15: note = RNA
  misc_feature 17: note = RNA
  misc_feature 18: note = RNA
  misc_feature 20: note = RNA
  misc_feature 21: note = RNA
  misc_feature 22: note = RNA
  misc_feature 23: note = RNA
  misc_feature 24: note = RNA
  misc_feature 25: note = RNA
  misc_feature 26: note = RNA
  misc_feature 27: note = RNA
  misc_feature 28: note = RNA
  misc_feature 29: note = RNA
  misc_feature 30: note = RNA
  misc_feature 31: note = RNA
  misc_feature 32: note = RNA
  misc_feature 33: note = RNA
  misc_feature 34: note = RNA
  misc_feature 35: note = RNA
  misc_feature 36: note = RNA
  misc_feature 37: note = RNA
  misc_feature 38: note = RNA
  misc_feature 39: note = RNA
  misc_feature 40: note = RNA
  misc_feature 41: note = RNA
  misc_feature 42: note = RNA
  misc_feature 43: note = RNA
  misc_feature 44: note = RNA
  misc_feature 45: note = RNA
  misc_feature 46: note = RNA
  misc_feature 47: note = RNA
  misc_feature 48: note = RNA
  misc_feature 49: note = RNA
  misc_feature 50: note = RNA
  misc_feature 51: note = RNA
  misc_feature 52: note = RNA
  misc_feature 53: note = RNA
  misc_feature 54: note = RNA
  misc_feature 55: note = RNA
  misc_feature 56: note = RNA
  misc_feature 57: note = RNA
  misc_feature 58: note = RNA
  misc_feature 59: note = RNA
  misc_feature 60: note = RNA
  misc_feature 61: note = RNA
  misc_feature 62: note = RNA
  misc_feature 63: note = RNA
  misc_feature 64: note = RNA
  misc_feature 65: note = RNA
  misc_feature 66: note = RNA
  misc_feature 67: note = RNA
  misc_feature 68: note = RNA
  misc_feature 69: note = RNA
  misc_feature 70: note = RNA
  misc_feature 71: note = RNA
  misc_feature 72: note = RNA
  misc_feature 73: note = RNA
  misc_feature 74: note = RNA
  misc_feature 75: note = RNA
  misc_feature 76: note = RNA
  misc_feature 77: note = RNA
  misc_feature 78: note = RNA
  misc_feature 79: note = RNA
  misc_feature 80: note = RNA
  misc_feature 81: note = RNA
  misc_feature 82: note = RNA
  misc_feature 83: note = RNA
  misc_feature 84: note = RNA
  misc_feature 85: note = RNA
  misc_feature 86: note = RNA
  misc_feature 87: note = RNA
  misc_feature 88: note = RNA
  misc_feature 89: note = RNA
  misc_feature 90: note = RNA
  misc_feature 91: note = RNA
  misc_feature 92: note = RNA
  misc_feature 93: note = RNA
  misc_feature 94: note = RNA
  misc_feature 95: note = RNA
  misc_feature 96: note = RNA
  misc_feature 97: note = RNA
  misc_feature 98: note = RNA
  misc_feature 99: note = RNA
  misc_feature 100: note = RNA
  misc_feature 101: note = RNA
  misc_feature 102: note = RNA
  misc_feature 103: note = RNA
  misc_feature 104: note = RNA
  misc_feature 105: note = RNA
  misc_feature 106: note = RNA
  misc_feature 107: note = RNA
  misc_feature 108: note = RNA
  misc_feature 6: note = DNA
  misc_feature 11: note = DNA
  misc_feature 14: note = DNA
  misc_feature 16: note = DNA
  misc_feature 19: note = DNA
cccgcaccttggcgcagcgggttttagagttttagagctagaaatagcaagttaaaataaggctagtccgttatcaacttgaaaaagtggcaccgagtcggtgctttt

SEQ ID NO: 1650 - RNA, 99 nt, synthetic construct; identical to SEQ ID NO: 442
  source 1..99: mol_type = other RNA
  modified_base 1: mod_base = OTHER; note = 2'-O-methyl ribonucleotide
  modified_base 2: mod_base = OTHER; note = 2'-O-methyl ribonucleotide
  modified_base 20: mod_base = OTHER; note = 2'-O-methyl ribonucleotide
  modified_base 27: mod_base = OTHER; note = 2'-O-methyl ribonucleotide
  modified_base 28: mod_base = OTHER; note = 2'-O-methyl ribonucleotide
  modified_base 29: mod_base = OTHER; note = 2'-O-methyl ribonucleotide
  modified_base 30: mod_base = OTHER; note = 2'-O-methyl ribonucleotide
  modified_base 31: mod_base = OTHER; note = 2'-O-methyl ribonucleotide
  modified_base 33: mod_base = OTHER; note = 2'-O-methyl ribonucleotide
  modified_base 34: mod_base = OTHER; note = 2'-O-methyl ribonucleotide
  modified_base 35: mod_base = OTHER; note = 2'-O-methyl ribonucleotide
  modified_base 36: mod_base = OTHER; note = 2'-O-methyl ribonucleotide
  modified_base 37: mod_base = OTHER; note = 2'-O-methyl ribonucleotide
  modified_base 38: mod_base = OTHER; note = 2'-O-methyl ribonucleotide
  modified_base 39: mod_base = OTHER; note = 2'-O-methyl ribonucleotide
  modified_base 40: mod_base = OTHER; note = 2'-O-methyl ribonucleotide
  modified_base 41: mod_base = OTHER; note = 2'-O-methyl ribonucleotide
  modified_base 45: mod_base = OTHER; note = 2'-O-methyl ribonucleotide
  modified_base 47: mod_base = OTHER; note = 2'-O-methyl ribonucleotide
  modified_base 49: mod_base = OTHER; note = 2'-O-methyl ribonucleotide
  modified_base 51: mod_base = OTHER; note = 2'-O-methyl ribonucleotide
  modified_base 52: mod_base = OTHER; note = 2'-O-methyl ribonucleotide
  modified_base 53: mod_base = OTHER; note = 2'-O-methyl ribonucleotide
  modified_base 54: mod_base = OTHER; note = 2'-O-methyl ribonucleotide
  modified_base 55: mod_base = OTHER; note = 2'-O-methyl ribonucleotide
  modified_base 56: mod_base = OTHER; note = 2'-O-methyl ribonucleotide
  modified_base 59: mod_base = OTHER; note = 2'-O-methyl ribonucleotide
  modified_base 60: mod_base = OTHER; note = 2'-O-methyl ribonucleotide
  modified_base 65: mod_base = OTHER; note = 2'-O-methyl ribonucleotide
  modified_base 66: mod_base = OTHER; note = 2'-O-methyl ribonucleotide
  modified_base 69: mod_base = OTHER; note = 2'-O-methyl ribonucleotide
  modified_base 70: mod_base = OTHER; note = 2'-O-methyl ribonucleotide
  modified_base 71: mod_base = OTHER; note = 2'-O-methyl ribonucleotide
  modified_base 73: mod_base = OTHER; note = 2'-O-methyl ribonucleotide
  modified_base 74: mod_base = OTHER; note = 2'-O-methyl ribonucleotide
  modified_base 75: mod_base = OTHER; note = 2'-O-methyl ribonucleotide
  modified_base 76: mod_base = OTHER; note = 2'-O-methyl ribonucleotide
  modified_base 77: mod_base = OTHER; note = 2'-O-methyl ribonucleotide
  modified_base 78: mod_base = OTHER; note = 2'-O-methyl ribonucleotide
  modified_base 79: mod_base = OTHER; note = 2'-O-methyl ribonucleotide
  modified_base 80: mod_base = OTHER; note = 2'-O-methyl ribonucleotide
  modified_base 82: mod_base = OTHER; note = 2'-O-methyl ribonucleotide
  modified_base 83: mod_base = OTHER; note = 2'-O-methyl ribonucleotide
  modified_base 84: mod_base = OTHER; note = 2'-O-methyl ribonucleotide
  modified_base 85: mod_base = OTHER; note = 2'-O-methyl ribonucleotide
  modified_base 86: mod_base = OTHER; note = 2'-O-methyl ribonucleotide
  modified_base 87: mod_base = OTHER; note = 2'-O-methyl ribonucleotide
  modified_base 88: mod_base = OTHER; note = 2'-O-methyl ribonucleotide
  modified_base 89: mod_base = OTHER; note = 2'-O-methyl ribonucleotide
  modified_base 90: mod_base = OTHER; note = 2'-O-methyl ribonucleotide
  modified_base 91: mod_base = OTHER; note = 2'-O-methyl ribonucleotide
  modified_base 92: mod_base = OTHER; note = 2'-O-methyl ribonucleotide
  modified_base 93: mod_base = OTHER; note = 2'-O-methyl ribonucleotide
  modified_base 94: mod_base = OTHER; note = 2'-O-methyl ribonucleotide
  modified_base 95: mod_base = OTHER; note = 2'-O-methyl ribonucleotide
  modified_base 96: mod_base = OTHER; note = 2'-O-methyl ribonucleotide
  modified_base 97: mod_base = OTHER; note = 2'-O-methyl ribonucleotide
  modified_base 98: mod_base = OTHER; note = 2'-O-methyl ribonucleotide
  modified_base 99: mod_base = OTHER; note = 2'-O-methyl ribonucleotide
  modified_base 1..3: mod_base = OTHER; note = phosphorothioate linkage
  modified_base 96..99: mod_base = OTHER; note = phosphorothioate linkage

SEQ ID NO: 1651 - RNA, 98 nt, synthetic construct; identical to SEQ ID NO: 443
  source 1..98: mol_type = other RNA
  modified_base 1: mod_base = OTHER; note = 2'-O-methyl ribonucleotide
  modified_base 2: mod_base = OTHER; note = 2'-O-methyl ribonucleotide
  modified_base 96: mod_base = OTHER; note = 2'-O-methyl ribonucleotide
  modified_base 97: mod_base = OTHER; note = 2'-O-methyl ribonucleotide
  modified_base 98: mod_base = OTHER; note = 2'-O-methyl ribonucleotide
  modified_base 1..4: mod_base = OTHER; note = phosphorothioate linkage
  modified_base 95..98: mod_base = OTHER; note = phosphorothioate linkage

SEQ ID NO: 1652 - RNA, 98 nt, synthetic construct
  source 1..98: mol_type = other RNA
  modified_base 1: mod_base = OTHER; note = 2'-O-methyl ribonucleotide
  modified_base 2: mod_base = OTHER; note = 2'-O-methyl ribonucleotide
  modified_base 19: mod_base = OTHER; note = 2'-O-methyl ribonucleotide
  modified_base 26: mod_base = OTHER; note = 2'-O-methyl ribonucleotide
  modified_base 27: mod_base = OTHER; note = 2'-O-methyl ribonucleotide
  modified_base 28: mod_base = OTHER; note = 2'-O-methyl ribonucleotide
  modified_base 29: mod_base = OTHER; note = 2'-O-methyl ribonucleotide
  modified_base 30: mod_base = OTHER; note = 2'-O-methyl ribonucleotide
  modified_base 32: mod_base = OTHER; note = 2'-O-methyl ribonucleotide
  modified_base 33: mod_base = OTHER; note = 2'-O-methyl ribonucleotide
  modified_base 34: mod_base = OTHER; note = 2'-O-methyl ribonucleotide
  modified_base 35: mod_base = OTHER; note = 2'-O-methyl ribonucleotide
  modified_base 36: mod_base = OTHER; note = 2'-O-methyl ribonucleotide
  modified_base 37: mod_base = OTHER; note = 2'-O-methyl ribonucleotide
  modified_base 38: mod_base = OTHER; note = 2'-O-methyl ribonucleotide
  modified_base 39: mod_base = OTHER; note = 2'-O-methyl ribonucleotide
  modified_base 40: mod_base = OTHER; note = 2'-O-methyl ribonucleotide
  modified_base 44: mod_base = OTHER; note = 2'-O-methyl ribonucleotide
  modified_base 46: mod_base = OTHER; note = 2'-O-methyl ribonucleotide
  modified_base 48: mod_base = OTHER; note = 2'-O-methyl ribonucleotide
  modified_base 50: mod_base = OTHER; note = 2'-O-methyl ribonucleotide
  modified_base 51: mod_base = OTHER; note = 2'-O-methyl ribonucleotide
  modified_base 52: mod_base = OTHER; note = 2'-O-methyl ribonucleotide
  modified_base 53: mod_base = OTHER; note = 2'-O-methyl ribonucleotide
  modified_base 54: mod_base = OTHER; note = 2'-O-methyl ribonucleotide
  modified_base 55: mod_base = OTHER; note = 2'-O-methyl ribonucleotide
  modified_base 58: mod_base = OTHER; note = 2'-O-methyl ribonucleotide
  modified_base 59: mod_base = OTHER; note = 2'-O-methyl ribonucleotide
  modified_base 64: mod_base = OTHER; note = 2'-O-methyl ribonucleotide
  modified_base 65: mod_base = OTHER; note = 2'-O-methyl ribonucleotide
  modified_base 68: mod_base = OTHER; note = 2'-O-methyl ribonucleotide
  modified_base 69: mod_base = OTHER; note = 2'-O-methyl ribonucleotide
  modified_base 70: mod_base = OTHER; note = 2'-O-methyl ribonucleotide
  modified_base 72: mod_base = OTHER; note = 2'-O-methyl ribonucleotide
  modified_base 73: mod_base = OTHER; note = 2'-O-methyl ribonucleotide
  modified_base 74: mod_base = OTHER; note = 2'-O-methyl ribonucleotide
  modified_base 75: mod_base = OTHER; note = 2'-O-methyl ribonucleotide
  modified_base 76: mod_base = OTHER; note = 2'-O-methyl ribonucleotide
  modified_base 77: mod_base = OTHER; note = 2'-O-methyl ribonucleotide
  modified_base 78: mod_base = OTHER; note = 2'-O-methyl ribonucleotide
  modified_base 79: mod_base = OTHER; note = 2'-O-methyl ribonucleotide
  modified_base 81: mod_base = OTHER; note = 2'-O-methyl ribonucleotide
  modified_base 82: mod_base = OTHER; note = 2'-O-methyl ribonucleotide
  modified_base 83: mod_base = OTHER; note = 2'-O-methyl ribonucleotide
  modified_base 84: mod_base = OTHER; note = 2'-O-methyl ribonucleotide
  modified_base 85: mod_base = OTHER; note = 2'-O-methyl ribonucleotide
  modified_base 86: mod_base = OTHER; note = 2'-O-methyl ribonucleotide
  modified_base 87: mod_base = OTHER; note = 2'-O-methyl ribonucleotide
  modified_base 88: mod_base = OTHER; note = 2'-O-methyl ribonucleotide
  modified_base 89: mod_base = OTHER; note = 2'-O-methyl ribonucleotide
  modified_base 90: mod_base = OTHER; note = 2'-O-methyl ribonucleotide
  modified_base 91: mod_base = OTHER; note = 2'-O-methyl ribonucleotide
  modified_base 92: mod_base = OTHER; note = 2'-O-methyl ribonucleotide
  modified_base 93: mod_base = OTHER; note = 2'-O-methyl ribonucleotide
  modified_base 94: mod_base = OTHER; note = 2'-O-methyl ribonucleotide
  modified_base 95: mod_base = OTHER; note = 2'-O-methyl ribonucleotide
  modified_base 96: mod_base = OTHER; note = 2'-O-methyl ribonucleotide
  modified_base 97: mod_base = OTHER; note = 2'-O-methyl ribonucleotide
  modified_base 98: mod_base = OTHER; note = 2'-O-methyl ribonucleotide
  modified_base 1..4: mod_base = OTHER; note = phosphorothioate linkage
  modified_base 95..98: mod_base = OTHER; note = phosphorothioate linkage
gatacctgaataactctcgttttagagctagaaatagcaagttaaaataaggctagtccgttatcaacttgaaaaagtggcaccgagtcggtgctttt

SEQ ID NO: 1653 - RNA, 97 nt, synthetic construct
  source 1..97: mol_type = other RNA
  modified_base 1: mod_base = OTHER; note = 2'-O-methyl ribonucleotide
  modified_base 2: mod_base = OTHER; note = 2'-O-methyl ribonucleotide
  modified_base 18: mod_base = OTHER; note = 2'-O-methyl ribonucleotide
  modified_base 25: mod_base = OTHER; note = 2'-O-methyl ribonucleotide
  modified_base 26: mod_base = OTHER; note = 2'-O-methyl ribonucleotide
  modified_base 27: mod_base = OTHER; note = 2'-O-methyl ribonucleotide
  modified_base 28: mod_base = OTHER; note = 2'-O-methyl ribonucleotide
  modified_base 29: mod_base = OTHER; note = 2'-O-methyl ribonucleotide
  modified_base 31: mod_base = OTHER; note = 2'-O-methyl ribonucleotide
  modified_base 32: mod_base = OTHER; note = 2'-O-methyl ribonucleotide
  modified_base 33: mod_base = OTHER; note = 2'-O-methyl ribonucleotide
  modified_base 34: mod_base = OTHER; note = 2'-O-methyl ribonucleotide
  modified_base 35: mod_base = OTHER; note = 2'-O-methyl ribonucleotide
  modified_base 36: mod_base = OTHER; note = 2'-O-methyl ribonucleotide
  modified_base 37: mod_base = OTHER; note = 2'-O-methyl ribonucleotide
  modified_base 38: mod_base = OTHER; note = 2'-O-methyl ribonucleotide
  modified_base 39: mod_base = OTHER; note = 2'-O-methyl ribonucleotide
  modified_base 43: mod_base = OTHER; note = 2'-O-methyl ribonucleotide
  modified_base 45: mod_base = OTHER; note = 2'-O-methyl ribonucleotide
  modified_base 47: mod_base = OTHER; note = 2'-O-methyl ribonucleotide
  modified_base 49: mod_base = OTHER; note = 2'-O-methyl ribonucleotide
  modified_base 50: mod_base = OTHER; note = 2'-O-methyl ribonucleotide
  modified_base 51: mod_base = OTHER; note = 2'-O-methyl ribonucleotide
  modified_base 52: mod_base = OTHER; note = 2'-O-methyl ribonucleotide
  modified_base 53: mod_base = OTHER; note = 2'-O-methyl ribonucleotide
  modified_base 54: mod_base = OTHER; note = 2'-O-methyl ribonucleotide
  modified_base 57: mod_base = OTHER; note = 2'-O-methyl ribonucleotide
  modified_base 58: mod_base = OTHER; note = 2'-O-methyl ribonucleotide
  modified_base 63: mod_base = OTHER; note = 2'-O-methyl ribonucleotide
  modified_base 64: mod_base = OTHER; note = 2'-O-methyl ribonucleotide
  modified_base 67: mod_base = OTHER; note = 2'-O-methyl ribonucleotide
  modified_base 68: mod_base = OTHER; note = 2'-O-methyl ribonucleotide
  modified_base 69: mod_base = OTHER; note = 2'-O-methyl ribonucleotide
  modified_base 71: mod_base = OTHER; note = 2'-O-methyl ribonucleotide
  modified_base 72: mod_base = OTHER; note = 2'-O-methyl ribonucleotide
  modified_base 73: mod_base = OTHER; note = 2'-O-methyl ribonucleotide
  modified_base 74: mod_base = OTHER; note = 2'-O-methyl ribonucleotide
  modified_base 75: mod_base = OTHER; note = 2'-O-methyl ribonucleotide
  modified_base 76: mod_base = OTHER; note = 2'-O-methyl ribonucleotide
  modified_base 77: mod_base = OTHER; note = 2'-O-methyl ribonucleotide
  modified_base 78: mod_base = OTHER; note = 2'-O-methyl ribonucleotide
  modified_base 80: mod_base = OTHER; note = 2'-O-methyl ribonucleotide
  modified_base 81: mod_base = OTHER; note = 2'-O-methyl ribonucleotide
  modified_base 82: mod_base = OTHER; note = 2'-O-methyl ribonucleotide
  modified_base 83: mod_base = OTHER; note = 2'-O-methyl ribonucleotide
  modified_base 84: mod_base = OTHER; note = 2'-O-methyl ribonucleotide
  modified_base 85: mod_base = OTHER; note = 2'-O-methyl ribonucleotide
  modified_base 86: mod_base = OTHER; note = 2'-O-methyl ribonucleotide
  modified_base 87: mod_base = OTHER; note = 2'-O-methyl ribonucleotide
  modified_base 88: mod_base = OTHER; note = 2'-O-methyl ribonucleotide
  modified_base 89: mod_base = OTHER; note = 2'-O-methyl ribonucleotide
  modified_base 90: mod_base = OTHER; note = 2'-O-methyl ribonucleotide
  modified_base 91: mod_base = OTHER; note = 2'-O-methyl ribonucleotide
  modified_base 92: mod_base = OTHER; note = 2'-O-methyl ribonucleotide
  modified_base 93: mod_base = OTHER; note = 2'-O-methyl ribonucleotide
  modified_base 94: mod_base = OTHER; note = 2'-O-methyl ribonucleotide
  modified_base 95: mod_base = OTHER; note = 2'-O-methyl ribonucleotide
  modified_base 96: mod_base = OTHER; note = 2'-O-methyl ribonucleotide
  modified_base 97: mod_base = OTHER; note = 2'-O-methyl ribonucleotide
  modified_base 1..4: mod_base = OTHER; note = phosphorothioate linkage
  modified_base 94..97: mod_base = OTHER; note = phosphorothioate linkage
atacctgaataactctcgttttagagctagaaatagcaagttaaaataaggctagtccgttatcaacttgaaaaagtggcaccgagtcggtgctttt

SEQ ID NO: 1654 - RNA, 100 nt, synthetic construct
  source 1..100: mol_type = other RNA
  modified_base 1: mod_base = OTHER; note = 2'-O-methyl ribonucleotide
  modified_base 2: mod_base = OTHER; note = 2'-O-methyl ribonucleotide
  modified_base 3: mod_base = OTHER; note = 2'-O-methyl ribonucleotide
  modified_base 21: mod_base = OTHER; note = 2'-O-methyl ribonucleotide
  modified_base 28: mod_base = OTHER; note = 2'-O-methyl ribonucleotide
  modified_base 29: mod_base = OTHER; note = 2'-O-methyl ribonucleotide
  modified_base 30: mod_base = OTHER; note = 2'-O-methyl ribonucleotide
  modified_base 31: mod_base = OTHER; note = 2'-O-methyl ribonucleotide
  modified_base 32: mod_base = OTHER; note = 2'-O-methyl ribonucleotide
  modified_base 34: mod_base = OTHER; note = 2'-O-methyl ribonucleotide
  modified_base 35: mod_base = OTHER; note = 2'-O-methyl ribonucleotide
  modified_base 36: mod_base = OTHER; note = 2'-O-methyl ribonucleotide
  modified_base 37: mod_base = OTHER; note = 2'-O-methyl ribonucleotide
  modified_base 38: mod_base = OTHER; note = 2'-O-methyl ribonucleotide
  modified_base 39: mod_base = OTHER; note = 2'-O-methyl ribonucleotide
  modified_base 40: mod_base = OTHER; note = 2'-O-methyl ribonucleotide
  modified_base 41: mod_base = OTHER; note = 2'-O-methyl ribonucleotide
  modified_base 42: mod_base = OTHER; note = 2'-O-methyl ribonucleotide
  modified_base 46: mod_base = OTHER; note = 2'-O-methyl ribonucleotide
  modified_base 48: mod_base = OTHER; note = 2'-O-methyl ribonucleotide
  modified_base 50: mod_base = OTHER; note = 2'-O-methyl ribonucleotide
  modified_base 52: mod_base = OTHER; note = 2'-O-methyl ribonucleotide
  modified_base 53: mod_base = OTHER; note = 2'-O-methyl ribonucleotide
  modified_base 54: mod_base = OTHER; note = 2'-O-methyl ribonucleotide
  modified_base 55: mod_base = OTHER; note = 2'-O-methyl ribonucleotide
  modified_base 56: mod_base = OTHER; note = 2'-O-methyl ribonucleotide
  modified_base 57: mod_base = OTHER; note = 2'-O-methyl ribonucleotide
  modified_base 60: mod_base = OTHER; note = 2'-O-methyl ribonucleotide
  modified_base 61: mod_base = OTHER; note = 2'-O-methyl ribonucleotide
  modified_base 66: mod_base = OTHER; note = 2'-O-methyl ribonucleotide
  modified_base 67: mod_base = OTHER; note = 2'-O-methyl ribonucleotide
  modified_base 70: mod_base = OTHER; note = 2'-O-methyl ribonucleotide
  modified_base 71: mod_base = OTHER; note = 2'-O-methyl ribonucleotide
  modified_base 72: mod_base = OTHER; note = 2'-O-methyl ribonucleotide
  modified_base 74: mod_base = OTHER; note = 2'-O-methyl ribonucleotide
  modified_base 75: mod_base = OTHER; note = 2'-O-methyl ribonucleotide
  modified_base 76: mod_base = OTHER; note = 2'-O-methyl ribonucleotide
  modified_base 77: mod_base = OTHER; note = 2'-O-methyl ribonucleotide
  modified_base 78: mod_base = OTHER; note = 2'-O-methyl ribonucleotide
  modified_base 79: mod_base = OTHER; note = 2'-O-methyl ribonucleotide
  modified_base 80: mod_base = OTHER; note = 2'-O-methyl ribonucleotide
  modified_base 81: mod_base = OTHER; note = 2'-O-methyl ribonucleotide
  modified_base 83: mod_base = OTHER; note = 2'-O-methyl ribonucleotide
  modified_base 84: mod_base = OTHER; note = 2'-O-methyl ribonucleotide
  modified_base 85: mod_base = OTHER; note = 2'-O-methyl ribonucleotide
  modified_base 86: mod_base = OTHER; note = 2'-O-methyl ribonucleotide
  modified_base 87: mod_base = OTHER; note = 2'-O-methyl ribonucleotide
  modified_base 88: mod_base = OTHER; note = 2'-O-methyl ribonucleotide
  modified_base 89: mod_base = OTHER; note = 2'-O-methyl ribonucleotide
  modified_base 90: mod_base = OTHER; note = 2'-O-methyl ribonucleotide
  modified_base 91: mod_base = OTHER; note = 2'-O-methyl ribonucleotide
  modified_base 92: mod_base = OTHER; note = 2'-O-methyl ribonucleotide
  modified_base 93: mod_base = OTHER; note = 2'-O-methyl ribonucleotide
  modified_base 94: mod_base = OTHER; note = 2'-O-methyl ribonucleotide
  modified_base 95: mod_base = OTHER; note = 2'-O-methyl ribonucleotide
  modified_base 96: mod_base = OTHER; note = 2'-O-methyl ribonucleotide
  modified_base 97: mod_base = OTHER; note = 2'-O-methyl ribonucleotide
  modified_base 98: mod_base = OTHER; note = 2'-O-methyl ribonucleotide
  modified_base 99: mod_base = OTHER; note = 2'-O-methyl ribonucleotide
  modified_base 100: mod_base = OTHER; note = 2'-O-methyl ribonucleotide
  modified_base 6: mod_base = OTHER; note = nebularine
  modified_base 1..4: mod_base = OTHER; note = phosphorothioate linkage
  modified_base 97..100: mod_base = OTHER; note = phosphorothioate linkage
aagatncctgaataaccctcgttttagagctagaaatagcaagttaaaataaggctagtccgttatcaacttgaaaaagtggcaccgagtcggtgctttt

SEQ ID NO: 1655 - RNA, 100 nt, synthetic construct
  source 1..100: mol_type = other RNA
  modified_base 1: mod_base = OTHER; note = 2'-O-methyl ribonucleotide
  modified_base 2: mod_base = OTHER; note = 2'-O-methyl ribonucleotide
  modified_base 3: mod_base = OTHER; note = 2'-O-methyl ribonucleotide
  modified_base 21: mod_base = OTHER; note = 2'-O-methyl ribonucleotide
  modified_base 28: mod_base = OTHER; note = 2'-O-methyl ribonucleotide
  modified_base 29: mod_base = OTHER; note = 2'-O-methyl ribonucleotide
  modified_base 30: mod_base = OTHER; note = 2'-O-methyl ribonucleotide
  modified_base 31: mod_base = OTHER; note = 2'-O-methyl ribonucleotide
  modified_base 32: mod_base = OTHER; note = 2'-O-methyl ribonucleotide
  modified_base 34: mod_base = OTHER; note = 2'-O-methyl ribonucleotide
  modified_base 35: mod_base = OTHER; note = 2'-O-methyl ribonucleotide
  modified_base 36: mod_base = OTHER; note = 2'-O-methyl ribonucleotide
  modified_base 37: mod_base = OTHER; note = 2'-O-methyl ribonucleotide
  modified_base 38: mod_base = OTHER; note = 2'-O-methyl ribonucleotide
  modified_base 39: mod_base = OTHER; note = 2'-O-methyl ribonucleotide
  modified_base 40: mod_base = OTHER; note = 2'-O-methyl ribonucleotide
  modified_base 41: mod_base = OTHER; note = 2'-O-methyl ribonucleotide
  modified_base 42: mod_base = OTHER; note = 2'-O-methyl ribonucleotide
  modified_base 46: mod_base = OTHER; note = 2'-O-methyl ribonucleotide
  modified_base 48: mod_base = OTHER; note = 2'-O-methyl ribonucleotide
  modified_base 50: mod_base = OTHER; note = 2'-O-methyl ribonucleotide
  modified_base 52: mod_base = OTHER; note = 2'-O-methyl ribonucleotide
  modified_base 53: mod_base = OTHER; note = 2'-O-methyl ribonucleotide
  modified_base 54: mod_base = OTHER; note = 2'-O-methyl ribonucleotide
  modified_base 55: mod_base = OTHER; note = 2'-O-methyl ribonucleotide
  modified_base 56: mod_base = OTHER; note = 2'-O-methyl ribonucleotide
  modified_base 57: mod_base = OTHER; note = 2'-O-methyl ribonucleotide
  modified_base 60: mod_base = OTHER; note = 2'-O-methyl ribonucleotide
  modified_base 61: mod_base = OTHER; note = 2'-O-methyl ribonucleotide
  modified_base 66: mod_base = OTHER; note = 2'-O-methyl ribonucleotide
  modified_base 67: mod_base = OTHER; note = 2'-O-methyl ribonucleotide
  modified_base 70: mod_base = OTHER; note = 2'-O-methyl ribonucleotide
  modified_base 71: mod_base = OTHER; note = 2'-O-methyl ribonucleotide
  modified_base 72: mod_base = OTHER; note = 2'-O-methyl ribonucleotide
  modified_base 74: mod_base = OTHER; note = 2'-O-methyl ribonucleotide
  modified_base 75: mod_base = OTHER; note = 2'-O-methyl ribonucleotide
  modified_base 76: mod_base = OTHER; note = 2'-O-methyl ribonucleotide
  modified_base 77: mod_base = OTHER; note = 2'-O-methyl ribonucleotide
  modified_base 78: mod_base = OTHER; note = 2'-O-methyl ribonucleotide
  modified_base 79: mod_base = OTHER; note = 2'-O-methyl ribonucleotide
  modified_base 80: mod_base = OTHER; note = 2'-O-methyl ribonucleotide
  modified_base 81: mod_base = OTHER; note = 2'-O-methyl ribonucleotide
  modified_base 83: mod_base = OTHER; note = 2'-O-methyl ribonucleotide
  modified_base 84: mod_base = OTHER; note = 2'-O-methyl ribonucleotide
  modified_base 85: mod_base = OTHER; note = 2'-O-methyl ribonucleotide
  modified_base 86: mod_base = OTHER; note = 2'-O-methyl ribonucleotide
  modified_base 87: mod_base = OTHER; note = 2'-O-methyl ribonucleotide
  modified_base 88: mod_base = OTHER; note = 2'-O-methyl ribonucleotide
  modified_base 89: mod_base = OTHER; note = 2'-O-methyl ribonucleotide
  modified_base 90: mod_base = OTHER; note = 2'-O-methyl ribonucleotide
  modified_base 91: mod_base = OTHER; note = 2'-O-methyl ribonucleotide
  modified_base 92: mod_base = OTHER; note = 2'-O-methyl ribonucleotide
  modified_base 93: mod_base = OTHER; note = 2'-O-methyl ribonucleotide
  modified_base 94: mod_base = OTHER; note = 2'-O-methyl ribonucleotide
  modified_base 95: mod_base = OTHER; note = 2'-O-methyl ribonucleotide
  modified_base 96: mod_base = OTHER; note = 2'-O-methyl ribonucleotide
  modified_base 97: mod_base = OTHER; note = 2'-O-methyl ribonucleotide
  modified_base 98: mod_base = OTHER; note = 2'-O-methyl ribonucleotide
  modified_base 99: mod_base = OTHER; note = 2'-O-methyl ribonucleotide
  modified_base 100: mod_base = OTHER; note = 2'-O-methyl ribonucleotide
  modified_base 6: mod_base = OTHER; note = nebularine
  modified_base 11: mod_base = OTHER; note = nebularine
  modified_base 1..4: mod_base = OTHER; note = phosphorothioate linkage
  modified_base 97..100: mod_base = OTHER; note = phosphorothioate linkage
aagatncctgnataaccctcgttttagagctagaaatagcaagttaaaataaggctagtccgttatcaacttgaaaaagtggcaccgagtcggtgctttt

SEQ ID NO: 1656 - RNA, 100 nt, synthetic construct
  source 1..100: mol_type = other RNA
  modified_base 1: mod_base = OTHER; note = 2'-O-methyl ribonucleotide
  modified_base 2: mod_base = OTHER; note = 2'-O-methyl ribonucleotide
  modified_base 3: mod_base = OTHER; note = 2'-O-methyl ribonucleotide
  modified_base 21: mod_base = OTHER; note = 2'-O-methyl ribonucleotide
  modified_base 28: mod_base = OTHER; note = 2'-O-methyl ribonucleotide
  modified_base 29: mod_base = OTHER; note = 2'-O-methyl ribonucleotide
  modified_base 30: mod_base = OTHER; note = 2'-O-methyl ribonucleotide
  modified_base 31: mod_base = OTHER; note = 2'-O-methyl ribonucleotide
  modified_base 32: mod_base = OTHER; note = 2'-O-methyl ribonucleotide
  modified_base 34: mod_base = OTHER; note = 2'-O-methyl ribonucleotide
  modified_base 35: mod_base = OTHER; note = 2'-O-methyl ribonucleotide
  modified_base 36: mod_base = OTHER; note = 2'-O-methyl ribonucleotide
  modified_base 37: mod_base = OTHER; note = 2'-O-methyl ribonucleotide
  modified_base 38: mod_base = OTHER; note = 2'-O-methyl ribonucleotide
  modified_base 39: mod_base = OTHER; note = 2'-O-methyl ribonucleotide
  modified_base 40: mod_base = OTHER; note = 2'-O-methyl ribonucleotide
  modified_base 41: mod_base = OTHER; note = 2'-O-methyl ribonucleotide
  modified_base 42: mod_base = OTHER; note = 2'-O-methyl ribonucleotide
  modified_base 46: mod_base = OTHER; note = 2'-O-methyl ribonucleotide
  modified_base 48: mod_base = OTHER; note = 2'-O-methyl ribonucleotide
  modified_base 50: mod_base = OTHER; note = 2'-O-methyl ribonucleotide
  modified_base 52: mod_base = OTHER; note = 2'-O-methyl ribonucleotide
  modified_base 53: mod_base = OTHER; note = 2'-O-methyl ribonucleotide
  modified_base 54: mod_base = OTHER; note = 2'-O-methyl ribonucleotide
  modified_base 55: mod_base = OTHER; note = 2'-O-methyl ribonucleotide
  modified_base 56: mod_base = OTHER; note = 2'-O-methyl ribonucleotide
  modified_base 57: mod_base = OTHER; note = 2'-O-methyl ribonucleotide
  modified_base 60: mod_base = OTHER; note = 2'-O-methyl ribonucleotide
  modified_base 61: mod_base = OTHER; note = 2'-O-methyl ribonucleotide
  modified_base 66: mod_base = OTHER; note = 2'-O-methyl ribonucleotide
  modified_base 67: mod_base = OTHER; note = 2'-O-methyl ribonucleotide
  modified_base 70: mod_base = OTHER; note = 2'-O-methyl ribonucleotide
  modified_base 71: mod_base = OTHER; note = 2'-O-methyl ribonucleotide
  modified_base 72: mod_base = OTHER; note = 2'-O-methyl ribonucleotide
  modified_base 74: mod_base = OTHER; note = 2'-O-methyl ribonucleotide
  modified_base 75: mod_base = OTHER; note = 2'-O-methyl ribonucleotide
  modified_base 76: mod_base = OTHER; note = 2'-O-methyl ribonucleotide
  modified_base 77: mod_base = OTHER; note = 2'-O-methyl ribonucleotide
  modified_base 78: mod_base = OTHER; note = 2'-O-methyl ribonucleotide
  modified_base 79: mod_base = OTHER; note = 2'-O-methyl ribonucleotide
  modified_base 80: mod_base = OTHER; note = 2'-O-methyl ribonucleotide
  modified_base 81: mod_base = OTHER; note = 2'-O-methyl ribonucleotide
  modified_base 83: mod_base = OTHER; note = 2'-O-methyl ribonucleotide
  modified_base 84: mod_base = OTHER; note = 2'-O-methyl ribonucleotide
  modified_base 85: mod_base = OTHER; note = 2'-O-methyl ribonucleotide
  modified_base 86: mod_base = OTHER; note = 2'-O-methyl ribonucleotide
  modified_base 87: mod_base = OTHER; note = 2'-O-methyl ribonucleotide
  modified_base 88: mod_base = OTHER; note = 2'-O-methyl ribonucleotide
  modified_base 89: mod_base = OTHER; note = 2'-O-methyl ribonucleotide
  modified_base 90: mod_base = OTHER; note = 2'-O-methyl ribonucleotide
  modified_base 91: mod_base = OTHER; note = 2'-O-methyl ribonucleotide
  modified_base 92: mod_base = OTHER; note = 2'-O-methyl ribonucleotide
  modified_base 93: mod_base = OTHER; note = 2'-O-methyl ribonucleotide
  modified_base 94: mod_base = OTHER; note = 2'-O-methyl ribonucleotide
  modified_base 95: mod_base = OTHER; note = 2'-O-methyl ribonucleotide
  modified_base 96: mod_base = OTHER; note = 2'-O-methyl ribonucleotide
  modified_base 97: mod_base = OTHER; note = 2'-O-methyl ribonucleotide
  modified_base 98: mod_base = OTHER; note = 2'-O-methyl ribonucleotide
  modified_base 99: mod_base = OTHER; note = 2'-O-methyl ribonucleotide
  modified_base 100: mod_base = OTHER; note = 2'-O-methyl ribonucleotide
  modified_base 6: mod_base = OTHER; note = nebularine
  modified_base 15: mod_base = OTHER; note = nebularine
  modified_base 1..4: mod_base = OTHER; note = phosphorothioate linkage
  modified_base 97..100: mod_base = OTHER; note = phosphorothioate linkage
aagatncctgaatanccctcgttttagagctagaaatagcaagttaaaataaggctagtccgttatcaacttgaaaaagtggcaccgagtcggtgctttt

SEQ ID NO: 1657 - RNA, 100 nt, synthetic construct
  source 1..100: mol_type = other RNA
  modified_base 1: mod_base = OTHER; note = 2'-O-methyl ribonucleotide
  modified_base 2: mod_base = OTHER; note = 2'-O-methyl ribonucleotide
  modified_base 3: mod_base = OTHER; note = 2'-O-methyl ribonucleotide
  modified_base 21: mod_base = OTHER; note = 2'-O-methyl ribonucleotide
  modified_base 28: mod_base = OTHER; note = 2'-O-methyl ribonucleotide
  modified_base 29: mod_base = OTHER; note = 2'-O-methyl ribonucleotide
  modified_base 30: mod_base = OTHER; note = 2'-O-methyl ribonucleotide
  modified_base 31: mod_base = OTHER; note = 2'-O-methyl ribonucleotide
  modified_base 32: mod_base = OTHER; note = 2'-O-methyl ribonucleotide
  modified_base 34: mod_base = OTHER; note = 2'-O-methyl ribonucleotide
  modified_base 35: mod_base = OTHER; note = 2'-O-methyl ribonucleotide
  modified_base 36: mod_base = OTHER; note = 2'-O-methyl ribonucleotide
  modified_base 37: mod_base = OTHER; note = 2'-O-methyl ribonucleotide
  modified_base 38: mod_base = OTHER; note = 2'-O-methyl ribonucleotide
  modified_base 39: mod_base = OTHER; note = 2'-O-methyl ribonucleotide
  modified_base 40: mod_base = OTHER; note = 2'-O-methyl ribonucleotide
  modified_base 41: mod_base = OTHER; note = 2'-O-methyl ribonucleotide
  modified_base 42: mod_base = OTHER; note = 2'-O-methyl ribonucleotide
  modified_base 46: mod_base = OTHER; note = 2'-O-methyl ribonucleotide
  modified_base 48: mod_base = OTHER; note = 2'-O-methyl ribonucleotide
  modified_base 50: mod_base = OTHER; note = 2'-O-methyl ribonucleotide
  modified_base 52: mod_base = OTHER; note = 2'-O-methyl ribonucleotide
  modified_base 53: mod_base = OTHER; note = 2'-O-methyl ribonucleotide
  modified_base 54: mod_base = OTHER; note = 2'-O-methyl ribonucleotide
  modified_base 55: mod_base = OTHER; note = 2'-O-methyl ribonucleotide
  modified_base 56: mod_base = OTHER; note = 2'-O-methyl ribonucleotide
  modified_base 57: mod_base = OTHER; note = 2'-O-methyl ribonucleotide
  modified_base 60: mod_base = OTHER; note = 2'-O-methyl ribonucleotide
  modified_base 61: mod_base = OTHER; note = 2'-O-methyl ribonucleotide
  modified_base 66: mod_base = OTHER; note = 2'-O-methyl ribonucleotide
  modified_base 67: mod_base = OTHER; note = 2'-O-methyl ribonucleotide
  modified_base 70: mod_base = OTHER; note = 2'-O-methyl ribonucleotide
  modified_base 71: mod_base = OTHER; note = 2'-O-methyl ribonucleotide
  modified_base 72: mod_base = OTHER; note = 2'-O-methyl ribonucleotide
  modified_base 74: mod_base = OTHER; note = 2'-O-methyl ribonucleotide
  modified_base 75: mod_base = OTHER; note = 2'-O-methyl ribonucleotide
  modified_base 76: mod_base = OTHER; note = 2'-O-methyl ribonucleotide
  modified_base 77: mod_base = OTHER; note = 2'-O-methyl ribonucleotide
  modified_base 78: mod_base = OTHER; note = 2'-O-methyl ribonucleotide
  modified_base 79: mod_base = OTHER; note = 2'-O-methyl ribonucleotide
  modified_base 80: mod_base = OTHER; note = 2'-O-methyl ribonucleotide
  modified_base 81: mod_base = OTHER; note = 2'-O-methyl ribonucleotide
  modified_base 83: mod_base = OTHER; note = 2'-O-methyl ribonucleotide
  modified_base 84: mod_base = OTHER; note = 2'-O-methyl ribonucleotide
  modified_base 85: mod_base = OTHER; note = 2'-O-methyl ribonucleotide
  modified_base 86: mod_base = OTHER; note = 2'-O-methyl ribonucleotide
  modified_base 87: mod_base = OTHER; note = 2'-O-methyl ribonucleotide
  modified_base 88: mod_base = OTHER; note = 2'-O-methyl ribonucleotide
  modified_base 89: mod_base = OTHER; note = 2'-O-methyl ribonucleotide
  modified_base 90: mod_base = OTHER; note = 2'-O-methyl ribonucleotide
  modified_base 91: mod_base = OTHER; note = 2'-O-methyl ribonucleotide
  modified_base 92: mod_base = OTHER; note = 2'-O-methyl ribonucleotide
  modified_base 93: mod_base = OTHER; note = 2'-O-methyl ribonucleotide
  modified_base 94: mod_base = OTHER; note = 2'-O-methyl ribonucleotide
  modified_base 95: mod_base = OTHER; note = 2'-O-methyl ribonucleotide
  modified_base 96: mod_base = OTHER; note = 2'-O-methyl ribonucleotide
  modified_base 97: mod_base = OTHER; note = 2'-O-methyl ribonucleotide
  modified_base 98: mod_base = OTHER; note = 2'-O-methyl ribonucleotide
  modified_base 99: mod_base = OTHER; note = 2'-O-methyl ribonucleotide
  modified_base 100: mod_base = OTHER; note = 2'-O-methyl ribonucleotide
  modified_base 6: mod_base = OTHER; note = nebularine
  modified_base 11: mod_base = OTHER; note = nebularine
  modified_base 14: mod_base = OTHER; note = nebularine
  modified_base 1..4: mod_base = OTHER; note = phosphorothioate linkage
  modified_base 97..100: mod_base = OTHER; note = phosphorothioate linkage
aagatncctgnatnaccctcgttttagagctagaaatagcaagttaaaataaggctagtccgttatcaacttgaaaaagtggcaccgagtcggtgctttt

SEQ ID NO: 1658 - RNA, 100 nt, synthetic construct
  source 1..100: mol_type = other RNA
  modified_base 1: mod_base = OTHER; note = 2'-O-methyl ribonucleotide
  modified_base 2: mod_base = OTHER; note = 2'-O-methyl ribonucleotide
  modified_base 3: mod_base = OTHER; note = 2'-O-methyl ribonucleotide
  modified_base 21: mod_base = OTHER; note = 2'-O-methyl ribonucleotide
  modified_base 28: mod_base = OTHER; note = 2'-O-methyl ribonucleotide
  modified_base 29: mod_base = OTHER; note = 2'-O-methyl ribonucleotide
  modified_base 30: mod_base = OTHER; note = 2'-O-methyl ribonucleotide
  modified_base 31: mod_base = OTHER; note = 2'-O-methyl ribonucleotide
  modified_base 32: mod_base = OTHER; note = 2'-O-methyl ribonucleotide
  modified_base 34: mod_base = OTHER; note = 2'-O-methyl ribonucleotide
  modified_base 35: mod_base = OTHER; note = 2'-O-methyl ribonucleotide
  modified_base 36: mod_base = OTHER; note = 2'-O-methyl ribonucleotide
  modified_base 37: mod_base = OTHER; note = 2'-O-methyl ribonucleotide
  modified_base 38: mod_base = OTHER; note = 2'-O-methyl ribonucleotide
  modified_base 39: mod_base = OTHER; note = 2'-O-methyl ribonucleotide
  modified_base 40: mod_base = OTHER; note = 2'-O-methyl ribonucleotide
  modified_base 41: mod_base = OTHER; note = 2'-O-methyl ribonucleotide
  modified_base 42: mod_base = OTHER; note = 2'-O-methyl ribonucleotide
  modified_base 46: mod_base = OTHER; note = 2'-O-methyl ribonucleotide
  modified_base 48: mod_base = OTHER; note = 2'-O-methyl ribonucleotide
  modified_base 50: mod_base = OTHER; note = 2'-O-methyl ribonucleotide
  modified_base 52: mod_base = OTHER; note = 2'-O-methyl ribonucleotide
  modified_base 53: mod_base = OTHER; note = 2'-O-methyl ribonucleotide
  modified_base 54: mod_base = OTHER; note = 2'-O-methyl ribonucleotide
  modified_base 55: mod_base = OTHER; note = 2'-O-methyl ribonucleotide
  modified_base 56: mod_base = OTHER; note = 2'-O-methyl ribonucleotide
  modified_base 57: mod_base = OTHER; note = 2'-O-methyl ribonucleotide
  modified_base 60: mod_base = OTHER; note = 2'-O-methyl ribonucleotide
  modified_base 61: mod_base = OTHER; note = 2'-O-methyl ribonucleotide
  modified_base 66: mod_base = OTHER; note = 2'-O-methyl ribonucleotide
  modified_base 67: mod_base = OTHER; note = 2'-O-methyl ribonucleotide
  modified_base 70: mod_base = OTHER; note = 2'-O-methyl ribonucleotide
  modified_base 71: mod_base = OTHER; note = 2'-O-methyl ribonucleotide
  modified_base 72: mod_base = OTHER; note = 2'-O-methyl ribonucleotide
  modified_base 74: mod_base = OTHER; note = 2'-O-methyl ribonucleotide
  modified_base 75: mod_base = OTHER; note = 2'-O-methyl ribonucleotide
  modified_base 76: mod_base = OTHER; note = 2'-O-methyl ribonucleotide
  modified_base 77: mod_base = OTHER; note = 2'-O-methyl ribonucleotide
  modified_base 78: mod_base = OTHER; note = 2'-O-methyl ribonucleotide
  modified_base 79: mod_base = OTHER; note = 2'-O-methyl ribonucleotide
  modified_base 80: mod_base = OTHER; note = 2'-O-methyl ribonucleotide
  modified_base 81: mod_base = OTHER; note = 2'-O-methyl ribonucleotide
  modified_base 83: mod_base = OTHER; note = 2'-O-methyl ribonucleotide
  modified_base 84: mod_base = OTHER; note = 2'-O-methyl ribonucleotide
  modified_base 85: mod_base = OTHER; note = 2'-O-methyl ribonucleotide
  modified_base 86: mod_base = OTHER; note = 2'-O-methyl ribonucleotide
  modified_base 87: mod_base = OTHER; note = 2'-O-methyl ribonucleotide
  modified_base 88: mod_base = OTHER; note = 2'-O-methyl ribonucleotide
  modified_base 89: mod_base = OTHER; note = 2'-O-methyl ribonucleotide
  modified_base 90: mod_base = OTHER; note = 2'-O-methyl ribonucleotide
  modified_base 91: mod_base = OTHER; note = 2'-O-methyl ribonucleotide
  modified_base 92: mod_base = OTHER; note = 2'-O-methyl ribonucleotide
  modified_base 93: mod_base = OTHER; note = 2'-O-methyl ribonucleotide
  modified_base 94: mod_base = OTHER; note = 2'-O-methyl ribonucleotide
  modified_base 95: mod_base = OTHER; note = 2'-O-methyl ribonucleotide
  modified_base 96: mod_base = OTHER; note = 2'-O-methyl ribonucleotide
  modified_base 97: mod_base = OTHER; note = 2'-O-methyl ribonucleotide
  modified_base 98: mod_base = OTHER; note = 2'-O-methyl ribonucleotide
  modified_base 99: mod_base = OTHER; note = 2'-O-methyl ribonucleotide
  modified_base 100: mod_base = OTHER; note = 2'-O-methyl ribonucleotide
  modified_base 4: mod_base = OTHER; note = nebularine
  modified_base 6: mod_base = OTHER; note = nebularine
  modified_base 1..4: mod_base = OTHER; note = phosphorothioate linkage
  modified_base 97..100: mod_base = OTHER; note = phosphorothioate linkage
aagntncctgaataaccctcgttttagagctagaaatagcaagttaaaataaggctagtccgttatcaacttgaaaaagtggcaccgagtcggtgctttt

SEQ ID NO: 1659 - RNA, 100 nt, synthetic construct
  source 1..100: mol_type = other RNA
  modified_base 1: mod_base = OTHER; note = 2'-O-methyl ribonucleotide
  modified_base 2: mod_base = OTHER; note = 2'-O-methyl ribonucleotide
  modified_base 3: mod_base = OTHER; note = 2'-O-methyl ribonucleotide
  modified_base 21: mod_base = OTHER; note = 2'-O-methyl ribonucleotide
  modified_base 28: mod_base = OTHER; note = 2'-O-methyl ribonucleotide
  modified_base 29: mod_base = OTHER; note = 2'-O-methyl ribonucleotide
  modified_base 30: mod_base = OTHER; note = 2'-O-methyl ribonucleotide
  modified_base 31: mod_base = OTHER; note = 2'-O-methyl ribonucleotide
  modified_base 32: mod_base = OTHER; note = 2'-O-methyl ribonucleotide
  modified_base 34: mod_base = OTHER; note = 2'-O-methyl ribonucleotide
  modified_base 35: mod_base = OTHER; note = 2'-O-methyl ribonucleotide
  modified_base 36: mod_base = OTHER; note = 2'-O-methyl ribonucleotide
  modified_base 37: mod_base = OTHER; note = 2'-O-methyl ribonucleotide
  modified_base 38: mod_base = OTHER; note = 2'-O-methyl ribonucleotide
  modified_base 39: mod_base = OTHER; note = 2'-O-methyl ribonucleotide
  modified_base 40: mod_base = OTHER; note = 2'-O-methyl ribonucleotide
  modified_base 41: mod_base = OTHER; note = 2'-O-methyl ribonucleotide
  modified_base 42: mod_base = OTHER; note = 2'-O-methyl ribonucleotide
  modified_base 46: mod_base = OTHER; note = 2'-O-methyl ribonucleotide
  modified_base 48: mod_base = OTHER; note = 2'-O-methyl ribonucleotide
  modified_base 50: mod_base = OTHER; note = 2'-O-methyl ribonucleotide
  modified_base 52: mod_base = OTHER; note = 2'-O-methyl ribonucleotide
  modified_base 53: mod_base = OTHER; note = 2'-O-methyl ribonucleotide
  modified_base 54: mod_base = OTHER; note = 2'-O-methyl ribonucleotide
  modified_base 55: mod_base = OTHER; note = 2'-O-methyl ribonucleotide
  modified_base 56: mod_base = OTHER; note = 2'-O-methyl ribonucleotide
  modified_base 57: mod_base = OTHER; note = 2'-O-methyl ribonucleotide
  modified_base 60: mod_base = OTHER; note = 2'-O-methyl ribonucleotide
  modified_base 61: mod_base = OTHER; note = 2'-O-methyl ribonucleotide
  modified_base 66: mod_base = OTHER; note = 2'-O-methyl ribonucleotide
  modified_base 67: mod_base = OTHER; note = 2'-O-methyl ribonucleotide
  modified_base 70: mod_base = OTHER; note = 2'-O-methyl ribonucleotide
  modified_base 71: mod_base = OTHER; note = 2'-O-methyl ribonucleotide
  modified_base 72: mod_base = OTHER; note = 2'-O-methyl ribonucleotide
  modified_base 74: mod_base = OTHER; note = 2'-O-methyl ribonucleotide
  modified_base 75: mod_base = OTHER; note = 2'-O-methyl ribonucleotide
  modified_base 76: mod_base = OTHER; note = 2'-O-methyl ribonucleotide
  modified_base 77: mod_base = OTHER; note = 2'-O-methyl ribonucleotide
  modified_base 78: mod_base = OTHER; note = 2'-O-methyl ribonucleotide
  modified_base 79: mod_base = OTHER; note = 2'-O-methyl ribonucleotide
  modified_base 80: mod_base = OTHER; note = 2'-O-methyl ribonucleotide
  modified_base 81: mod_base = OTHER; note = 2'-O-methyl ribonucleotide
  modified_base 83: mod_base = OTHER; note = 2'-O-methyl ribonucleotide
  modified_base 84: mod_base = OTHER; note = 2'-O-methyl ribonucleotide
  modified_base 85: mod_base = OTHER; note = 2'-O-methyl ribonucleotide
  modified_base 86: mod_base = OTHER; note = 2'-O-methyl ribonucleotide
  modified_base 87: mod_base = OTHER; note = 2'-O-methyl ribonucleotide
  modified_base 88: mod_base = OTHER; note = 2'-O-methyl ribonucleotide
  modified_base 89: mod_base = OTHER; note = 2'-O-methyl ribonucleotide
  modified_base 90: mod_base = OTHER; note = 2'-O-methyl ribonucleotide
  modified_base 91: mod_base = OTHER; note = 2'-O-methyl ribonucleotide
  modified_base 92: mod_base = OTHER; note = 2'-O-methyl ribonucleotide
  modified_base 93: mod_base = OTHER; note = 2'-O-methyl ribonucleotide
  modified_base 94: mod_base = OTHER; note = 2'-O-methyl ribonucleotide
  modified_base 95: mod_base = OTHER; note = 2'-O-methyl ribonucleotide
  modified_base 96: mod_base = OTHER; note = 2'-O-methyl ribonucleotide
  modified_base 97: mod_base = OTHER; note = 2'-O-methyl ribonucleotide
  modified_base 98: mod_base = OTHER; note = 2'-O-methyl ribonucleotide
  modified_base 99: mod_base = OTHER; note = 2'-O-methyl ribonucleotide
  modified_base 100: mod_base = OTHER; note = 2'-O-methyl ribonucleotide
  modified_base 4: mod_base = OTHER; note = nebularine
  modified_base 6: mod_base = OTHER; note = nebularine
  modified_base 15: mod_base = OTHER; note = nebularine
  modified_base 1..4: mod_base = OTHER; note = phosphorothioate linkage
  modified_base 97..100: mod_base = OTHER; note = phosphorothioate linkage
aagntncctgaatanccctcgttttagagctagaaatagcaagttaaaataaggctagtccgttatcaacttgaaaaagtggcaccgagtcggtgctttt

SEQ ID NO: 1660 - RNA, 100 nt, synthetic construct
  source 1..100: mol_type = other RNA
  modified_base 1: mod_base = OTHER; note = 2'-O-methyl ribonucleotide
  modified_base 2: mod_base = OTHER; note = 2'-O-methyl ribonucleotide
  modified_base 3: mod_base = OTHER; note = 2'-O-methyl ribonucleotide
  modified_base 21: mod_base = OTHER; note = 2'-O-methyl ribonucleotide
  modified_base 28: mod_base = OTHER; note = 2'-O-methyl ribonucleotide
  modified_base 29: mod_base = OTHER; note = 2'-O-methyl ribonucleotide
  modified_base 30: mod_base = OTHER; note = 2'-O-methyl ribonucleotide
  modified_base 31: mod_base = OTHER; note = 2'-O-methyl ribonucleotide
  modified_base 32: mod_base = OTHER; note = 2'-O-methyl ribonucleotide
  modified_base 34: mod_base = OTHER; note = 2'-O-methyl ribonucleotide
  modified_base 35: mod_base = OTHER; note = 2'-O-methyl ribonucleotide
  modified_base 36: mod_base = OTHER; note = 2'-O-methyl ribonucleotide
  modified_base 37: mod_base = OTHER; note = 2'-O-methyl ribonucleotide
  modified_base 38: mod_base = OTHER; note = 2'-O-methyl ribonucleotide
  modified_base 39: mod_base = OTHER; note = 2'-O-methyl ribonucleotide
  modified_base 40: mod_base = OTHER; note = 2'-O-methyl ribonucleotide
  modified_base 41: mod_base = OTHER; note = 2'-O-methyl ribonucleotide
  modified_base 42: mod_base = OTHER; note = 2'-O-methyl ribonucleotide
  modified_base 46: mod_base = OTHER; note = 2'-O-methyl ribonucleotide
  modified_base 48: mod_base = OTHER; note = 2'-O-methyl ribonucleotide
  modified_base 50: mod_base = OTHER; note = 2'-O-methyl ribonucleotide
  modified_base 52: mod_base = OTHER; note = 2'-O-methyl ribonucleotide
  modified_base 53: mod_base = OTHER; note = 2'-O-methyl ribonucleotide
  modified_base 54: mod_base = OTHER; note = 2'-O-methyl ribonucleotide
  modified_base 55: mod_base = OTHER; note = 2'-O-methyl ribonucleotide
  modified_base 56: mod_base = OTHER; note = 2'-O-methyl ribonucleotide
  modified_base 57: mod_base = OTHER; note = 2'-O-methyl ribonucleotide
  modified_base 60: mod_base = OTHER; note = 2'-O-methyl ribonucleotide
  modified_base 61: mod_base = OTHER; note = 2'-O-methyl ribonucleotide
  modified_base 66: mod_base = OTHER; note = 2'-O-methyl ribonucleotide
  modified_base 67: mod_base = OTHER; note = 2'-O-methyl ribonucleotide
  modified_base 70: mod_base = OTHER; note = 2'-O-methyl ribonucleotide
  modified_base 71: mod_base = OTHER; note = 2'-O-methyl ribonucleotide
  modified_base 72: mod_base = OTHER; note = 2'-O-methyl ribonucleotide
  modified_base 74: mod_base = OTHER; note = 2'-O-methyl ribonucleotide
  modified_base 75: mod_base = OTHER; note = 2'-O-methyl ribonucleotide
  modified_base 76: mod_base = OTHER; note = 2'-O-methyl ribonucleotide
  modified_base 77: mod_base = OTHER; note = 2'-O-methyl ribonucleotide
  modified_base 78: mod_base = OTHER; note = 2'-O-methyl ribonucleotide
  modified_base 79: mod_base = OTHER; note = 2'-O-methyl ribonucleotide
  modified_base 80: mod_base = OTHER; note = 2'-O-methyl ribonucleotide
  modified_base 81: mod_base = OTHER; note = 2'-O-methyl ribonucleotide
  modified_base 83: mod_base = OTHER; note = 2'-O-methyl ribonucleotide
  modified_base 84: mod_base = OTHER; note = 2'-O-methyl ribonucleotide
  modified_base 85: mod_base = OTHER; note = 2'-O-methyl ribonucleotide
  modified_base 86: mod_base = OTHER; note = 2'-O-methyl ribonucleotide
  modified_base 87: mod_base = OTHER; note = 2'-O-methyl ribonucleotide
  modified_base 88: mod_base = OTHER; note = 2'-O-methyl ribonucleotide
  modified_base 89: mod_base = OTHER; note = 2'-O-methyl ribonucleotide
  modified_base 90: mod_base = OTHER; note = 2'-O-methyl ribonucleotide
  modified_base 91: mod_base = OTHER; note = 2'-O-methyl ribonucleotide
  modified_base 92: mod_base = OTHER; note = 2'-O-methyl ribonucleotide
  modified_base 93: mod_base = OTHER; note = 2'-O-methyl ribonucleotide
  modified_base 94: mod_base = OTHER; note = 2'-O-methyl ribonucleotide
  modified_base 95: mod_base = OTHER; note = 2'-O-methyl ribonucleotide
  modified_base 96: mod_base = OTHER; note = 2'-O-methyl ribonucleotide
  modified_base 97: mod_base = OTHER; note = 2'-O-methyl ribonucleotide
  modified_base 98: mod_base = OTHER; note = 2'-O-methyl ribonucleotide
  modified_base 99: mod_base = OTHER; note = 2'-O-methyl ribonucleotide
  modified_base 100: mod_base = OTHER; note = 2'-O-methyl ribonucleotide
  modified_base 4: mod_base = OTHER; note = nebularine
  modified_base 14: mod_base = OTHER; note = nebularine
  modified_base 1..4: mod_base = OTHER; note = phosphorothioate linkage
  modified_base 97..100: mod_base = OTHER; note = phosphorothioate linkage
aagntacctgaatnaccctcgttttagagctagaaatagcaagttaaaataaggctagtccgttatcaacttgaaaaagtggcaccgagtcggtgctttt

SEQ ID NO: 1661 - RNA, 100 nt, synthetic construct
  source 1..100: mol_type = other RNA
  modified_base 1: mod_base = OTHER; note = 2'-O-methyl ribonucleotide
  modified_base 2: mod_base = OTHER; note = 2'-O-methyl ribonucleotide
  modified_base 3: mod_base = OTHER; note = 2'-O-methyl ribonucleotide
  modified_base 21: mod_base = OTHER; note = 2'-O-methyl ribonucleotide
  modified_base 28: mod_base = OTHER; note = 2'-O-methyl ribonucleotide
  modified_base 29: mod_base = OTHER; note = 2'-O-methyl ribonucleotide
  modified_base 30: mod_base = OTHER; note = 2'-O-methyl ribonucleotide
  modified_base 31: mod_base = OTHER; note = 2'-O-methyl ribonucleotide
  modified_base 32: mod_base = OTHER; note = 2'-O-methyl ribonucleotide
  modified_base 34: mod_base = OTHER; note = 2'-O-methyl ribonucleotide
  modified_base 35: mod_base = OTHER; note = 2'-O-methyl ribonucleotide
  modified_base 36: mod_base = OTHER; note = 2'-O-methyl ribonucleotide
  modified_base 37: mod_base = OTHER; note = 2'-O-methyl ribonucleotide
  modified_base 38: mod_base = OTHER; note = 2'-O-methyl ribonucleotide
  modified_base 39: mod_base = OTHER; note = 2'-O-methyl ribonucleotide
  modified_base 40: mod_base = OTHER; note = 2'-O-methyl ribonucleotide
  modified_base 41: mod_base = OTHER; note = 2'-O-methyl ribonucleotide
  modified_base 42: mod_base = OTHER; note = 2'-O-methyl ribonucleotide
  modified_base 46: mod_base = OTHER; note = 2'-O-methyl ribonucleotide
  modified_base 48: mod_base = OTHER; note = 2'-O-methyl ribonucleotide
  modified_base 50: mod_base = OTHER; note = 2'-O-methyl ribonucleotide
  modified_base 52: mod_base = OTHER; note = 2'-O-methyl ribonucleotide
  modified_base 53: mod_base = OTHER; note = 2'-O-methyl ribonucleotide
  modified_base 54: mod_base = OTHER; note = 2'-O-methyl ribonucleotide
  modified_base 55: mod_base = OTHER; note = 2'-O-methyl ribonucleotide
  modified_base 56: mod_base = OTHER; note = 2'-O-methyl ribonucleotide
  modified_base 57: mod_base = OTHER; note = 2'-O-methyl ribonucleotide
  modified_base 60: mod_base = OTHER; note = 2'-O-methyl ribonucleotide
  modified_base 61: mod_base = OTHER; note = 2'-O-methyl ribonucleotide
  modified_base 66: mod_base = OTHER; note = 2'-O-methyl ribonucleotide
  modified_base 67: mod_base = OTHER; note = 2'-O-methyl ribonucleotide
  modified_base 70: mod_base = OTHER; note = 2'-O-methyl ribonucleotide
  modified_base 71: mod_base = OTHER; note = 2'-O-methyl ribonucleotide
  modified_base 72: mod_base = OTHER; note = 2'-O-methyl ribonucleotide
  modified_base 74: mod_base = OTHER; note = 2'-O-methyl ribonucleotide
  modified_base 75: mod_base = OTHER; note = 2'-O-methyl ribonucleotide
  modified_base 76: mod_base = OTHER; note = 2'-O-methyl ribonucleotide
  modified_base 77: mod_base = OTHER; note = 2'-O-methyl ribonucleotide
  modified_base 78: mod_base = OTHER; note = 2'-O-methyl ribonucleotide
  modified_base 79: mod_base = OTHER; note = 2'-O-methyl ribonucleotide
  modified_base 80: mod_base = OTHER; note = 2'-O-methyl ribonucleotide
  modified_base 81: mod_base = OTHER; note = 2'-O-methyl ribonucleotide
  modified_base 83: mod_base = OTHER; note = 2'-O-methyl ribonucleotide
  modified_base 84: mod_base = OTHER; note = 2'-O-methyl ribonucleotide
  modified_base 85: mod_base = OTHER; note = 2'-O-methyl ribonucleotide
  modified_base 86: mod_base = OTHER; note = 2'-O-methyl ribonucleotide
  modified_base 87: mod_base = OTHER; note = 2'-O-methyl ribonucleotide
  modified_base 88: mod_base = OTHER; note = 2'-O-methyl ribonucleotide
  modified_base 89: mod_base = OTHER; note = 2'-O-methyl ribonucleotide
  modified_base 90: mod_base = OTHER; note = 2'-O-methyl ribonucleotide
  modified_base 91: mod_base = OTHER; note = 2'-O-methyl ribonucleotide
  modified_base 92: mod_base = OTHER; note = 2'-O-methyl ribonucleotide
  modified_base 93: mod_base = OTHER; note = 2'-O-methyl ribonucleotide
  modified_base 94: mod_base = OTHER; note = 2'-O-methyl ribonucleotide
  modified_base 95: mod_base = OTHER; note = 2'-O-methyl ribonucleotide
  modified_base 96: mod_base = OTHER; note = 2'-O-methyl ribonucleotide
  modified_base 97: mod_base = OTHER; note = 2'-O-methyl ribonucleotide
  modified_base 98: mod_base = OTHER; note = 2'-O-methyl ribonucleotide
  modified_base 99: mod_base = OTHER; note = 2'-O-methyl ribonucleotide
  modified_base 100: mod_base = OTHER; note = 2'-O-methyl ribonucleotide
  modified_base 11: mod_base = OTHER; note = nebularine
  modified_base 1..4: mod_base = OTHER; note = phosphorothioate linkage
  modified_base 97..100: mod_base = OTHER; note = phosphorothioate linkage
aagatacctgnataaccctcgttttagagctagaaatagcaagttaaaataaggctagtccgttatcaacttgaaaaagtggcaccgagtcggtgctttt

SEQ ID NO: 1662 - RNA, 100 nt, synthetic construct
  source 1..100: mol_type = other RNA
  modified_base 1: mod_base = OTHER; note = 2'-O-methyl ribonucleotide
  modified_base 2: mod_base = OTHER; note = 2'-O-methyl ribonucleotide
  modified_base 3: mod_base = OTHER; note = 2'-O-methyl ribonucleotide
  modified_base 21: mod_base = OTHER; note = 2'-O-methyl ribonucleotide
  modified_base 28: mod_base = OTHER; note = 2'-O-methyl ribonucleotide
  modified_base 29: mod_base = OTHER; note = 2'-O-methyl ribonucleotide
  modified_base 30: mod_base = OTHER; note = 2'-O-methyl ribonucleotide
  modified_base 31: mod_base = OTHER; note = 2'-O-methyl ribonucleotide
  modified_base 32: mod_base = OTHER; note = 2'-O-methyl ribonucleotide
  modified_base 34: mod_base = OTHER; note = 2'-O-methyl ribonucleotide
  modified_base 35: mod_base = OTHER; note = 2'-O-methyl ribonucleotide
  modified_base 36: mod_base = OTHER; note = 2'-O-methyl ribonucleotide
  modified_base 37: mod_base = OTHER; note = 2'-O-methyl ribonucleotide
  modified_base 38: mod_base = OTHER; note = 2'-O-methyl ribonucleotide
  modified_base 39: mod_base = OTHER; note = 2'-O-methyl ribonucleotide
  modified_base 40: mod_base = OTHER; note = 2'-O-methyl ribonucleotide
  modified_base 41: mod_base = OTHER; note = 2'-O-methyl ribonucleotide
  modified_base 42: mod_base = OTHER; note = 2'-O-methyl ribonucleotide
  modified_base 46: mod_base = OTHER; note = 2'-O-methyl ribonucleotide
  modified_base 48: mod_base = OTHER; note = 2'-O-methyl ribonucleotide
  modified_base 50: mod_base = OTHER; note = 2'-O-methyl ribonucleotide
  modified_base 52: mod_base = OTHER; note = 2'-O-methyl ribonucleotide
  modified_base 53: mod_base = OTHER; note = 2'-O-methyl ribonucleotide
  modified_base 54: mod_base = OTHER; note = 2'-O-methyl ribonucleotide
  modified_base 55: mod_base = OTHER; note = 2'-O-methyl ribonucleotide
  modified_base 56: mod_base = OTHER; note = 2'-O-methyl ribonucleotide
  modified_base 57: mod_base = OTHER; note = 2'-O-methyl ribonucleotide
  modified_base 60: mod_base = OTHER; note = 2'-O-methyl ribonucleotide
  modified_base 61: mod_base = OTHER; note = 2'-O-methyl ribonucleotide
  modified_base 66: mod_base = OTHER; note = 2'-O-methyl ribonucleotide
  modified_base 67: mod_base = OTHER; note = 2'-O-methyl ribonucleotide
  modified_base 70: mod_base = OTHER; note = 2'-O-methyl ribonucleotide
  modified_base 71: mod_base = OTHER; note = 2'-O-methyl ribonucleotide
  modified_base 72: mod_base = OTHER; note = 2'-O-methyl ribonucleotide
  modified_base 74: mod_base = OTHER; note = 2'-O-methyl ribonucleotide
  modified_base 75: mod_base = OTHER; note = 2'-O-methyl ribonucleotide
  modified_base 76: mod_base = OTHER; note = 2'-O-methyl ribonucleotide
  modified_base 77: mod_base = OTHER; note = 2'-O-methyl ribonucleotide
  modified_base 78: mod_base = OTHER; note = 2'-O-methyl ribonucleotide
  modified_base 79: mod_base = OTHER; note = 2'-O-methyl ribonucleotide
  modified_base 80: mod_base = OTHER; note = 2'-O-methyl ribonucleotide
  modified_base 81: mod_base = OTHER; note = 2'-O-methyl ribonucleotide
  modified_base 83: mod_base = OTHER; note = 2'-O-methyl ribonucleotide
  modified_base 84: mod_base = OTHER; note = 2'-O-methyl ribonucleotide
  modified_base 85: mod_base = OTHER; note = 2'-O-methyl ribonucleotide
  modified_base 86: mod_base = OTHER; note = 2'-O-methyl ribonucleotide
  modified_base 87: mod_base = OTHER; note = 2'-O-methyl ribonucleotide
  modified_base 88: mod_base = OTHER; note = 2'-O-methyl ribonucleotide
  modified_base 89: mod_base = OTHER; note = 2'-O-methyl ribonucleotide
  modified_base 90: mod_base = OTHER; note = 2'-O-methyl ribonucleotide
  modified_base 91: mod_base = OTHER; note = 2'-O-methyl ribonucleotide
  modified_base 92: mod_base = OTHER; note = 2'-O-methyl ribonucleotide
  modified_base 93: mod_base = OTHER; note = 2'-O-methyl ribonucleotide
  modified_base 94: mod_base = OTHER; note = 2'-O-methyl ribonucleotide
  modified_base 95: mod_base = OTHER; note = 2'-O-methyl ribonucleotide
  modified_base 96: mod_base = OTHER; note = 2'-O-methyl ribonucleotide
  modified_base 97: mod_base = OTHER; note = 2'-O-methyl ribonucleotide
  modified_base 98: mod_base = OTHER; note = 2'-O-methyl ribonucleotide
  modified_base 99: mod_base = OTHER; note = 2'-O-methyl ribonucleotide
  modified_base 100: mod_base = OTHER; note = 2'-O-methyl ribonucleotide
  modified_base 11: mod_base = OTHER; note = nebularine
  modified_base 15: mod_base = OTHER; note = nebularine
  modified_base 1..4: mod_base = OTHER; note = phosphorothioate linkage
  modified_base 97..100: mod_base = OTHER; note = phosphorothioate linkage
aagatacctgnatanccctcgttttagagctagaaatagcaagttaaaataaggctagtccgttatcaacttgaaaaagtggcaccgagtcggtgctttt

SEQ ID NO: 1663 - RNA, 100 nt, synthetic construct; identical to SEQ ID NO: 55
  source 1..100: mol_type = other RNA
  modified_base 1: mod_base = OTHER; note = 2'-O-methyl ribonucleotide
  modified_base 2: mod_base = OTHER; note = 2'-O-methyl ribonucleotide
  modified_base 3: mod_base = OTHER; note = 2'-O-methyl ribonucleotide
  modified_base 21: mod_base = OTHER; note = 2'-O-methyl ribonucleotide
  modified_base 28: mod_base = OTHER; note = 2'-O-methyl ribonucleotide
  modified_base 29: mod_base = OTHER; note = 2'-O-methyl ribonucleotide
  modified_base 30: mod_base = OTHER; note = 2'-O-methyl ribonucleotide
  modified_base 31: mod_base = OTHER; note = 2'-O-methyl ribonucleotide
  modified_base 32: mod_base = OTHER; note = 2'-O-methyl ribonucleotide
  modified_base 33: mod_base = OTHER; note = 2'-O-methyl ribonucleotide
  modified_base 34: mod_base = OTHER; note = 2'-O-methyl ribonucleotide
  modified_base 35: mod_base = OTHER; note = 2'-O-methyl ribonucleotide
  modified_base 36: mod_base = OTHER; note = 2'-O-methyl ribonucleotide
  modified_base 37: mod_base = OTHER; note = 2'-O-methyl ribonucleotide
  modified_base 38: mod_base = OTHER; note = 2'-O-methyl ribonucleotide
  modified_base 39: mod_base = OTHER; note = 2'-O-methyl ribonucleotide
  modified_base 40: mod_base = OTHER; note = 2'-O-methyl ribonucleotide
  modified_base 41: mod_base = OTHER; note = 2'-O-methyl ribonucleotide
  modified_base 42: mod_base = OTHER; note = 2'-O-methyl ribonucleotide
  modified_base 46: mod_base = OTHER; note = 2'-O-methyl ribonucleotide
  modified_base 48: mod_base = OTHER; note = 2'-O-methyl ribonucleotide
  modified_base 50: mod_base = OTHER; note = 2'-O-methyl ribonucleotide
  modified_base 52: mod_base = OTHER; note = 2'-O-methyl ribonucleotide
  modified_base 53: mod_base = OTHER; note = 2'-O-methyl ribonucleotide
  modified_base 54: mod_base = OTHER; note = 2'-O-methyl ribonucleotide
  modified_base 57: mod_base = OTHER; note = 2'-O-methyl ribonucleotide
  modified_base 61: mod_base = OTHER; note = 2'-O-methyl ribonucleotide
  modified_base 66: mod_base = OTHER; note = 2'-O-methyl ribonucleotide
  modified_base 67: mod_base = OTHER; note = 2'-O-methyl ribonucleotide
  modified_base 70: mod_base = OTHER; note = 2'-O-methyl ribonucleotide
  modified_base 71: mod_base = OTHER; note = 2'-O-methyl ribonucleotide
  modified_base 72: mod_base = OTHER; note = 2'-O-methyl ribonucleotide
  modified_base 73: mod_base = OTHER; note = 2'-O-methyl ribonucleotide
  modified_base 74: mod_base = OTHER; note = 2'-O-methyl ribonucleotide
  modified_base 75: mod_base = OTHER; note = 2'-O-methyl ribonucleotide
  modified_base 76: mod_base = OTHER; note = 2'-O-methyl ribonucleotide
  modified_base 77: mod_base = OTHER; note = 2'-O-methyl ribonucleotide
  modified_base 78: mod_base = OTHER; note = 2'-O-methyl ribonucleotide
  modified_base 79: mod_base = OTHER; note = 2'-O-methyl ribonucleotide
  modified_base 80: mod_base = OTHER; note = 2'-O-methyl ribonucleotide
  modified_base 82: mod_base = OTHER; note = 2'-O-methyl ribonucleotide
  modified_base 83: mod_base = OTHER; note = 2'-O-methyl ribonucleotide
  modified_base 84: mod_base = OTHER; note = 2'-O-methyl ribonucleotide
  modified_base 85: mod_base = OTHER; note = 2'-O-methyl ribonucleotide
  modified_base 86: mod_base = OTHER; note = 2'-O-methyl ribonucleotide
  modified_base 87: mod_base = OTHER; note = 2'-O-methyl ribonucleotide
  modified_base 89: mod_base = OTHER; note = 2'-O-methyl ribonucleotide
  modified_base 91: mod_base = OTHER; note = 2'-O-methyl ribonucleotide
  modified_base 92: mod_base = OTHER; note = 2'-O-methyl ribonucleotide
  modified_base 93: mod_base = OTHER; note = 2'-O-methyl ribonucleotide
  modified_base 94: mod_base = OTHER; note = 2'-O-methyl ribonucleotide
  modified_base 95: mod_base = OTHER; note = 2'-O-methyl ribonucleotide
  modified_base 96: mod_base = OTHER; note = 2'-O-methyl ribonucleotide
  modified_base 97: mod_base = OTHER; note = 2'-O-methyl ribonucleotide
  modified_base 98: mod_base = OTHER; note = 2'-O-methyl ribonucleotide
  modified_base 99: mod_base = OTHER; note = 2'-O-methyl ribonucleotide
  modified_base 100: mod_base = OTHER; note = 2'-O-methyl ribonucleotide
  modified_base 1..4: mod_base = OTHER; note = phosphorothioate linkage
  modified_base 25..26: mod_base = OTHER; note = phosphorothioate linkage
  modified_base 98..100: mod_base = OTHER; note = phosphorothioate linkage

SEQ ID NO: 1664 - RNA, 100 nt, synthetic construct; identical to SEQ ID NO: 55
  source 1..100: mol_type = other RNA
  modified_base 1: mod_base = OTHER; note = 2'-O-methyl ribonucleotide
  modified_base 2: mod_base = OTHER; note = 2'-O-methyl ribonucleotide
  modified_base 3: mod_base = OTHER; note = 2'-O-methyl ribonucleotide
  modified_base 21: mod_base = OTHER; note = 2'-O-methyl ribonucleotide
  modified_base 28: mod_base = OTHER; note = 2'-O-methyl ribonucleotide
  modified_base 29: mod_base = OTHER; note = 2'-O-methyl ribonucleotide
  modified_base 30: mod_base = OTHER; note = 2'-O-methyl ribonucleotide
  modified_base 31: mod_base = OTHER; note = 2'-O-methyl ribonucleotide
  modified_base 32: mod_base = OTHER; note = 2'-O-methyl ribonucleotide
  modified_base 34: mod_base = OTHER; note = 2'-O-methyl ribonucleotide
  modified_base 35: mod_base = OTHER; note = 2'-O-methyl ribonucleotide
  modified_base 36: mod_base = OTHER; note = 2'-O-methyl ribonucleotide
  modified_base 37: mod_base = OTHER; note = 2'-O-methyl ribonucleotide
  modified_base 38: mod_base = OTHER; note = 2'-O-methyl ribonucleotide
  modified_base 39: mod_base = OTHER; note = 2'-O-methyl ribonucleotide
  modified_base 40: mod_base = OTHER; note = 2'-O-methyl ribonucleotide
  modified_base 41: mod_base = OTHER; note = 2'-O-methyl ribonucleotide
  modified_base 42: mod_base = OTHER; note = 2'-O-methyl ribonucleotide
  modified_base 46: mod_base = OTHER; note = 2'-O-methyl ribonucleotide
  modified_base 48: mod_base = OTHER; note = 2'-O-methyl ribonucleotide
  modified_base 50: mod_base = OTHER; note = 2'-O-methyl ribonucleotide
  modified_base 52: mod_base = OTHER; note = 2'-O-methyl ribonucleotide
  modified_base 53: mod_base = OTHER; note = 2'-O-methyl ribonucleotide
  modified_base 54: mod_base = OTHER; note = 2'-O-methyl ribonucleotide
  modified_base 57: mod_base = OTHER; note = 2'-O-methyl ribonucleotide
  modified_base 61: mod_base = OTHER; note = 2'-O-methyl ribonucleotide
  modified_base 66: mod_base = OTHER; note = 2'-O-methyl ribonucleotide
  modified_base 67: mod_base = OTHER; note = 2'-O-methyl ribonucleotide
  modified_base 70: mod_base = OTHER; note = 2'-O-methyl ribonucleotide
  modified_base 71: mod_base = OTHER; note = 2'-O-methyl ribonucleotide
  modified_base 72: mod_base = OTHER; note = 2'-O-methyl ribonucleotide
  modified_base 73: mod_base = OTHER; note = 2'-O-methyl ribonucleotide
  modified_base 74: mod_base = OTHER; note = 2'-O-methyl ribonucleotide
  modified_base 75: mod_base = OTHER; note = 2'-O-methyl ribonucleotide
  modified_base 76: mod_base = OTHER; note = 2'-O-methyl ribonucleotide
  modified_base 77: mod_base = OTHER; note = 2'-O-methyl ribonucleotide
  modified_base 78: mod_base = OTHER; note = 2'-O-methyl ribonucleotide
  modified_base 79: mod_base = OTHER; note = 2'-O-methyl ribonucleotide
  modified_base 80: mod_base = OTHER; note = 2'-O-methyl ribonucleotide
  modified_base 82: mod_base = OTHER; note = 2'-O-methyl ribonucleotide
  modified_base 83: mod_base = OTHER; note = 2'-O-methyl ribonucleotide
  modified_base 84: mod_base = OTHER; note = 2'-O-methyl ribonucleotide
  modified_base 85: mod_base = OTHER; note = 2'-O-methyl ribonucleotide
  modified_base 86: mod_base = OTHER; note = 2'-O-methyl ribonucleotide
  modified_base 87: mod_base = OTHER; note = 2'-O-methyl ribonucleotide
  modified_base 89: mod_base = OTHER; note = 2'-O-methyl ribonucleotide
  modified_base 92: mod_base = OTHER; note = 2'-O-methyl ribonucleotide
  modified_base 93: mod_base = OTHER; note = 2'-O-methyl ribonucleotide
  modified_base 94: mod_base = OTHER; note = 2'-O-methyl ribonucleotide
  modified_base 95: mod_base = OTHER; note = 2'-O-methyl ribonucleotide
  modified_base 96: mod_base = OTHER; note = 2'-O-methyl ribonucleotide
  modified_base 97: mod_base = OTHER; note = 2'-O-methyl ribonucleotide
  modified_base 98: mod_base = OTHER; note = 2'-O-methyl ribonucleotide
  modified_base 99: mod_base = OTHER; note = 2'-O-methyl ribonucleotide
  modified_base 100: mod_base = OTHER; note = 2'-O-methyl ribonucleotide
  modified_base 1..4: mod_base = OTHER; note = phosphorothioate linkage
  modified_base 25..26: mod_base = OTHER; note = phosphorothioate linkage
  modified_base 97..100: mod_base = OTHER; note = phosphorothioate linkage

SEQ ID NO: 1665 - RNA, 100 nt, synthetic construct; identical to SEQ ID NO: 421
  source 1..100: mol_type = other RNA
  modified_base 1: mod_base = OTHER; note = 2'-O-methyl ribonucleotide
  modified_base 2: mod_base = OTHER; note = 2'-O-methyl ribonucleotide
  modified_base 3: mod_base = OTHER; note = 2'-O-methyl ribonucleotide
  modified_base 21: mod_base = OTHER; note = 2'-O-methyl ribonucleotide
  modified_base 28: mod_base = OTHER; note = 2'-O-methyl ribonucleotide
  modified_base 29: mod_base = OTHER; note = 2'-O-methyl ribonucleotide
  modified_base 30: mod_base = OTHER; note = 2'-O-methyl ribonucleotide
  modified_base 31: mod_base = OTHER; note = 2'-O-methyl ribonucleotide
  modified_base 32: mod_base = OTHER; note = 2'-O-methyl ribonucleotide
  modified_base 34: mod_base = OTHER; note = 2'-O-methyl ribonucleotide
  modified_base 35: mod_base = OTHER; note = 2'-O-methyl ribonucleotide
  modified_base 36: mod_base = OTHER; note = 2'-O-methyl ribonucleotide
  modified_base 37: mod_base = OTHER; note = 2'-O-methyl ribonucleotide
  modified_base 38: mod_base = OTHER; note = 2'-O-methyl ribonucleotide
  modified_base 39: mod_base = OTHER; note = 2'-O-methyl ribonucleotide
  modified_base 40: mod_base = OTHER; note = 2'-O-methyl ribonucleotide
  modified_base 41: mod_base = OTHER; note = 2'-O-methyl ribonucleotide
  modified_base 42: mod_base = OTHER; note = 2'-O-methyl ribonucleotide
  modified_base 46: mod_base = OTHER; note = 2'-O-methyl ribonucleotide
  modified_base 48: mod_base = OTHER; note = 2'-O-methyl ribonucleotide
  modified_base 50: mod_base = OTHER; note = 2'-O-methyl ribonucleotide
  modified_base 52: mod_base = OTHER; note = 2'-O-methyl ribonucleotide
  modified_base 53: mod_base = OTHER; note = 2'-O-methyl ribonucleotide
  modified_base 54: mod_base = OTHER; note = 2'-O-methyl ribonucleotide
  modified_base 57: mod_base = OTHER; note = 2'-O-methyl ribonucleotide
  modified_base 61: mod_base = OTHER; note = 2'-O-methyl ribonucleotide
  modified_base 66: mod_base = OTHER; note = 2'-O-methyl ribonucleotide
  modified_base 67: mod_base = OTHER; note = 2'-O-methyl ribonucleotide
  modified_base 70: mod_base = OTHER; note = 2'-O-methyl ribonucleotide
  modified_base 71: mod_base = OTHER; note = 2'-O-methyl ribonucleotide
  modified_base 72: mod_base = OTHER; note = 2'-O-methyl ribonucleotide
  modified_base 74: mod_base = OTHER; note = 2'-O-methyl ribonucleotide
  modified_base 75: mod_base = OTHER; note = 2'-O-methyl ribonucleotide
  modified_base 76: mod_base = OTHER; note = 2'-O-methyl ribonucleotide
  modified_base 77: mod_base = OTHER; note = 2'-O-methyl ribonucleotide
  modified_base 78: mod_base = OTHER; note = 2'-O-methyl ribonucleotide
  modified_base 79: mod_base = OTHER; note = 2'-O-methyl ribonucleotide
  modified_base 80: mod_base = OTHER; note = 2'-O-methyl ribonucleotide
  modified_base 82: mod_base = OTHER; note = 2'-O-methyl ribonucleotide
  modified_base 83: mod_base = OTHER; note = 2'-O-methyl ribonucleotide
  modified_base 84: mod_base = OTHER; note = 2'-O-methyl ribonucleotide
  modified_base 85: mod_base = OTHER; note = 2'-O-methyl ribonucleotide
  modified_base 86: mod_base = OTHER; note = 2'-O-methyl ribonucleotide
  modified_base 87: mod_base = OTHER; note = 2'-O-methyl ribonucleotide
  modified_base 89: mod_base = OTHER; note = 2'-O-methyl ribonucleotide
  modified_base 92: mod_base = OTHER; note = 2'-O-methyl ribonucleotide
  modified_base 93: mod_base = OTHER; note = 2'-O-methyl ribonucleotide
  modified_base 94: mod_base = OTHER; note = 2'-O-methyl ribonucleotide
  modified_base 95: mod_base = OTHER; note = 2'-O-methyl ribonucleotide
  modified_base 96: mod_base = OTHER; note = 2'-O-methyl ribonucleotide
  modified_base 97: mod_base = OTHER; note = 2'-O-methyl ribonucleotide
  modified_base 98: mod_base = OTHER; note = 2'-O-methyl ribonucleotide
  modified_base 99: mod_base = OTHER; note = 2'-O-methyl ribonucleotide
  modified_base 100: mod_base = OTHER; note = 2'-O-methyl ribonucleotide
  modified_base 1..4: mod_base = OTHER; note = phosphorothioate linkage
  modified_base 45..46: mod_base = OTHER; note = phosphorothioate linkage
  modified_base 64..65: mod_base = OTHER; note = phosphorothioate linkage
  modified_base 98..100: mod_base = OTHER; note = phosphorothioate linkage

SEQ ID NO: 1666 - RNA, 100 nt, synthetic construct; identical to SEQ ID NO: 422
  source 1..100: mol_type = other RNA
  modified_base 1: mod_base = OTHER; note = 2'-O-methyl ribonucleotide
  modified_base 2: mod_base = OTHER; note = 2'-O-methyl ribonucleotide
  modified_base 3: mod_base = OTHER; note = 2'-O-methyl ribonucleotide
  modified_base 21: mod_base = OTHER; note = 2'-O-methyl ribonucleotide
  modified_base 28: mod_base = OTHER; note = 2'-O-methyl ribonucleotide
  modified_base 29: mod_base = OTHER; note = 2'-O-methyl ribonucleotide
  modified_base 30: mod_base = OTHER; note = 2'-O-methyl ribonucleotide
  modified_base 31: mod_base = OTHER; note = 2'-O-methyl ribonucleotide
  modified_base 32: mod_base = OTHER; note = 2'-O-methyl ribonucleotide
  modified_base 34: mod_base = OTHER; note = 2'-O-methyl ribonucleotide
  modified_base 35: mod_base = OTHER; note = 2'-O-methyl ribonucleotide
  modified_base 36: mod_base = OTHER; note = 2'-O-methyl ribonucleotide
  modified_base 37: mod_base = OTHER; note = 2'-O-methyl ribonucleotide
  modified_base 38: mod_base = OTHER; note = 2'-O-methyl ribonucleotide
  modified_base 39: mod_base = OTHER; note = 2'-O-methyl ribonucleotide
  modified_base 40: mod_base = OTHER; note = 2'-O-methyl ribonucleotide
  modified_base 41: mod_base = OTHER; note = 2'-O-methyl ribonucleotide
  modified_base 42: mod_base = OTHER; note = 2'-O-methyl ribonucleotide
  modified_base 46: mod_base = OTHER; note = 2'-O-methyl ribonucleotide
  modified_base 48: mod_base = OTHER; note = 2'-O-methyl ribonucleotide
  modified_base 50: mod_base = OTHER; note = 2'-O-methyl ribonucleotide
  modified_base 52: mod_base = OTHER; note = 2'-O-methyl ribonucleotide
  modified_base 53: mod_base = OTHER; note = 2'-O-methyl ribonucleotide
  modified_base 54: mod_base = OTHER; note = 2'-O-methyl ribonucleotide
  modified_base 57: mod_base = OTHER; note = 2'-O-methyl ribonucleotide
  modified_base 61: mod_base = OTHER; note = 2'-O-methyl ribonucleotide
  modified_base 66: mod_base = OTHER; note = 2'-O-methyl ribonucleotide
  modified_base 67: mod_base = OTHER; note = 2'-O-methyl ribonucleotide
  modified_base 70: mod_base = OTHER; note = 2'-O-methyl ribonucleotide
  modified_base 71: mod_base = OTHER; note = 2'-O-methyl ribonucleotide
  modified_base 72: mod_base = OTHER; note = 2'-O-methyl ribonucleotide
  modified_base 74: mod_base = OTHER; note = 2'-O-methyl ribonucleotide
  modified_base 75: mod_base = OTHER; note = 2'-O-methyl ribonucleotide
  modified_base 76: mod_base = OTHER; note = 2'-O-methyl ribonucleotide
  modified_base 77: mod_base = OTHER; note = 2'-O-methyl ribonucleotide
  modified_base 78: mod_base = OTHER; note = 2'-O-methyl ribonucleotide
  modified_base 79: mod_base = OTHER; note = 2'-O-methyl ribonucleotide
  modified_base 80: mod_base = OTHER; note = 2'-O-methyl ribonucleotide
  modified_base 82: mod_base = OTHER; note = 2'-O-methyl ribonucleotide
  modified_base 83: mod_base = OTHER; note = 2'-O-methyl ribonucleotide
  modified_base 84: mod_base = OTHER; note = 2'-O-methyl ribonucleotide
  modified_base 85: mod_base = OTHER; note = 2'-O-methyl ribonucleotide
  modified_base 86: mod_base = OTHER; note = 2'-O-methyl ribonucleotide
  modified_base 87: mod_base = OTHER; note = 2'-O-methyl ribonucleotide
  modified_base 89: mod_base = OTHER; note = 2'-O-methyl ribonucleotide
  modified_base 92: mod_base = OTHER; note = 2'-O-methyl ribonucleotide
  modified_base 93: mod_base = OTHER; note = 2'-O-methyl ribonucleotide
  modified_base 94: mod_base = OTHER; note = 2'-O-methyl ribonucleotide
  modified_base 95: mod_base = OTHER; note = 2'-O-methyl ribonucleotide
  modified_base 96: mod_base = OTHER; note = 2'-O-methyl ribonucleotide
  modified_base 97: mod_base = OTHER; note = 2'-O-methyl ribonucleotide
  modified_base 98: mod_base = OTHER; note = 2'-O-methyl ribonucleotide
  modified_base 99: mod_base = OTHER; note = 2'-O-methyl ribonucleotide
  modified_base 100: mod_base = OTHER; note = 2'-O-methyl ribonucleotide
  modified_base 1..4: mod_base = OTHER; note = phosphorothioate linkage
  modified_base 45..46: mod_base = OTHER; note = phosphorothioate linkage
  modified_base 64..65: mod_base = OTHER; note = phosphorothioate linkage
  modified_base 98..100: mod_base = OTHER; note = phosphorothioate linkage

SEQ ID NO: 1667 - RNA, 100 nt, synthetic construct; identical to SEQ ID NO: 55
  source 1..100: mol_type = other RNA
  modified_base 1: mod_base = OTHER; note = 2'-O-methyl ribonucleotide
  modified_base 2: mod_base = OTHER; note = 2'-O-methyl ribonucleotide
  modified_base 3: mod_base = OTHER; note = 2'-O-methyl ribonucleotide
  modified_base 21: mod_base = OTHER; note = 2'-O-methyl ribonucleotide
  modified_base 28: mod_base = OTHER; note = 2'-O-methyl ribonucleotide
  modified_base 29: mod_base = OTHER; note = 2'-O-methyl ribonucleotide
  modified_base 30: mod_base = OTHER; note = 2'-O-methyl ribonucleotide
  modified_base 31: mod_base = OTHER; note = 2'-O-methyl ribonucleotide
  modified_base 32: mod_base = OTHER; note = 2'-O-methyl ribonucleotide
  modified_base 34: mod_base = OTHER; note = 2'-O-methyl ribonucleotide
  modified_base 35: mod_base = OTHER; note = 2'-O-methyl ribonucleotide
  modified_base 36: mod_base = OTHER; note = 2'-O-methyl ribonucleotide
  modified_base 37: mod_base = OTHER; note = 2'-O-methyl ribonucleotide
  modified_base 38: mod_base = OTHER; note = 2'-O-methyl ribonucleotide
  modified_base 39: mod_base = OTHER; note = 2'-O-methyl ribonucleotide
  modified_base 40: mod_base = OTHER; note = 2'-O-methyl ribonucleotide
  modified_base 41: mod_base = OTHER; note = 2'-O-methyl ribonucleotide
  modified_base 42: mod_base = OTHER; note = 2'-O-methyl ribonucleotide
  modified_base 46: mod_base = OTHER; note = 2'-O-methyl ribonucleotide
  modified_base 48: mod_base = OTHER; note = 2'-O-methyl ribonucleotide
  modified_base 50: mod_base = OTHER; note = 2'-O-methyl ribonucleotide
  modified_base 52: mod_base = OTHER; note = 2'-O-methyl ribonucleotide
  modified_base 53: mod_base = OTHER; note = 2'-O-methyl ribonucleotide
  modified_base 54: mod_base = OTHER; note = 2'-O-methyl ribonucleotide
  modified_base 55: mod_base = OTHER; note = 2'-O-methyl ribonucleotide
  modified_base 56: mod_base = OTHER; note = 2'-O-methyl ribonucleotide
  modified_base 57: mod_base = OTHER; note = 2'-O-methyl ribonucleotide
  modified_base 60: mod_base = OTHER; note = 2'-O-methyl ribonucleotide
  modified_base 61: mod_base = OTHER; note = 2'-O-methyl ribonucleotide
  modified_base 66: mod_base = OTHER; note = 2'-O-methyl ribonucleotide
  modified_base 67: mod_base = OTHER; note = 2'-O-methyl ribonucleotide
  modified_base 70: mod_base = OTHER; note = 2'-O-methyl ribonucleotide
  modified_base 71: mod_base = OTHER; note = 2'-O-methyl ribonucleotide
  modified_base 72: mod_base = OTHER; note = 2'-O-methyl ribonucleotide
  modified_base 74: mod_base = OTHER; note = 2'-O-methyl ribonucleotide
  modified_base 75: mod_base = OTHER; note = 2'-O-methyl ribonucleotide
  modified_base 76: mod_base = OTHER; note = 2'-O-methyl ribonucleotide
  modified_base 77: mod_base = OTHER; note = 2'-O-methyl ribonucleotide
  modified_base 78: mod_base = OTHER; note = 2'-O-methyl ribonucleotide
  modified_base 79: mod_base = OTHER; note = 2'-O-methyl ribonucleotide
  modified_base 80: mod_base = OTHER; note = 2'-O-methyl ribonucleotide
  modified_base 81: mod_base = OTHER; note = 2'-O-methyl ribonucleotide
  modified_base 83: mod_base = OTHER; note = 2'-O-methyl ribonucleotide
  modified_base 84: mod_base = OTHER; note = 2'-O-methyl ribonucleotide
  modified_base 85: mod_base = OTHER; note = 2'-O-methyl ribonucleotide
  modified_base 86: mod_base = OTHER; note = 2'-O-methyl ribonucleotide
  modified_base 87: mod_base = OTHER; note = 2'-O-methyl ribonucleotide
  modified_base 88: mod_base = OTHER; note = 2'-O-methyl ribonucleotide
  modified_base 89: mod_base = OTHER; note = 2'-O-methyl ribonucleotide
  modified_base 90: mod_base = OTHER; note = 2'-O-methyl ribonucleotide
  modified_base 91: mod_base = OTHER; note = 2'-O-methyl ribonucleotide
  modified_base 92: mod_base = OTHER; note = 2'-O-methyl ribonucleotide
  modified_base 93: mod_base = OTHER; note = 2'-O-methyl ribonucleotide
  modified_base 94: mod_base = OTHER; note = 2'-O-methyl ribonucleotide
  modified_base 95: mod_base = OTHER; note = 2'-O-methyl ribonucleotide
  modified_base 96: mod_base = OTHER; note = 2'-O-methyl ribonucleotide
  modified_base 97: mod_base = OTHER; note = 2'-O-methyl ribonucleotide
  modified_base 98: mod_base = OTHER; note = 2'-O-methyl ribonucleotide
  modified_base 99: mod_base = OTHER; note = 2'-O-methyl ribonucleotide
  modified_base 100: mod_base = OTHER; note = 2'-O-methyl ribonucleotide
  modified_base 1..4: mod_base = OTHER; note = phosphorothioate linkage
  modified_base 45..46: mod_base = OTHER; note = phosphorothioate linkage
  modified_base 64..65: mod_base = OTHER; note = phosphorothioate linkage
  modified_base 98..100: mod_base = OTHER; note = phosphorothioate linkage

SEQ ID NO: 1668 - RNA, 100 nt, synthetic construct; identical to SEQ ID NO: 55
  source 1..100: mol_type = other RNA
  modified_base 1: mod_base = OTHER; note = 2'-O-methyl ribonucleotide
  modified_base 2: mod_base = OTHER; note = 2'-O-methyl ribonucleotide
  modified_base 3: mod_base = OTHER; note = 2'-O-methyl ribonucleotide
  modified_base 21: mod_base = OTHER; note = 2'-O-methyl ribonucleotide
  modified_base 28: mod_base = OTHER; note = 2'-O-methyl ribonucleotide
  modified_base 29: mod_base = OTHER; note = 2'-O-methyl ribonucleotide
  modified_base 30: mod_base = OTHER; note = 2'-O-methyl ribonucleotide
  modified_base 31: mod_base = OTHER; note = 2'-O-methyl ribonucleotide
  modified_base 32: mod_base = OTHER; note = 2'-O-methyl ribonucleotide
  modified_base 33: mod_base = OTHER; note = 2'-O-methyl ribonucleotide
  modified_base 34: mod_base = OTHER; note = 2'-O-methyl ribonucleotide
  modified_base 35: mod_base = OTHER; note = 2'-O-methyl ribonucleotide
  modified_base 36: mod_base = OTHER; note = 2'-O-methyl ribonucleotide
  modified_base 37: mod_base = OTHER; note = 2'-O-methyl ribonucleotide
  modified_base 38: mod_base = OTHER; note = 2'-O-methyl ribonucleotide
  modified_base 39: mod_base = OTHER; note = 2'-O-methyl ribonucleotide
  modified_base 40: mod_base = OTHER; note = 2'-O-methyl ribonucleotide
  modified_base 41: mod_base = OTHER; note = 2'-O-methyl ribonucleotide
  modified_base 42: mod_base = OTHER; note = 2'-O-methyl ribonucleotide
  modified_base 46: mod_base = OTHER; note = 2'-O-methyl ribonucleotide
  modified_base 48: mod_base = OTHER; note = 2'-O-methyl ribonucleotide
  modified_base 50: mod_base = OTHER; note = 2'-O-methyl ribonucleotide
  modified_base 52: mod_base = OTHER; note = 2'-O-methyl ribonucleotide
  modified_base 53: mod_base = OTHER; note = 2'-O-methyl ribonucleotide
  modified_base 54: mod_base = OTHER; note = 2'-O-methyl ribonucleotide
  modified_base 57: mod_base = OTHER; note = 2'-O-methyl ribonucleotide
  modified_base 61: mod_base = OTHER; note = 2'-O-methyl ribonucleotide
  modified_base 66: mod_base = OTHER; note = 2'-O-methyl ribonucleotide
  modified_base 67: mod_base = OTHER; note = 2'-O-methyl ribonucleotide
  modified_base 70: mod_base = OTHER; note = 2'-O-methyl ribonucleotide
  modified_base 71: mod_base = OTHER; note = 2'-O-methyl ribonucleotide
  modified_base 72: mod_base = OTHER; note = 2'-O-methyl ribonucleotide
  modified_base 73: mod_base = OTHER; note = 2'-O-methyl ribonucleotide
  modified_base 74: mod_base = OTHER; note = 2'-O-methyl ribonucleotide
  modified_base 75: mod_base = OTHER; note = 2'-O-methyl ribonucleotide
  modified_base 76: mod_base = OTHER; note = 2'-O-methyl ribonucleotide
  modified_base 77: mod_base = OTHER; note = 2'-O-methyl ribonucleotide
  modified_base 78: mod_base = OTHER; note = 2'-O-methyl ribonucleotide
  modified_base 79: mod_base = OTHER; note = 2'-O-methyl ribonucleotide
  modified_base 80: mod_base = OTHER; note = 2'-O-methyl ribonucleotide
  modified_base 82: mod_base = OTHER; note = 2'-O-methyl ribonucleotide
  modified_base 83: mod_base = OTHER; note = 2'-O-methyl ribonucleotide
  modified_base 84: mod_base = OTHER; note = 2'-O-methyl ribonucleotide
  modified_base 85: mod_base = OTHER; note = 2'-O-methyl ribonucleotide
  modified_base 86: mod_base = OTHER; note = 2'-O-methyl ribonucleotide
  modified_base 87: mod_base = OTHER; note = 2'-O-methyl ribonucleotide
  modified_base 89: mod_base = OTHER; note = 2'-O-methyl ribonucleotide
  modified_base 91: mod_base = OTHER; note = 2'-O-methyl ribonucleotide
  modified_base 92: mod_base = OTHER; note = 2'-O-methyl ribonucleotide
  modified_base 93: mod_base = OTHER; note = 2'-O-methyl ribonucleotide
  modified_base 94: mod_base = OTHER; note = 2'-O-methyl ribonucleotide
  modified_base 95: mod_base = OTHER; note = 2'-O-methyl ribonucleotide
  modified_base 96: mod_base = OTHER; note = 2'-O-methyl ribonucleotide
  modified_base 97: mod_base = OTHER; note = 2'-O-methyl ribonucleotide
  modified_base 98: mod_base = OTHER; note = 2'-O-methyl ribonucleotide
  modified_base 99: mod_base = OTHER; note = 2'-O-methyl ribonucleotide
  modified_base 100: mod_base = OTHER; note = 2'-O-methyl ribonucleotide
  modified_base 1..4: mod_base = OTHER; note = phosphorothioate linkage
  modified_base 45..46: mod_base = OTHER; note = phosphorothioate linkage
  modified_base 64..65: mod_base = OTHER; note = phosphorothioate linkage
  modified_base 97..100: mod_base = OTHER; note = phosphorothioate linkage

SEQ ID NO: 1669 - RNA, 100 nt, synthetic construct; identical to SEQ ID NO: 421
  source 1..100: mol_type = other RNA
  modified_base 1: mod_base = OTHER; note = 2'-O-methyl ribonucleotide
  modified_base 2: mod_base = OTHER; note = 2'-O-methyl ribonucleotide
  modified_base 3: mod_base = OTHER; note = 2'-O-methyl ribonucleotide
  modified_base 21: mod_base = OTHER; note = 2'-O-methyl ribonucleotide
  modified_base 28: mod_base = OTHER; note = 2'-O-methyl ribonucleotide
  modified_base 29: mod_base = OTHER; note = 2'-O-methyl ribonucleotide
  modified_base 30: mod_base = OTHER; note = 2'-O-methyl ribonucleotide
  modified_base 31: mod_base = OTHER; note = 2'-O-methyl ribonucleotide
  modified_base 32: mod_base = OTHER; note = 2'-O-methyl ribonucleotide
  modified_base 34: mod_base = OTHER; note = 2'-O-methyl ribonucleotide
  modified_base 35: mod_base = OTHER; note = 2'-O-methyl ribonucleotide
  modified_base 36: mod_base = OTHER; note = 2'-O-methyl ribonucleotide
  modified_base 37: mod_base = OTHER; note = 2'-O-methyl ribonucleotide
  modified_base 38: mod_base = OTHER; note = 2'-O-methyl ribonucleotide
  modified_base 39: mod_base = OTHER; note = 2'-O-methyl ribonucleotide
  modified_base 40: mod_base = OTHER; note = 2'-O-methyl ribonucleotide
  modified_base 41: mod_base = OTHER; note = 2'-O-methyl ribonucleotide
  modified_base 42: mod_base = OTHER; note = 2'-O-methyl ribonucleotide
  modified_base 46: mod_base = OTHER; note = 2'-O-methyl ribonucleotide
  modified_base 48: mod_base = OTHER; note = 2'-O-methyl ribonucleotide
  modified_base 50: mod_base = OTHER; note = 2'-O-methyl ribonucleotide
  modified_base 52: mod_base = OTHER; note = 2'-O-methyl ribonucleotide
  modified_base 53: mod_base = OTHER; note = 2'-O-methyl ribonucleotide
  modified_base 54: mod_base = OTHER; note = 2'-O-methyl ribonucleotide
  modified_base 57: mod_base = OTHER; note = 2'-O-methyl ribonucleotide
  modified_base 61: mod_base = OTHER; note = 2'-O-methyl ribonucleotide
  modified_base 66: mod_base = OTHER; note = 2'-O-methyl ribonucleotide
  modified_base 67: mod_base = OTHER; note = 2'-O-methyl ribonucleotide
  modified_base 70: mod_base = OTHER; note = 2'-O-methyl ribonucleotide
  modified_base 71: mod_base = OTHER; note = 2'-O-methyl ribonucleotide
  modified_base 72: mod_base = OTHER; note = 2'-O-methyl ribonucleotide
  modified_base 74: mod_base = OTHER; note = 2'-O-methyl ribonucleotide
  modified_base 75: mod_base = OTHER; note = 2'-O-methyl ribonucleotide
  modified_base 76: mod_base = OTHER; note = 2'-O-methyl ribonucleotide
  modified_base 77: mod_base = OTHER; note = 2'-O-methyl ribonucleotide
  modified_base 78: mod_base = OTHER; note = 2'-O-methyl ribonucleotide
  modified_base 79: mod_base = OTHER; note = 2'-O-methyl ribonucleotide
  modified_base 80: mod_base = OTHER; note = 2'-O-methyl ribonucleotide
  modified_base 82: mod_base = OTHER; note = 2'-O-methyl ribonucleotide
  modified_base 83: mod_base = OTHER; note = 2'-O-methyl ribonucleotide
  modified_base 84: mod_base = OTHER; note = 2'-O-methyl ribonucleotide
  modified_base 85: mod_base = OTHER; note = 2'-O-methyl ribonucleotide
  modified_base 86: mod_base = OTHER; note = 2'-O-methyl ribonucleotide
  modified_base 87: mod_base = OTHER; note = 2'-O-methyl ribonucleotide
  modified_base 89: mod_base = OTHER; note = 2'-O-methyl ribonucleotide
  modified_base 92: mod_base = OTHER; note = 2'-O-methyl ribonucleotide
  modified_base 93: mod_base = OTHER; note = 2'-O-methyl ribonucleotide
  modified_base 94: mod_base = OTHER; note = 2'-O-methyl ribonucleotide
  modified_base 95: mod_base = OTHER; note = 2'-O-methyl ribonucleotide
  modified_base 96: mod_base = OTHER; note = 2'-O-methyl ribonucleotide
  modified_base 97: mod_base = OTHER; note = 2'-O-methyl ribonucleotide
  modified_base 98: mod_base = OTHER; note = 2'-O-methyl ribonucleotide
  modified_base 99: mod_base = OTHER; note = 2'-O-methyl ribonucleotide
  modified_base 100: mod_base = OTHER; note = 2'-O-methyl ribonucleotide
  modified_base 1..4: mod_base = OTHER; note = phosphorothioate linkage
  modified_base 25..26: mod_base = OTHER; note = phosphorothioate linkage
  modified_base 45..46: mod_base = OTHER; note = phosphorothioate linkage
  modified_base 98..100: mod_base = OTHER; note = phosphorothioate linkage

SEQ ID NO: 1670 - RNA, 100 nt, synthetic construct; identical to SEQ ID NO: 422
  source 1..100: mol_type = other RNA
  modified_base 1: mod_base = OTHER; note = 2'-O-methyl ribonucleotide
  modified_base 2: mod_base = OTHER; note = 2'-O-methyl ribonucleotide
  modified_base 3: mod_base = OTHER; note = 2'-O-methyl ribonucleotide
  modified_base 21: mod_base = OTHER; note = 2'-O-methyl ribonucleotide
  modified_base 28: mod_base = OTHER; note = 2'-O-methyl ribonucleotide
  modified_base 29: mod_base = OTHER; note = 2'-O-methyl ribonucleotide
  modified_base 30: mod_base = OTHER; note = 2'-O-methyl ribonucleotide
  modified_base 31: mod_base = OTHER; note = 2'-O-methyl ribonucleotide
  modified_base 32: mod_base = OTHER; note = 2'-O-methyl ribonucleotide
  modified_base 34: mod_base = OTHER; note = 2'-O-methyl ribonucleotide
  modified_base 35: mod_base = OTHER; note = 2'-O-methyl ribonucleotide
  modified_base 36: mod_base = OTHER; note = 2'-O-methyl ribonucleotide
  modified_base 37: mod_base = OTHER; note = 2'-O-methyl ribonucleotide
  modified_base 38: mod_base = OTHER; note = 2'-O-methyl ribonucleotide
  modified_base 39: mod_base = OTHER; note = 2'-O-methyl ribonucleotide
  modified_base 40: mod_base = OTHER; note = 2'-O-methyl ribonucleotide
  modified_base 41: mod_base = OTHER; note = 2'-O-methyl ribonucleotide
  modified_base 42: mod_base = OTHER; note = 2'-O-methyl ribonucleotide
  modified_base 46: mod_base = OTHER; note = 2'-O-methyl ribonucleotide
  modified_base 48: mod_base = OTHER; note = 2'-O-methyl ribonucleotide
  modified_base 50: mod_base = OTHER; note = 2'-O-methyl ribonucleotide
  modified_base 52: mod_base = OTHER; note = 2'-O-methyl ribonucleotide
  modified_base 53: mod_base = OTHER; note = 2'-O-methyl ribonucleotide
  modified_base 54: mod_base = OTHER; note = 2'-O-methyl ribonucleotide
  modified_base 57: mod_base = OTHER; note = 2'-O-methyl ribonucleotide
  modified_base 61: mod_base = OTHER; note = 2'-O-methyl ribonucleotide
  modified_base 66: mod_base = OTHER; note = 2'-O-methyl ribonucleotide
  modified_base 67: mod_base = OTHER; note = 2'-O-methyl ribonucleotide
  modified_base 70: mod_base = OTHER; note = 2'-O-methyl ribonucleotide
  modified_base 71: mod_base = OTHER; note = 2'-O-methyl ribonucleotide
  modified_base 72: mod_base = OTHER; note = 2'-O-methyl ribonucleotide
  modified_base 74: mod_base = OTHER; note = 2'-O-methyl ribonucleotide
  modified_base 75: mod_base = OTHER; note = 2'-O-methyl ribonucleotide
  modified_base 76: mod_base = OTHER; note = 2'-O-methyl ribonucleotide
  modified_base 77: mod_base = OTHER; note = 2'-O-methyl ribonucleotide
  modified_base 78: mod_base = OTHER; note = 2'-O-methyl ribonucleotide
  modified_base 79: mod_base = OTHER; note = 2'-O-methyl ribonucleotide
  modified_base 80: mod_base = OTHER; note = 2'-O-methyl ribonucleotide
  modified_base 82: mod_base = OTHER; note = 2'-O-methyl ribonucleotide
  modified_base 83: mod_base = OTHER; note = 2'-O-methyl ribonucleotide
  modified_base 84: mod_base = OTHER; note = 2'-O-methyl ribonucleotide
  modified_base 85: mod_base = OTHER; note = 2'-O-methyl ribonucleotide
  modified_base 86: mod_base = OTHER; note = 2'-O-methyl ribonucleotide
  modified_base 87: mod_base = OTHER; note = 2'-O-methyl ribonucleotide
  modified_base 89: mod_base = OTHER; note = 2'-O-methyl ribonucleotide
  modified_base 92: mod_base = OTHER; note = 2'-O-methyl ribonucleotide
  modified_base 93: mod_base = OTHER; note = 2'-O-methyl ribonucleotide
  modified_base 94: mod_base = OTHER; note = 2'-O-methyl ribonucleotide
  modified_base 95: mod_base = OTHER; note = 2'-O-methyl ribonucleotide
  modified_base 96: mod_base = OTHER; note = 2'-O-methyl ribonucleotide
  modified_base 97: mod_base = OTHER; note = 2'-O-methyl ribonucleotide
  modified_base 98: mod_base = OTHER; note = 2'-O-methyl ribonucleotide
  modified_base 99: mod_base = OTHER; note = 2'-O-methyl ribonucleotide
  modified_base 100: mod_base = OTHER; note = 2'-O-methyl ribonucleotide
  modified_base 1..4: mod_base = OTHER; note = phosphorothioate linkage
  modified_base 25..26: mod_base = OTHER; note = phosphorothioate linkage
  modified_base 45..46: mod_base = OTHER; note = phosphorothioate linkage
  modified_base 98..100: mod_base = OTHER; note = phosphorothioate linkage

SEQ ID NO: 1671 - RNA, 100 nt, synthetic construct; identical to SEQ ID NO: 55
  source 1..100: mol_type = other RNA
  modified_base 1: mod_base = OTHER; note = 2'-O-methyl ribonucleotide
  modified_base 2: mod_base = OTHER; note = 2'-O-methyl ribonucleotide
  modified_base 3: mod_base = OTHER; note = 2'-O-methyl ribonucleotide
  modified_base 21: mod_base = OTHER; note = 2'-O-methyl ribonucleotide
  modified_base 28: mod_base = OTHER; note = 2'-O-methyl ribonucleotide
  modified_base 29: mod_base = OTHER; note = 2'-O-methyl ribonucleotide
  modified_base 30: mod_base = OTHER; note = 2'-O-methyl ribonucleotide
  modified_base 31: mod_base = OTHER; note = 2'-O-methyl ribonucleotide
  modified_base 32: mod_base = OTHER; note = 2'-O-methyl ribonucleotide
  modified_base 34: mod_base = OTHER; note = 2'-O-methyl ribonucleotide
  modified_base 35: mod_base = OTHER; note = 2'-O-methyl ribonucleotide
  modified_base 36: mod_base = OTHER; note = 2'-O-methyl ribonucleotide
  modified_base 37: mod_base = OTHER; note = 2'-O-methyl ribonucleotide
  modified_base 38: mod_base = OTHER; note = 2'-O-methyl ribonucleotide
  modified_base 39: mod_base = OTHER; note = 2'-O-methyl ribonucleotide
  modified_base 40: mod_base = OTHER; note = 2'-O-methyl ribonucleotide
  modified_base 41: mod_base = OTHER; note = 2'-O-methyl ribonucleotide
  modified_base 42: mod_base = OTHER; note = 2'-O-methyl ribonucleotide
  modified_base 46: mod_base = OTHER; note = 2'-O-methyl ribonucleotide
  modified_base 48: mod_base = OTHER; note = 2'-O-methyl ribonucleotide
  modified_base 50: mod_base = OTHER; note = 2'-O-methyl ribonucleotide
  modified_base 52: mod_base = OTHER; note = 2'-O-methyl ribonucleotide
  modified_base 53: mod_base = OTHER; note = 2'-O-methyl ribonucleotide
  modified_base 54: mod_base = OTHER; note = 2'-O-methyl ribonucleotide
  modified_base 55: mod_base = OTHER; note = 2'-O-methyl ribonucleotide
  modified_base 56: mod_base = OTHER; note = 2'-O-methyl ribonucleotide
  modified_base 57: mod_base = OTHER; note = 2'-O-methyl ribonucleotide
  modified_base 60: mod_base = OTHER; note = 2'-O-methyl ribonucleotide
  modified_base 61: mod_base = OTHER; note = 2'-O-methyl ribonucleotide
  modified_base 66: mod_base = OTHER; note = 2'-O-methyl ribonucleotide
  modified_base 67: mod_base = OTHER; note = 2'-O-methyl ribonucleotide
  modified_base 70: mod_base = OTHER; note = 2'-O-methyl ribonucleotide
  modified_base 71: mod_base = OTHER; note = 2'-O-methyl ribonucleotide
  modified_base 72: mod_base = OTHER; note = 2'-O-methyl ribonucleotide
  modified_base 74: mod_base = OTHER; note = 2'-O-methyl ribonucleotide
  modified_base 75: mod_base = OTHER; note = 2'-O-methyl ribonucleotide
  modified_base 76: mod_base = OTHER; note = 2'-O-methyl ribonucleotide
  modified_base 77: mod_base = OTHER; note = 2'-O-methyl ribonucleotide
  modified_base 78: mod_base = OTHER; note = 2'-O-methyl ribonucleotide
  modified_base 79: mod_base = OTHER; note = 2'-O-methyl ribonucleotide
  modified_base 80: mod_base = OTHER; note = 2'-O-methyl ribonucleotide
  modified_base 81: mod_base = OTHER; note = 2'-O-methyl ribonucleotide
  modified_base 83: mod_base = OTHER; note = 2'-O-methyl ribonucleotide
  modified_base 84: mod_base = OTHER; note = 2'-O-methyl ribonucleotide
  modified_base 85: mod_base = OTHER; note = 2'-O-methyl ribonucleotide
  modified_base 86: mod_base = OTHER; note = 2'-O-methyl ribonucleotide
  modified_base 87: mod_base = OTHER; note = 2'-O-methyl ribonucleotide
  modified_base 88: mod_base = OTHER; note = 2'-O-methyl ribonucleotide
  modified_base 89: mod_base = OTHER; note = 2'-O-methyl ribonucleotide
  modified_base 90: mod_base = OTHER; note = 2'-O-methyl ribonucleotide
  modified_base 91: mod_base = OTHER; note = 2'-O-methyl ribonucleotide
  modified_base 92: mod_base = OTHER; note = 2'-O-methyl ribonucleotide
  modified_base 93: mod_base = OTHER; note = 2'-O-methyl ribonucleotide
  modified_base 94: mod_base = OTHER; note = 2'-O-methyl ribonucleotide
  modified_base 95: mod_base = OTHER; note = 2'-O-methyl ribonucleotide
  modified_base 96: mod_base = OTHER; note = 2'-O-methyl ribonucleotide
  modified_base 97: mod_base = OTHER; note = 2'-O-methyl ribonucleotide
  modified_base 98: mod_base = OTHER; note = 2'-O-methyl ribonucleotide
  modified_base 99: mod_base = OTHER; note = 2'-O-methyl ribonucleotide
  modified_base 100: mod_base = OTHER; note = 2'-O-methyl ribonucleotide
  modified_base 1..4: mod_base = OTHER; note = phosphorothioate linkage
  modified_base 25..26: mod_base = OTHER; note = phosphorothioate linkage
  modified_base 45..46: mod_base = OTHER; note = phosphorothioate linkage
  modified_base 98..100: mod_base = OTHER; note = phosphorothioate linkage

SEQ ID NO: 1672 - RNA, 100 nt, synthetic construct; identical to SEQ ID NO: 55
  source 1..100: mol_type = other RNA
  modified_base 1: mod_base = OTHER; note = 2'-O-methyl ribonucleotide
  modified_base 2: mod_base = OTHER; note = 2'-O-methyl ribonucleotide
  modified_base 3: mod_base = OTHER; note = 2'-O-methyl ribonucleotide
  modified_base 21: mod_base = OTHER; note = 2'-O-methyl ribonucleotide
  modified_base 28: mod_base = OTHER; note = 2'-O-methyl ribonucleotide
  modified_base 29: mod_base = OTHER; note = 2'-O-methyl ribonucleotide
  modified_base 30: mod_base = OTHER; note = 2'-O-methyl ribonucleotide
  modified_base 31: mod_base = OTHER; note = 2'-O-methyl ribonucleotide
  modified_base 32: mod_base = OTHER; note = 2'-O-methyl ribonucleotide
  modified_base 33: mod_base = OTHER; note = 2'-O-methyl ribonucleotide
  modified_base 34: mod_base = OTHER; note = 2'-O-methyl ribonucleotide
  modified_base 35: mod_base = OTHER; note = 2'-O-methyl ribonucleotide
  modified_base 36: mod_base = OTHER; note = 2'-O-methyl ribonucleotide
  modified_base 37: mod_base = OTHER; note = 2'-O-methyl ribonucleotide
  modified_base 38: mod_base = OTHER; note = 2'-O-methyl ribonucleotide
  modified_base 39: mod_base = OTHER; note = 2'-O-methyl ribonucleotide
  modified_base 40: mod_base = OTHER; note = 2'-O-methyl ribonucleotide
  modified_base 41: mod_base = OTHER; note = 2'-O-methyl ribonucleotide
  modified_base 42: mod_base = OTHER; note = 2'-O-methyl ribonucleotide
  modified_base 46: mod_base = OTHER; note = 2'-O-methyl ribonucleotide
  modified_base 48: mod_base = OTHER; note = 2'-O-methyl ribonucleotide
  modified_base 50: mod_base = OTHER; note = 2'-O-methyl ribonucleotide
  modified_base 52: mod_base = OTHER; note = 2'-O-methyl ribonucleotide
  modified_base 53: mod_base = OTHER; note = 2'-O-methyl ribonucleotide
  modified_base 54: mod_base = OTHER; note = 2'-O-methyl ribonucleotide
  modified_base 55: mod_base = OTHER; note = 2'-O-methyl ribonucleotide
  modified_base 56: mod_base = OTHER; note = 2'-O-methyl ribonucleotide
  modified_base 57: mod_base = OTHER; note = 2'-O-methyl ribonucleotide
  modified_base 60: mod_base = OTHER; note = 2'-O-methyl ribonucleotide
  modified_base 61: mod_base = OTHER; note = 2'-O-methyl ribonucleotide
  modified_base 66: mod_base = OTHER; note = 2'-O-methyl ribonucleotide
  modified_base 67: mod_base = OTHER; note = 2'-O-methyl ribonucleotide
  modified_base 70: mod_base = OTHER; note = 2'-O-methyl ribonucleotide
  modified_base 71: mod_base = OTHER; note = 2'-O-methyl ribonucleotide
  modified_base 72: mod_base = OTHER; note = 2'-O-methyl ribonucleotide
  modified_base 74: mod_base = OTHER; note = 2'-O-methyl ribonucleotide
  modified_base 75: mod_base = OTHER; note = 2'-O-methyl ribonucleotide
  modified_base 76: mod_base = OTHER; note = 2'-O-methyl ribonucleotide
  modified_base 77: mod_base = OTHER; note = 2'-O-methyl ribonucleotide
  modified_base 78: mod_base = OTHER; note = 2'-O-methyl ribonucleotide
  modified_base 79: mod_base = OTHER; note = 2'-O-methyl ribonucleotide
  modified_base 80: mod_base = OTHER; note = 2'-O-methyl ribonucleotide
  modified_base 82: mod_base = OTHER; note = 2'-O-methyl ribonucleotide
  modified_base 83: mod_base = OTHER; note = 2'-O-methyl ribonucleotide
  modified_base 84: mod_base = OTHER; note = 2'-O-methyl ribonucleotide
  modified_base 85: mod_base = OTHER; note = 2'-O-methyl ribonucleotide
  modified_base 86: mod_base = OTHER; note = 2'-O-methyl ribonucleotide
  modified_base 87: mod_base = OTHER; note = 2'-O-methyl ribonucleotide
  modified_base 89: mod_base = OTHER; note = 2'-O-methyl ribonucleotide
  modified_base 92: mod_base = OTHER; note = 2'-O-methyl ribonucleotide
  modified_base 93: mod_base = OTHER; note = 2'-O-methyl ribonucleotide
  modified_base 94: mod_base = OTHER; note = 2'-O-methyl ribonucleotide
  modified_base 95: mod_base = OTHER; note = 2'-O-methyl ribonucleotide
  modified_base 96: mod_base = OTHER; note = 2'-O-methyl ribonucleotide
  modified_base 97: mod_base = OTHER; note = 2'-O-methyl ribonucleotide
  modified_base 98: mod_base = OTHER; note = 2'-O-methyl ribonucleotide
  modified_base 99: mod_base = OTHER; note = 2'-O-methyl ribonucleotide
  modified_base 100: mod_base = OTHER; note = 2'-O-methyl ribonucleotide
  modified_base 1..4: mod_base = OTHER; note = phosphorothioate linkage
  modified_base 25..26: mod_base = OTHER; note = phosphorothioate linkage
  modified_base 45..46: mod_base = OTHER; note = phosphorothioate linkage
  modified_base 97..100: mod_base = OTHER; note = phosphorothioate linkage

SEQ ID NO: 1673 - RNA, 100 nt, synthetic construct; identical to SEQ ID NO: 421
  source 1..100: mol_type = other RNA
  modified_base 1: mod_base = OTHER; note = 2'-O-methyl ribonucleotide
  modified_base 2: mod_base = OTHER; note = 2'-O-methyl ribonucleotide
  modified_base 3: mod_base = OTHER; note = 2'-O-methyl ribonucleotide
  modified_base 21: mod_base = OTHER; note = 2'-O-methyl ribonucleotide
  modified_base 28: mod_base = OTHER; note = 2'-O-methyl ribonucleotide
  modified_base 29: mod_base = OTHER; note = 2'-O-methyl ribonucleotide
  modified_base 30: mod_base = OTHER; note = 2'-O-methyl ribonucleotide
  modified_base 31: mod_base = OTHER; note = 2'-O-methyl ribonucleotide
  modified_base 32: mod_base = OTHER; note = 2'-O-methyl ribonucleotide
  modified_base 34: mod_base = OTHER; note = 2'-O-methyl ribonucleotide
  modified_base 35: mod_base = OTHER; note = 2'-O-methyl ribonucleotide
  modified_base 36: mod_base = OTHER; note = 2'-O-methyl ribonucleotide
  modified_base 37: mod_base = OTHER; note = 2'-O-methyl ribonucleotide
  modified_base 38: mod_base = OTHER; note = 2'-O-methyl ribonucleotide
  modified_base 39: mod_base = OTHER; note = 2'-O-methyl ribonucleotide
  modified_base 40: mod_base = OTHER; note = 2'-O-methyl ribonucleotide
  modified_base 41: mod_base = OTHER; note = 2'-O-methyl ribonucleotide
  modified_base 42: mod_base = OTHER; note = 2'-O-methyl ribonucleotide
  modified_base 46: mod_base = OTHER; note = 2'-O-methyl ribonucleotide
  modified_base 48: mod_base = OTHER; note = 2'-O-methyl ribonucleotide
  modified_base 50: mod_base = OTHER; note = 2'-O-methyl ribonucleotide
  modified_base 52: mod_base = OTHER; note = 2'-O-methyl ribonucleotide
  modified_base 53: mod_base = OTHER; note = 2'-O-methyl ribonucleotide
  modified_base 54: mod_base = OTHER; note = 2'-O-methyl ribonucleotide
  modified_base 57: mod_base = OTHER; note = 2'-O-methyl ribonucleotide
  modified_base 61: mod_base = OTHER; note = 2'-O-methyl ribonucleotide
  modified_base 66: mod_base = OTHER; note = 2'-O-methyl ribonucleotide
  modified_base 67: mod_base = OTHER; note = 2'-O-methyl ribonucleotide
  modified_base 70: mod_base = OTHER; note = 2'-O-methyl ribonucleotide
  modified_base 71: mod_base = OTHER; note = 2'-O-methyl ribonucleotide
  modified_base 72: mod_base = OTHER; note = 2'-O-methyl ribonucleotide
  modified_base 74: mod_base = OTHER; note = 2'-O-methyl ribonucleotide
  modified_base 75: mod_base = OTHER; note = 2'-O-methyl ribonucleotide
  modified_base 76: mod_base = OTHER; note = 2'-O-methyl ribonucleotide
  modified_base 77: mod_base = OTHER; note = 2'-O-methyl ribonucleotide
  modified_base 78: mod_base = OTHER; note = 2'-O-methyl ribonucleotide
  modified_base 79: mod_base = OTHER; note = 2'-O-methyl ribonucleotide
  modified_base 80: mod_base = OTHER; note = 2'-O-methyl ribonucleotide
  modified_base 82: mod_base = OTHER; note = 2'-O-methyl ribonucleotide
  modified_base 83: mod_base = OTHER; note = 2'-O-methyl ribonucleotide
  modified_base 84: mod_base = OTHER; note = 2'-O-methyl ribonucleotide
  modified_base 85: mod_base = OTHER; note = 2'-O-methyl ribonucleotide
  modified_base 86: mod_base = OTHER; note = 2'-O-methyl ribonucleotide
  modified_base 87: mod_base = OTHER; note = 2'-O-methyl ribonucleotide
  modified_base 89: mod_base = OTHER; note = 2'-O-methyl ribonucleotide
  modified_base 92: mod_base = OTHER; note = 2'-O-methyl ribonucleotide
  modified_base 93: mod_base = OTHER; note = 2'-O-methyl ribonucleotide
  modified_base 94: mod_base = OTHER; note = 2'-O-methyl ribonucleotide
  modified_base 95: mod_base = OTHER; note = 2'-O-methyl ribonucleotide
  modified_base 96: mod_base = OTHER; note = 2'-O-methyl ribonucleotide
  modified_base 97: mod_base = OTHER; note = 2'-O-methyl ribonucleotide
  modified_base 98: mod_base = OTHER; note = 2'-O-methyl ribonucleotide
  modified_base 99: mod_base = OTHER; note = 2'-O-methyl ribonucleotide
  modified_base 100: mod_base = OTHER; note = 2'-O-methyl ribonucleotide
  modified_base 1..4: mod_base = OTHER; note = phosphorothioate linkage
  modified_base 25..26: mod_base = OTHER; note = phosphorothioate linkage
  modified_base 64..65: mod_base = OTHER; note = phosphorothioate linkage
  modified_base 98..100: mod_base = OTHER; note = phosphorothioate linkage

SEQ ID NO: 1674 - RNA, 100 nt, synthetic construct; identical to SEQ ID NO: 422
  source 1..100: mol_type = other RNA
  modified_base 1: mod_base = OTHER; note = 2'-O-methyl ribonucleotide
  modified_base 2: mod_base = OTHER; note = 2'-O-methyl ribonucleotide
  modified_base 3: mod_base = OTHER; note = 2'-O-methyl ribonucleotide
  modified_base 21: mod_base = OTHER; note = 2'-O-methyl ribonucleotide
  modified_base 28: mod_base = OTHER; note = 2'-O-methyl ribonucleotide
  modified_base 29: mod_base = OTHER; note = 2'-O-methyl ribonucleotide
  modified_base 30: mod_base = OTHER; note = 2'-O-methyl ribonucleotide
  modified_base 31: mod_base = OTHER; note = 2'-O-methyl ribonucleotide
  modified_base 32: mod_base = OTHER; note = 2'-O-methyl ribonucleotide
  modified_base 34: mod_base = OTHER; note = 2'-O-methyl ribonucleotide
  modified_base 35: mod_base = OTHER; note = 2'-O-methyl ribonucleotide
  modified_base 36: mod_base = OTHER; note = 2'-O-methyl ribonucleotide
  modified_base 37: mod_base = OTHER; note = 2'-O-methyl ribonucleotide
  modified_base 38: mod_base = OTHER; note = 2'-O-methyl ribonucleotide
  modified_base 39: mod_base = OTHER; note = 2'-O-methyl ribonucleotide
  modified_base 40: mod_base = OTHER; note = 2'-O-methyl ribonucleotide
  modified_base 41: mod_base = OTHER; note = 2'-O-methyl ribonucleotide
  modified_base 42: mod_base = OTHER; note = 2'-O-methyl ribonucleotide
  modified_base 46: mod_base = OTHER; note = 2'-O-methyl ribonucleotide
  modified_base 48: mod_base = OTHER; note = 2'-O-methyl ribonucleotide
  modified_base 50: mod_base = OTHER; note = 2'-O-methyl ribonucleotide
  modified_base 52: mod_base = OTHER; note = 2'-O-methyl ribonucleotide
  modified_base 53: mod_base = OTHER; note = 2'-O-methyl ribonucleotide
  modified_base 54: mod_base = OTHER; note = 2'-O-methyl ribonucleotide
  modified_base 57: mod_base = OTHER; note = 2'-O-methyl ribonucleotide
  modified_base 61: mod_base = OTHER; note = 2'-O-methyl ribonucleotide
  modified_base 66: mod_base = OTHER; note = 2'-O-methyl ribonucleotide
  modified_base 67: mod_base = OTHER; note = 2'-O-methyl ribonucleotide
  modified_base 70: mod_base = OTHER; note = 2'-O-methyl ribonucleotide
  modified_base 71: mod_base = OTHER; note = 2'-O-methyl ribonucleotide
  modified_base 72: mod_base = OTHER; note = 2'-O-methyl ribonucleotide
  modified_base 74: mod_base = OTHER; note = 2'-O-methyl ribonucleotide
  modified_base 75: mod_base = OTHER; note = 2'-O-methyl ribonucleotide
  modified_base 76: mod_base = OTHER; note = 2'-O-methyl ribonucleotide
  modified_base 77: mod_base = OTHER; note = 2'-O-methyl ribonucleotide
  modified_base 78: mod_base = OTHER; note = 2'-O-methyl ribonucleotide
  modified_base 79: mod_base = OTHER; note = 2'-O-methyl ribonucleotide
  modified_base 80: mod_base = OTHER; note = 2'-O-methyl ribonucleotide
  modified_base 82: mod_base = OTHER; note = 2'-O-methyl ribonucleotide
  modified_base 83: mod_base = OTHER; note = 2'-O-methyl ribonucleotide
  modified_base 84: mod_base = OTHER; note = 2'-O-methyl ribonucleotide
  modified_base 85: mod_base = OTHER; note = 2'-O-methyl ribonucleotide
  modified_base 86: mod_base = OTHER; note = 2'-O-methyl ribonucleotide
  modified_base 87: mod_base = OTHER; note = 2'-O-methyl ribonucleotide
  modified_base 89: mod_base = OTHER; note = 2'-O-methyl ribonucleotide
  modified_base 92: mod_base = OTHER; note = 2'-O-methyl ribonucleotide
  modified_base 93: mod_base = OTHER; note = 2'-O-methyl ribonucleotide
  modified_base 94: mod_base = OTHER; note = 2'-O-methyl ribonucleotide
  modified_base 95: mod_base = OTHER; note = 2'-O-methyl ribonucleotide
  modified_base 96: mod_base = OTHER; note = 2'-O-methyl ribonucleotide
  modified_base 97: mod_base = OTHER; note = 2'-O-methyl ribonucleotide
  modified_base 98: mod_base = OTHER; note = 2'-O-methyl ribonucleotide
  modified_base 99: mod_base = OTHER; note = 2'-O-methyl ribonucleotide
  modified_base 100: mod_base = OTHER; note = 2'-O-methyl ribonucleotide
  modified_base 1..4: mod_base = OTHER; note = phosphorothioate linkage
  modified_base 25..26: mod_base = OTHER; note = phosphorothioate linkage
  modified_base 64..65: mod_base = OTHER; note = phosphorothioate linkage
  modified_base 98..100: mod_base = OTHER; note = phosphorothioate linkage

SEQ ID NO: 1675 - RNA, 100 nt, synthetic construct; identical to SEQ ID NO: 55
  source 1..100: mol_type = other RNA
  modified_base 1: mod_base = OTHER; note = 2'-O-methyl ribonucleotide
  modified_base 2: mod_base = OTHER; note = 2'-O-methyl ribonucleotide
  modified_base 3: mod_base = OTHER; note = 2'-O-methyl ribonucleotide
  modified_base 21: mod_base = OTHER; note = 2'-O-methyl ribonucleotide
  modified_base 28: mod_base = OTHER; note = 2'-O-methyl ribonucleotide
  modified_base 29: mod_base = OTHER; note = 2'-O-methyl ribonucleotide
  modified_base 30: mod_base = OTHER; note = 2'-O-methyl ribonucleotide
  modified_base 31: mod_base = OTHER; note = 2'-O-methyl ribonucleotide
  modified_base 32: mod_base = OTHER; note = 2'-O-methyl ribonucleotide
  modified_base 34: mod_base = OTHER; note = 2'-O-methyl ribonucleotide
  modified_base 35: mod_base = OTHER; note = 2'-O-methyl ribonucleotide
  modified_base 36: mod_base = OTHER; note = 2'-O-methyl ribonucleotide
  modified_base 37: mod_base = OTHER; note = 2'-O-methyl ribonucleotide
  modified_base 38: mod_base = OTHER; note = 2'-O-methyl ribonucleotide
  modified_base 39: mod_base = OTHER; note = 2'-O-methyl ribonucleotide
  modified_base 40: mod_base = OTHER; note = 2'-O-methyl ribonucleotide
  modified_base 41: mod_base = OTHER; note = 2'-O-methyl ribonucleotide
  modified_base 42: mod_base = OTHER; note = 2'-O-methyl ribonucleotide
  modified_base 46: mod_base = OTHER; note = 2'-O-methyl ribonucleotide
  modified_base 48: mod_base = OTHER; note = 2'-O-methyl ribonucleotide
  modified_base 50: mod_base = OTHER; note = 2'-O-methyl ribonucleotide
  modified_base 52: mod_base = OTHER; note = 2'-O-methyl ribonucleotide
  modified_base 53: mod_base = OTHER; note = 2'-O-methyl ribonucleotide
  modified_base 54: mod_base = OTHER; note = 2'-O-methyl ribonucleotide
  modified_base 55: mod_base = OTHER; note = 2'-O-methyl ribonucleotide
  modified_base 56: mod_base = OTHER; note = 2'-O-methyl ribonucleotide
  modified_base 57: mod_base = OTHER; note = 2'-O-methyl ribonucleotide
  modified_base 60: mod_base = OTHER; note = 2'-O-methyl ribonucleotide
  modified_base 61: mod_base = OTHER; note = 2'-O-methyl ribonucleotide
  modified_base 66: mod_base = OTHER; note = 2'-O-methyl ribonucleotide
  modified_base 67: mod_base = OTHER; note = 2'-O-methyl ribonucleotide
  modified_base 70: mod_base = OTHER; note = 2'-O-methyl ribonucleotide
  modified_base 71: mod_base = OTHER; note = 2'-O-methyl ribonucleotide
  modified_base 72: mod_base = OTHER; note = 2'-O-methyl ribonucleotide
  modified_base 74: mod_base = OTHER; note = 2'-O-methyl ribonucleotide
  modified_base 75: mod_base = OTHER; note = 2'-O-methyl ribonucleotide
  modified_base 76: mod_base = OTHER; note = 2'-O-methyl ribonucleotide
  modified_base 77: mod_base = OTHER; note = 2'-O-methyl ribonucleotide
  modified_base 78: mod_base = OTHER; note = 2'-O-methyl ribonucleotide
  modified_base 79: mod_base = OTHER; note = 2'-O-methyl ribonucleotide
  modified_base 80: mod_base = OTHER; note = 2'-O-methyl ribonucleotide
  modified_base 81: mod_base = OTHER; note = 2'-O-methyl ribonucleotide
  modified_base 83: mod_base = OTHER; note = 2'-O-methyl ribonucleotide
  modified_base 84: mod_base = OTHER; note = 2'-O-methyl ribonucleotide
  modified_base 85: mod_base = OTHER; note = 2'-O-methyl ribonucleotide
  modified_base 86: mod_base = OTHER; note = 2'-O-methyl ribonucleotide
  modified_base 87: mod_base = OTHER; note = 2'-O-methyl ribonucleotide
  modified_base 88: mod_base = OTHER; note = 2'-O-methyl ribonucleotide
  modified_base 89: mod_base = OTHER; note = 2'-O-methyl ribonucleotide
  modified_base 90: mod_base = OTHER; note = 2'-O-methyl ribonucleotide
  modified_base 91: mod_base = OTHER; note = 2'-O-methyl ribonucleotide
  modified_base 92: mod_base = OTHER; note = 2'-O-methyl ribonucleotide
  modified_base 93: mod_base = OTHER; note = 2'-O-methyl ribonucleotide
  modified_base 94: mod_base = OTHER; note = 2'-O-methyl ribonucleotide
  modified_base 95: mod_base = OTHER; note = 2'-O-methyl ribonucleotide
  modified_base 96: mod_base = OTHER; note = 2'-O-methyl ribonucleotide
  modified_base 97: mod_base = OTHER; note = 2'-O-methyl ribonucleotide
  modified_base 98: mod_base = OTHER; note = 2'-O-methyl ribonucleotide
  modified_base 99: mod_base = OTHER; note = 2'-O-methyl ribonucleotide
  modified_base 100: mod_base = OTHER; note = 2'-O-methyl ribonucleotide
  modified_base 1..4: mod_base = OTHER; note = phosphorothioate linkage
  modified_base 25..26: mod_base = OTHER; note = phosphorothioate linkage
  modified_base 64..65: mod_base = OTHER; note = phosphorothioate linkage
  modified_base 98..100: mod_base = OTHER; note = phosphorothioate linkage

SEQ ID NO: 1676 - RNA, 100 nt, synthetic construct; identical to SEQ ID NO: 421
  source 1..100: mol_type = other RNA
  modified_base 1: mod_base = OTHER; note = 2'-O-methyl ribonucleotide
  modified_base 2: mod_base = OTHER; note = 2'-O-methyl ribonucleotide
  modified_base 3: mod_base = OTHER; note = 2'-O-methyl ribonucleotide
  modified_base 21: mod_base = OTHER; note = 2'-O-methyl ribonucleotide
  modified_base 28: mod_base = OTHER; note = 2'-O-methyl ribonucleotide
  modified_base 29: mod_base = OTHER; note = 2'-O-methyl ribonucleotide
  modified_base 30: mod_base = OTHER; note = 2'-O-methyl ribonucleotide
  modified_base 31: mod_base = OTHER; note = 2'-O-methyl ribonucleotide
  modified_base 32: mod_base = OTHER; note = 2'-O-methyl ribonucleotide
  modified_base 34: mod_base = OTHER; note = 2'-O-methyl ribonucleotide
  modified_base 35: mod_base = OTHER; note = 2'-O-methyl ribonucleotide
  modified_base 36: mod_base = OTHER; note = 2'-O-methyl ribonucleotide
  modified_base 37: mod_base = OTHER; note = 2'-O-methyl ribonucleotide
  modified_base 38: mod_base = OTHER; note = 2'-O-methyl ribonucleotide
  modified_base 39: mod_base = OTHER; note = 2'-O-methyl ribonucleotide
  modified_base 40: mod_base = OTHER; note = 2'-O-methyl ribonucleotide
  modified_base 41: mod_base = OTHER; note = 2'-O-methyl ribonucleotide
  modified_base 42: mod_base = OTHER; note = 2'-O-methyl ribonucleotide
  modified_base 46: mod_base = OTHER; note = 2'-O-methyl ribonucleotide
  modified_base 48: mod_base = OTHER; note = 2'-O-methyl ribonucleotide
  modified_base 50: mod_base = OTHER; note = 2'-O-methyl ribonucleotide
  modified_base 52: mod_base = OTHER; note = 2'-O-methyl ribonucleotide
  modified_base 53: mod_base = OTHER; note = 2'-O-methyl ribonucleotide
  modified_base 54: mod_base = OTHER; note = 2'-O-methyl ribonucleotide
  modified_base 57: mod_base = OTHER; note = 2'-O-methyl ribonucleotide
  modified_base 61: mod_base = OTHER; note = 2'-O-methyl ribonucleotide
  modified_base 66: mod_base = OTHER; note = 2'-O-methyl ribonucleotide
  modified_base 67: mod_base = OTHER; note = 2'-O-methyl ribonucleotide
  modified_base 70: mod_base = OTHER; note = 2'-O-methyl ribonucleotide
  modified_base 71: mod_base = OTHER; note = 2'-O-methyl ribonucleotide
  modified_base 72: mod_base = OTHER; note = 2'-O-methyl ribonucleotide
  modified_base 74: mod_base = OTHER; note = 2'-O-methyl ribonucleotide
  modified_base 75: mod_base = OTHER; note = 2'-O-methyl ribonucleotide
  modified_base 76: mod_base = OTHER; note = 2'-O-methyl ribonucleotide
  modified_base 77: mod_base = OTHER; note = 2'-O-methyl ribonucleotide
  modified_base 78: mod_base = OTHER; note = 2'-O-methyl ribonucleotide
  modified_base 79: mod_base = OTHER; note = 2'-O-methyl ribonucleotide
  modified_base 80: mod_base = OTHER; note = 2'-O-methyl ribonucleotide
  modified_base 82: mod_base = OTHER; note = 2'-O-methyl ribonucleotide
  modified_base 83: mod_base = OTHER; note = 2'-O-methyl ribonucleotide
  modified_base 84: mod_base = OTHER; note = 2'-O-methyl ribonucleotide
  modified_base 85: mod_base = OTHER; note = 2'-O-methyl ribonucleotide
  modified_base 86: mod_base = OTHER; note = 2'-O-methyl ribonucleotide
  modified_base 87: mod_base = OTHER; note = 2'-O-methyl ribonucleotide
  modified_base 89: mod_base = OTHER; note = 2'-O-methyl ribonucleotide
  modified_base 92: mod_base = OTHER; note = 2'-O-methyl ribonucleotide
  modified_base 93: mod_base = OTHER; note = 2'-O-methyl ribonucleotide
  modified_base 94: mod_base = OTHER; note = 2'-O-methyl ribonucleotide
  modified_base 95: mod_base = OTHER; note = 2'-O-methyl ribonucleotide
  modified_base 96: mod_base = OTHER; note = 2'-O-methyl ribonucleotide
  modified_base 97: mod_base = OTHER; note = 2'-O-methyl ribonucleotide
  modified_base 98: mod_base = OTHER; note = 2'-O-methyl ribonucleotide
  modified_base 99: mod_base = OTHER; note = 2'-O-methyl ribonucleotide
  modified_base 100: mod_base = OTHER; note = 2'-O-methyl ribonucleotide
  modified_base 1..4: mod_base = OTHER; note = phosphorothioate linkage
  modified_base 25..26: mod_base = OTHER; note = phosphorothioate linkage
  modified_base 45..46: mod_base = OTHER; note = phosphorothioate linkage
  modified_base 64..65: mod_base = OTHER; note = phosphorothioate linkage
  modified_base 98..100: mod_base = OTHER; note = phosphorothioate linkage

SEQ ID NO: 1677 - RNA, 100 nt, synthetic construct; identical to SEQ ID NO: 422
  source 1..100: mol_type = other RNA
  modified_base 1: mod_base = OTHER; note = 2'-O-methyl ribonucleotide
  modified_base 2: mod_base = OTHER; note = 2'-O-methyl ribonucleotide
  modified_base 3: mod_base = OTHER; note = 2'-O-methyl ribonucleotide
  modified_base 21: mod_base = OTHER; note = 2'-O-methyl ribonucleotide
  modified_base 28: mod_base = OTHER; note = 2'-O-methyl ribonucleotide
  modified_base 29: mod_base = OTHER; note = 2'-O-methyl ribonucleotide
  modified_base 30: mod_base = OTHER; note = 2'-O-methyl ribonucleotide
  modified_base 31: mod_base = OTHER; note = 2'-O-methyl ribonucleotide
  modified_base 32: mod_base = OTHER; note = 2'-O-methyl ribonucleotide
  modified_base 34: mod_base = OTHER; note = 2'-O-methyl ribonucleotide
  modified_base 35: mod_base = OTHER; note = 2'-O-methyl ribonucleotide
  modified_base 36: mod_base = OTHER; note = 2'-O-methyl ribonucleotide
  modified_base 37: mod_base = OTHER; note = 2'-O-methyl ribonucleotide
  modified_base 38: mod_base = OTHER; note = 2'-O-methyl ribonucleotide
  modified_base 39: mod_base = OTHER; note = 2'-O-methyl ribonucleotide
  modified_base 40: mod_base = OTHER; note = 2'-O-methyl ribonucleotide
  modified_base 41: mod_base = OTHER; note = 2'-O-methyl ribonucleotide
  modified_base 42: mod_base = OTHER; note = 2'-O-methyl ribonucleotide
  modified_base 46: mod_base = OTHER; note = 2'-O-methyl ribonucleotide
  modified_base 48: mod_base = OTHER; note = 2'-O-methyl ribonucleotide
  modified_base 50: mod_base = OTHER; note = 2'-O-methyl ribonucleotide
  modified_base 52: mod_base = OTHER; note = 2'-O-methyl ribonucleotide
  modified_base 53: mod_base = OTHER; note = 2'-O-methyl ribonucleotide
  modified_base 54: mod_base = OTHER; note = 2'-O-methyl ribonucleotide
  modified_base 57: mod_base = OTHER; note = 2'-O-methyl ribonucleotide
  modified_base 61: mod_base = OTHER; note = 2'-O-methyl ribonucleotide
  modified_base 66: mod_base = OTHER; note = 2'-O-methyl ribonucleotide
  modified_base 67: mod_base = OTHER; note = 2'-O-methyl ribonucleotide
  modified_base 70: mod_base = OTHER; note = 2'-O-methyl ribonucleotide
  modified_base 71: mod_base = OTHER; note = 2'-O-methyl ribonucleotide
  modified_base 72: mod_base = OTHER; note = 2'-O-methyl ribonucleotide
  modified_base 74: mod_base = OTHER; note = 2'-O-methyl ribonucleotide
  modified_base 75: mod_base = OTHER; note = 2'-O-methyl ribonucleotide
  modified_base 76: mod_base = OTHER; note = 2'-O-methyl ribonucleotide
  modified_base 77: mod_base = OTHER; note = 2'-O-methyl ribonucleotide
  modified_base 78: mod_base = OTHER; note = 2'-O-methyl ribonucleotide
  modified_base 79: mod_base = OTHER; note = 2'-O-methyl ribonucleotide
  modified_base 80: mod_base = OTHER; note = 2'-O-methyl ribonucleotide
  modified_base 82: mod_base = OTHER; note = 2'-O-methyl ribonucleotide
  modified_base 83: mod_base = OTHER; note = 2'-O-methyl ribonucleotide
  modified_base 84: mod_base = OTHER; note = 2'-O-methyl ribonucleotide
  modified_base 85: mod_base = OTHER; note = 2'-O-methyl ribonucleotide
  modified_base 86: mod_base = OTHER; note = 2'-O-methyl ribonucleotide
  modified_base 87: mod_base = OTHER; note = 2'-O-methyl ribonucleotide
  modified_base 89: mod_base = OTHER; note = 2'-O-methyl ribonucleotide
  modified_base 92: mod_base = OTHER; note = 2'-O-methyl ribonucleotide
  modified_base 93: mod_base = OTHER; note = 2'-O-methyl ribonucleotide
  modified_base 94: mod_base = OTHER; note = 2'-O-methyl ribonucleotide
  modified_base 95: mod_base = OTHER; note = 2'-O-methyl ribonucleotide
  modified_base 96: mod_base = OTHER; note = 2'-O-methyl ribonucleotide
  modified_base 97: mod_base = OTHER; note = 2'-O-methyl ribonucleotide
  modified_base 98: mod_base = OTHER; note = 2'-O-methyl ribonucleotide
  modified_base 99: mod_base = OTHER; note = 2'-O-methyl ribonucleotide
  modified_base 100: mod_base = OTHER; note = 2'-O-methyl ribonucleotide
  modified_base 1..4: mod_base = OTHER; note = phosphorothioate linkage
  modified_base 25..26: mod_base = OTHER; note = phosphorothioate linkage
  modified_base 45..46: mod_base = OTHER; note = phosphorothioate linkage
  modified_base 64..65: mod_base = OTHER; note = phosphorothioate linkage
  modified_base 98..100: mod_base = OTHER; note = phosphorothioate linkage

SEQ ID NO: 1678 - RNA, 100 nt, synthetic construct; identical to SEQ ID NO: 55
  source 1..100: mol_type = other RNA
  modified_base 1: mod_base = OTHER; note = 2'-O-methyl ribonucleotide
  modified_base 2: mod_base = OTHER; note = 2'-O-methyl ribonucleotide
  modified_base 3: mod_base = OTHER; note = 2'-O-methyl ribonucleotide
  modified_base 21: mod_base = OTHER; note = 2'-O-methyl ribonucleotide
  modified_base 28: mod_base = OTHER; note = 2'-O-methyl ribonucleotide
  modified_base 29: mod_base = OTHER; note = 2'-O-methyl ribonucleotide
  modified_base 30: mod_base = OTHER; note = 2'-O-methyl ribonucleotide
  modified_base 31: mod_base = OTHER; note = 2'-O-methyl ribonucleotide
  modified_base 32: mod_base = OTHER; note = 2'-O-methyl ribonucleotide
  modified_base 34: mod_base = OTHER; note = 2'-O-methyl ribonucleotide
  modified_base 35: mod_base = OTHER; note = 2'-O-methyl ribonucleotide
  modified_base 36: mod_base = OTHER; note = 2'-O-methyl ribonucleotide
  modified_base 37: mod_base = OTHER; note = 2'-O-methyl ribonucleotide
  modified_base 38: mod_base = OTHER; note = 2'-O-methyl ribonucleotide
  modified_base 39: mod_base = OTHER; note = 2'-O-methyl ribonucleotide
  modified_base 40: mod_base = OTHER; note = 2'-O-methyl ribonucleotide
  modified_base 41: mod_base = OTHER; note = 2'-O-methyl ribonucleotide
  modified_base 42: mod_base = OTHER; note = 2'-O-methyl ribonucleotide
  modified_base 46: mod_base = OTHER; note = 2'-O-methyl ribonucleotide
  modified_base 48: mod_base = OTHER; note = 2'-O-methyl ribonucleotide
  modified_base 50: mod_base = OTHER; note = 2'-O-methyl ribonucleotide
  modified_base 52: mod_base = OTHER; note = 2'-O-methyl ribonucleotide
  modified_base 53: mod_base = OTHER; note = 2'-O-methyl ribonucleotide
  modified_base 54: mod_base = OTHER; note = 2'-O-methyl ribonucleotide
  modified_base 55: mod_base = OTHER; note = 2'-O-methyl ribonucleotide
  modified_base 56: mod_base = OTHER; note = 2'-O-methyl ribonucleotide
  modified_base 57: mod_base = OTHER; note = 2'-O-methyl ribonucleotide
  modified_base 60: mod_base = OTHER; note = 2'-O-methyl ribonucleotide
  modified_base 61: mod_base = OTHER; note = 2'-O-methyl ribonucleotide
  modified_base 66: mod_base = OTHER; note = 2'-O-methyl ribonucleotide
  modified_base 67: mod_base = OTHER; note = 2'-O-methyl ribonucleotide
  modified_base 70: mod_base = OTHER; note = 2'-O-methyl ribonucleotide
  modified_base 71: mod_base = OTHER; note = 2'-O-methyl ribonucleotide
  modified_base 72: mod_base = OTHER; note = 2'-O-methyl ribonucleotide
  modified_base 74: mod_base = OTHER; note = 2'-O-methyl ribonucleotide
  modified_base 75: mod_base = OTHER; note = 2'-O-methyl ribonucleotide
  modified_base 76: mod_base = OTHER; note = 2'-O-methyl ribonucleotide
  modified_base 77: mod_base = OTHER; note = 2'-O-methyl ribonucleotide
  modified_base 78: mod_base = OTHER; note = 2'-O-methyl ribonucleotide
  modified_base 79: mod_base = OTHER; note = 2'-O-methyl ribonucleotide
  modified_base 80: mod_base = OTHER; note = 2'-O-methyl ribonucleotide
  modified_base 81: mod_base = OTHER; note = 2'-O-methyl ribonucleotide
  modified_base 83: mod_base = OTHER; note = 2'-O-methyl ribonucleotide
  modified_base 84: mod_base = OTHER; note = 2'-O-methyl ribonucleotide
  modified_base 85: mod_base = OTHER; note = 2'-O-methyl ribonucleotide
  modified_base 86: mod_base = OTHER; note = 2'-O-methyl ribonucleotide
  modified_base 87: mod_base = OTHER; note = 2'-O-methyl ribonucleotide
  modified_base 88: mod_base = OTHER; note = 2'-O-methyl ribonucleotide
  modified_base 89: mod_base = OTHER; note = 2'-O-methyl ribonucleotide
  modified_base 90: mod_base = OTHER; note = 2'-O-methyl ribonucleotide
  modified_base 91: mod_base = OTHER; note = 2'-O-methyl ribonucleotide
  modified_base 92: mod_base = OTHER; note = 2'-O-methyl ribonucleotide
  modified_base 93: mod_base = OTHER; note = 2'-O-methyl ribonucleotide
  modified_base 94: mod_base = OTHER; note = 2'-O-methyl ribonucleotide
  modified_base 95: mod_base = OTHER; note = 2'-O-methyl ribonucleotide
  modified_base 96: mod_base = OTHER; note = 2'-O-methyl ribonucleotide
  modified_base 97: mod_base = OTHER; note = 2'-O-methyl ribonucleotide
  modified_base 98: mod_base = OTHER; note = 2'-O-methyl ribonucleotide
  modified_base 99: mod_base = OTHER; note = 2'-O-methyl ribonucleotide
  modified_base 100: mod_base = OTHER; note = 2'-O-methyl ribonucleotide
  modified_base 1..4: mod_base = OTHER; note = phosphorothioate linkage
  modified_base 25..26: mod_base = OTHER; note = phosphorothioate linkage
  modified_base 45..46: mod_base = OTHER; note = phosphorothioate linkage
  modified_base 64..65: mod_base = OTHER; note = phosphorothioate linkage
  modified_base 98..100: mod_base = OTHER; note = phosphorothioate linkage

SEQ ID NO: 1679 - RNA, 100 nt, synthetic construct; identical to SEQ ID NO: 55
  source 1..100: mol_type = other RNA
  modified_base 1: mod_base = OTHER; note = 2'-O-methyl ribonucleotide
  modified_base 2: mod_base = OTHER; note = 2'-O-methyl ribonucleotide
  modified_base 3: mod_base = OTHER; note = 2'-O-methyl ribonucleotide
  modified_base 21: mod_base = OTHER; note = 2'-O-methyl ribonucleotide
  modified_base 28: mod_base = OTHER; note = 2'-O-methyl ribonucleotide
  modified_base 29: mod_base = OTHER; note = 2'-O-methyl ribonucleotide
  modified_base 30: mod_base = OTHER; note = 2'-O-methyl ribonucleotide
  modified_base 31: mod_base = OTHER; note = 2'-O-methyl ribonucleotide
  modified_base 32: mod_base = OTHER; note = 2'-O-methyl ribonucleotide
  modified_base 34: mod_base = OTHER; note = 2'-O-methyl ribonucleotide
  modified_base 35: mod_base = OTHER; note = 2'-O-methyl ribonucleotide
  modified_base 36: mod_base = OTHER; note = 2'-O-methyl ribonucleotide
  modified_base 37: mod_base = OTHER; note = 2'-O-methyl ribonucleotide
  modified_base 38: mod_base = OTHER; note = 2'-O-methyl ribonucleotide
  modified_base 39: mod_base = OTHER; note = 2'-O-methyl ribonucleotide
  modified_base 40: mod_base = OTHER; note = 2'-O-methyl ribonucleotide
  modified_base 41: mod_base = OTHER; note = 2'-O-methyl ribonucleotide
  modified_base 42: mod_base = OTHER; note = 2'-O-methyl ribonucleotide
  modified_base 46: mod_base = OTHER; note = 2'-O-methyl ribonucleotide
  modified_base 48: mod_base = OTHER; note = 2'-O-methyl ribonucleotide
  modified_base 50: mod_base = OTHER; note = 2'-O-methyl ribonucleotide
  modified_base 52: mod_base = OTHER; note = 2'-O-methyl ribonucleotide
  modified_base 53: mod_base = OTHER; note = 2'-O-methyl ribonucleotide
  modified_base 54: mod_base = OTHER; note = 2'-O-methyl ribonucleotide
  modified_base 57: mod_base = OTHER; note = 2'-O-methyl ribonucleotide
  modified_base 61: mod_base = OTHER; note = 2'-O-methyl ribonucleotide
  modified_base 66: mod_base = OTHER; note = 2'-O-methyl ribonucleotide
  modified_base 67: mod_base = OTHER; note = 2'-O-methyl ribonucleotide
  modified_base 70: mod_base = OTHER; note = 2'-O-methyl ribonucleotide
  modified_base 71: mod_base = OTHER; note = 2'-O-methyl ribonucleotide
  modified_base 72: mod_base = OTHER; note = 2'-O-methyl ribonucleotide
  modified_base 74: mod_base = OTHER; note = 2'-O-methyl ribonucleotide
  modified_base 75: mod_base = OTHER; note = 2'-O-methyl ribonucleotide
  modified_base 76: mod_base = OTHER; note = 2'-O-methyl ribonucleotide
  modified_base 77: mod_base = OTHER; note = 2'-O-methyl ribonucleotide
  modified_base 78: mod_base = OTHER; note = 2'-O-methyl ribonucleotide
  modified_base 79: mod_base = OTHER; note = 2'-O-methyl ribonucleotide
  modified_base 80: mod_base = OTHER; note = 2'-O-methyl ribonucleotide
  modified_base 82: mod_base = OTHER; note = 2'-O-methyl ribonucleotide
  modified_base 83: mod_base = OTHER; note = 2'-O-methyl ribonucleotide
  modified_base 84: mod_base = OTHER; note = 2'-O-methyl ribonucleotide
  modified_base 85: mod_base = OTHER; note = 2'-O-methyl ribonucleotide
  modified_base 86: mod_base = OTHER; note = 2'-O-methyl ribonucleotide
  modified_base 87: mod_base = OTHER; note = 2'-O-methyl ribonucleotide
  modified_base 89: mod_base = OTHER; note = 2'-O-methyl ribonucleotide
  modified_base 92: mod_base = OTHER; note = 2'-O-methyl ribonucleotide
  modified_base 93: mod_base = OTHER; note = 2'-O-methyl ribonucleotide
  modified_base 94: mod_base = OTHER; note = 2'-O-methyl ribonucleotide
  modified_base 95: mod_base = OTHER; note = 2'-O-methyl ribonucleotide
  modified_base 96: mod_base = OTHER; note = 2'-O-methyl ribonucleotide
  modified_base 97: mod_base = OTHER; note = 2'-O-methyl ribonucleotide
  modified_base 98: mod_base = OTHER; note = 2'-O-methyl ribonucleotide
  modified_base 99: mod_base = OTHER; note = 2'-O-methyl ribonucleotide
  modified_base 100: mod_base = OTHER; note = 2'-O-methyl ribonucleotide
  modified_base 1..3: mod_base = OTHER; note = phosphorothioate linkage
  modified_base 98..100: mod_base = OTHER; note = phosphorothioate linkage

SEQ ID NO: 1680 - RNA, 100 nt, synthetic construct; identical to SEQ ID NO: 55
  source 1..100: mol_type = other RNA
  modified_base 1: mod_base = OTHER; note = 2'-O-methyl ribonucleotide
  modified_base 2: mod_base = OTHER; note = 2'-O-methyl ribonucleotide
  modified_base 3: mod_base = OTHER; note = 2'-O-methyl ribonucleotide
  modified_base 21: mod_base = OTHER; note = 2'-O-methyl ribonucleotide
  modified_base 28: mod_base = OTHER; note = 2'-O-methyl ribonucleotide
  modified_base 29: mod_base = OTHER; note = 2'-O-methyl ribonucleotide
  modified_base 30: mod_base = OTHER; note = 2'-O-methyl ribonucleotide
  modified_base 31: mod_base = OTHER; note = 2'-O-methyl ribonucleotide
  modified_base 32: mod_base = OTHER; note = 2'-O-methyl ribonucleotide
  modified_base 33: mod_base = OTHER; note = 2'-O-methyl ribonucleotide
  modified_base 34: mod_base = OTHER; note = 2'-O-methyl ribonucleotide
  modified_base 35: mod_base = OTHER; note = 2'-O-methyl ribonucleotide
  modified_base 36: mod_base = OTHER; note = 2'-O-methyl ribonucleotide
  modified_base 37: mod_base = OTHER; note = 2'-O-methyl ribonucleotide
  modified_base 38: mod_base = OTHER; note = 2'-O-methyl ribonucleotide
  modified_base 39: mod_base = OTHER; note = 2'-O-methyl ribonucleotide
  modified_base 40: mod_base = OTHER; note = 2'-O-methyl ribonucleotide
  modified_base 41: mod_base = OTHER; note = 2'-O-methyl ribonucleotide
  modified_base 42: mod_base = OTHER; note = 2'-O-methyl ribonucleotide
  modified_base 46: mod_base = OTHER; note = 2'-O-methyl ribonucleotide
  modified_base 48: mod_base = OTHER; note = 2'-O-methyl ribonucleotide
  modified_base 50: mod_base = OTHER; note = 2'-O-methyl ribonucleotide
  modified_base 52: mod_base = OTHER; note = 2'-O-methyl ribonucleotide
  modified_base 53: mod_base = OTHER; note = 2'-O-methyl ribonucleotide
  modified_base 54: mod_base = OTHER; note = 2'-O-methyl ribonucleotide
  modified_base 55: mod_base = OTHER; note = 2'-O-methyl ribonucleotide
  modified_base 56: mod_base = OTHER; note = 2'-O-methyl ribonucleotide
  modified_base 57: mod_base = OTHER; note = 2'-O-methyl ribonucleotide
  modified_base 60: mod_base = OTHER; note = 2'-O-methyl ribonucleotide
  modified_base 61: mod_base = OTHER; note = 2'-O-methyl ribonucleotide
  modified_base 66: mod_base = OTHER; note = 2'-O-methyl ribonucleotide
  modified_base 67: mod_base = OTHER; note = 2'-O-methyl ribonucleotide
  modified_base 70: mod_base = OTHER; note = 2'-O-methyl ribonucleotide
  modified_base 71: mod_base = OTHER; note = 2'-O-methyl ribonucleotide
  modified_base 72: mod_base = OTHER; note = 2'-O-methyl ribonucleotide
  modified_base 73: mod_base = OTHER; note = 2'-O-methyl ribonucleotide
  modified_base 74: mod_base = OTHER; note = 2'-O-methyl ribonucleotide
  modified_base 75: mod_base = OTHER; note = 2'-O-methyl ribonucleotide
  modified_base 76: mod_base = OTHER; note = 2'-O-methyl ribonucleotide
  modified_base 77: mod_base = OTHER; note = 2'-O-methyl ribonucleotide
  modified_base 78: mod_base = OTHER; note = 2'-O-methyl ribonucleotide
  modified_base 79: mod_base = OTHER; note = 2'-O-methyl ribonucleotide
  modified_base 80: mod_base = OTHER; note = 2'-O-methyl ribonucleotide
  modified_base 81: mod_base = OTHER; note = 2'-O-methyl ribonucleotide
  modified_base 83: mod_base = OTHER; note = 2'-O-methyl ribonucleotide
  modified_base 84: mod_base = OTHER; note = 2'-O-methyl ribonucleotide
  modified_base 85: mod_base = OTHER; note = 2'-O-methyl ribonucleotide
  modified_base 86: mod_base = OTHER; note = 2'-O-methyl ribonucleotide
  modified_base 87: mod_base = OTHER; note = 2'-O-methyl ribonucleotide
  modified_base 88: mod_base = OTHER; note = 2'-O-methyl ribonucleotide
  modified_base 89: mod_base = OTHER; note = 2'-O-methyl ribonucleotide
  modified_base 90: mod_base = OTHER; note = 2'-O-methyl ribonucleotide
  modified_base 91: mod_base = OTHER; note = 2'-O-methyl ribonucleotide
  modified_base 92: mod_base = OTHER; note = 2'-O-methyl ribonucleotide
  modified_base 93: mod_base = OTHER; note = 2'-O-methyl ribonucleotide
  modified_base 94: mod_base = OTHER; note = 2'-O-methyl ribonucleotide
  modified_base 95: mod_base = OTHER; note = 2'-O-methyl ribonucleotide
  modified_base 96: mod_base = OTHER; note = 2'-O-methyl ribonucleotide
  modified_base 97: mod_base = OTHER; note = 2'-O-methyl ribonucleotide
  modified_base 98: mod_base = OTHER; note = 2'-O-methyl ribonucleotide
  modified_base 99: mod_base = OTHER; note = 2'-O-methyl ribonucleotide
  modified_base 100: mod_base = OTHER; note = 2'-O-methyl ribonucleotide
  modified_base 1..3: mod_base = OTHER; note = phosphorothioate linkage
  modified_base 98..100: mod_base = OTHER; note = phosphorothioate linkage

SEQ ID NO: 1681 - RNA, 100 nt, synthetic construct; identical to SEQ ID NO: 421
  source 1..100: mol_type = other RNA
  modified_base 1: mod_base = OTHER; note = 2'-O-methyl ribonucleotide
  modified_base 2: mod_base = OTHER; note = 2'-O-methyl ribonucleotide
  modified_base 3: mod_base = OTHER; note = 2'-O-methyl ribonucleotide
  modified_base 21: mod_base = OTHER; note = 2'-O-methyl ribonucleotide
  modified_base 28: mod_base = OTHER; note = 2'-O-methyl ribonucleotide
  modified_base 29: mod_base = OTHER; note = 2'-O-methyl ribonucleotide
  modified_base 30: mod_base = OTHER; note = 2'-O-methyl ribonucleotide
  modified_base 31: mod_base = OTHER; note = 2'-O-methyl ribonucleotide
  modified_base 32: mod_base = OTHER; note = 2'-O-methyl ribonucleotide
  modified_base 34: mod_base = OTHER; note = 2'-O-methyl ribonucleotide
  modified_base 35: mod_base = OTHER; note = 2'-O-methyl ribonucleotide
  modified_base 36: mod_base = OTHER; note = 2'-O-methyl ribonucleotide
  modified_base 37: mod_base = OTHER; note = 2'-O-methyl ribonucleotide
  modified_base 38: mod_base = OTHER; note = 2'-O-methyl ribonucleotide
  modified_base 39: mod_base = OTHER; note = 2'-O-methyl ribonucleotide
  modified_base 40: mod_base = OTHER; note = 2'-O-methyl ribonucleotide
  modified_base 41: mod_base = OTHER; note = 2'-O-methyl ribonucleotide
  modified_base 42: mod_base = OTHER; note = 2'-O-methyl ribonucleotide
  modified_base 46: mod_base = OTHER; note = 2'-O-methyl ribonucleotide
  modified_base 48: mod_base = OTHER; note = 2'-O-methyl ribonucleotide
  modified_base 50: mod_base = OTHER; note = 2'-O-methyl ribonucleotide
  modified_base 52: mod_base = OTHER; note = 2'-O-methyl ribonucleotide
  modified_base 53: mod_base = OTHER; note = 2'-O-methyl ribonucleotide
  modified_base 54: mod_base = OTHER; note = 2'-O-methyl ribonucleotide
  modified_base 57: mod_base = OTHER; note = 2'-O-methyl ribonucleotide
  modified_base 61: mod_base = OTHER; note = 2'-O-methyl ribonucleotide
  modified_base 66: mod_base = OTHER; note = 2'-O-methyl ribonucleotide
  modified_base 67: mod_base = OTHER; note = 2'-O-methyl ribonucleotide
  modified_base 70: mod_base = OTHER; note = 2'-O-methyl ribonucleotide
  modified_base 71: mod_base = OTHER; note = 2'-O-methyl ribonucleotide
  modified_base 72: mod_base = OTHER; note = 2'-O-methyl ribonucleotide
  modified_base 74: mod_base = OTHER; note = 2'-O-methyl ribonucleotide
  modified_base 75: mod_base = OTHER; note = 2'-O-methyl ribonucleotide
  modified_base 76: mod_base = OTHER; note = 2'-O-methyl ribonucleotide
  modified_base 77: mod_base = OTHER; note = 2'-O-methyl ribonucleotide
  modified_base 78: mod_base = OTHER; note = 2'-O-methyl ribonucleotide
  modified_base 79: mod_base = OTHER; note = 2'-O-methyl ribonucleotide
  modified_base 80: mod_base = OTHER; note = 2'-O-methyl ribonucleotide
  modified_base 82: mod_base = OTHER; note = 2'-O-methyl ribonucleotide
  modified_base 83: mod_base = OTHER; note = 2'-O-methyl ribonucleotide
  modified_base 84: mod_base = OTHER; note = 2'-O-methyl ribonucleotide
  modified_base 85: mod_base = OTHER; note = 2'-O-methyl ribonucleotide
  modified_base 86: mod_base = OTHER; note = 2'-O-methyl ribonucleotide
  modified_base 87: mod_base = OTHER; note = 2'-O-methyl ribonucleotide
  modified_base 89: mod_base = OTHER; note = 2'-O-methyl ribonucleotide
  modified_base 92: mod_base = OTHER; note = 2'-O-methyl ribonucleotide
  modified_base 93: mod_base = OTHER; note = 2'-O-methyl ribonucleotide
  modified_base 94: mod_base = OTHER; note = 2'-O-methyl ribonucleotide
  modified_base 95: mod_base = OTHER; note = 2'-O-methyl ribonucleotide
  modified_base 96: mod_base = OTHER; note = 2'-O-methyl ribonucleotide
  modified_base 97: mod_base = OTHER; note = 2'-O-methyl ribonucleotide
  modified_base 98: mod_base = OTHER; note = 2'-O-methyl ribonucleotide
  modified_base 99: mod_base = OTHER; note = 2'-O-methyl ribonucleotide
  modified_base 100: mod_base = OTHER; note = 2'-O-methyl ribonucleotide
  modified_base 1..3: mod_base = OTHER; note = phosphorothioate linkage
  modified_base 98..100: mod_base = OTHER; note = phosphorothioate linkage

SEQ ID NO: 1682 - RNA, 100 nt, synthetic construct; identical to SEQ ID NO: 421
  source 1..100: mol_type = other RNA
  modified_base 1: mod_base = OTHER; note = 2'-O-methyl ribonucleotide
  modified_base 2: mod_base = OTHER; note = 2'-O-methyl ribonucleotide
  modified_base 3: mod_base = OTHER; note = 2'-O-methyl ribonucleotide
  modified_base 21: mod_base = OTHER; note = 2'-O-methyl ribonucleotide
  modified_base 28: mod_base = OTHER; note = 2'-O-methyl ribonucleotide
  modified_base 29: mod_base = OTHER; note = 2'-O-methyl ribonucleotide
  modified_base 30: mod_base = OTHER; note = 2'-O-methyl ribonucleotide
  modified_base 31: mod_base = OTHER; note = 2'-O-methyl ribonucleotide
  modified_base 32: mod_base = OTHER; note = 2'-O-methyl ribonucleotide
  modified_base 34: mod_base = OTHER; note = 2'-O-methyl ribonucleotide
  modified_base 35: mod_base = OTHER; note = 2'-O-methyl ribonucleotide
  modified_base 36: mod_base = OTHER; note = 2'-O-methyl ribonucleotide
  modified_base 37: mod_base = OTHER; note = 2'-O-methyl ribonucleotide
  modified_base 38: mod_base = OTHER; note = 2'-O-methyl ribonucleotide
  modified_base 39: mod_base = OTHER; note = 2'-O-methyl ribonucleotide
  modified_base 40: mod_base = OTHER; note = 2'-O-methyl ribonucleotide
  modified_base 41: mod_base = OTHER; note = 2'-O-methyl ribonucleotide
  modified_base 42: mod_base = OTHER; note = 2'-O-methyl ribonucleotide
  modified_base 46: mod_base = OTHER; note = 2'-O-methyl ribonucleotide
  modified_base 48: mod_base = OTHER; note = 2'-O-methyl ribonucleotide
  modified_base 50: mod_base = OTHER; note = 2'-O-methyl ribonucleotide
  modified_base 52: mod_base = OTHER; note = 2'-O-methyl ribonucleotide
  modified_base 53: mod_base = OTHER; note = 2'-O-methyl ribonucleotide
  modified_base 54: mod_base = OTHER; note = 2'-O-methyl ribonucleotide
  modified_base 55: mod_base = OTHER; note = 2'-O-methyl ribonucleotide
  modified_base 56: mod_base = OTHER; note = 2'-O-methyl ribonucleotide
  modified_base 57: mod_base = OTHER; note = 2'-O-methyl ribonucleotide
  modified_base 60: mod_base = OTHER; note = 2'-O-methyl ribonucleotide
  modified_base 61: mod_base = OTHER; note = 2'-O-methyl ribonucleotide
  modified_base 66: mod_base = OTHER; note = 2'-O-methyl ribonucleotide
  modified_base 67: mod_base = OTHER; note = 2'-O-methyl ribonucleotide
  modified_base 70: mod_base = OTHER; note = 2'-O-methyl ribonucleotide
  modified_base 71: mod_base = OTHER; note = 2'-O-methyl ribonucleotide
  modified_base 72: mod_base = OTHER; note = 2'-O-methyl ribonucleotide
  modified_base 74: mod_base = OTHER; note = 2'-O-methyl ribonucleotide
  modified_base 75: mod_base = OTHER; note = 2'-O-methyl ribonucleotide
  modified_base 76: mod_base = OTHER; note = 2'-O-methyl ribonucleotide
  modified_base 77: mod_base = OTHER; note = 2'-O-methyl ribonucleotide
  modified_base 78: mod_base = OTHER; note = 2'-O-methyl ribonucleotide
  modified_base 79: mod_base = OTHER; note = 2'-O-methyl ribonucleotide
  modified_base 80: mod_base = OTHER; note = 2'-O-methyl ribonucleotide
  modified_base 81: mod_base = OTHER; note = 2'-O-methyl ribonucleotide
  modified_base 83: mod_base = OTHER; note = 2'-O-methyl ribonucleotide
  modified_base 84: mod_base = OTHER; note = 2'-O-methyl ribonucleotide
  modified_base 85: mod_base = OTHER; note = 2'-O-methyl ribonucleotide
  modified_base 86: mod_base = OTHER; note = 2'-O-methyl ribonucleotide
  modified_base 87: mod_base = OTHER; note = 2'-O-methyl ribonucleotide
  modified_base 88: mod_base = OTHER; note = 2'-O-methyl ribonucleotide
  modified_base 89: mod_base = OTHER; note = 2'-O-methyl ribonucleotide
  modified_base 90: mod_base = OTHER; note = 2'-O-methyl ribonucleotide
  modified_base 91: mod_base = OTHER; note = 2'-O-methyl ribonucleotide
  modified_base 92: mod_base = OTHER; note = 2'-O-methyl ribonucleotide
  modified_base 93: mod_base = OTHER; note = 2'-O-methyl ribonucleotide
  modified_base 94: mod_base = OTHER; note = 2'-O-methyl ribonucleotide
  modified_base 95: mod_base = OTHER; note = 2'-O-methyl ribonucleotide
  modified_base 96: mod_base = OTHER; note = 2'-O-methyl ribonucleotide
  modified_base 97: mod_base = OTHER; note = 2'-O-methyl ribonucleotide
  modified_base 98: mod_base = OTHER; note = 2'-O-methyl ribonucleotide
  modified_base 99: mod_base = OTHER; note = 2'-O-methyl ribonucleotide
  modified_base 100: mod_base = OTHER; note = 2'-O-methyl ribonucleotide
  modified_base 1..3: mod_base = OTHER; note = phosphorothioate linkage
  modified_base 64..65: mod_base = OTHER; note = phosphorothioate linkage
  modified_base 98..100: mod_base = OTHER; note = phosphorothioate linkage

SEQ ID NO: 1683 - RNA, 100 nt, synthetic construct; identical to SEQ ID NO: 422
  source 1..100: mol_type = other RNA
  modified_base 1: mod_base = OTHER; note = 2'-O-methyl ribonucleotide
  modified_base 2: mod_base = OTHER; note = 2'-O-methyl ribonucleotide
  modified_base 3: mod_base = OTHER; note = 2'-O-methyl ribonucleotide
  modified_base 21: mod_base = OTHER; note = 2'-O-methyl ribonucleotide
  modified_base 28: mod_base = OTHER; note = 2'-O-methyl ribonucleotide
  modified_base 29: mod_base = OTHER; note = 2'-O-methyl ribonucleotide
  modified_base 30: mod_base = OTHER; note = 2'-O-methyl ribonucleotide
  modified_base 31: mod_base = OTHER; note = 2'-O-methyl ribonucleotide
  modified_base 32: mod_base = OTHER; note = 2'-O-methyl ribonucleotide
  modified_base 34: mod_base = OTHER; note = 2'-O-methyl ribonucleotide
  modified_base 35: mod_base = OTHER; note = 2'-O-methyl ribonucleotide
  modified_base 36: mod_base = OTHER; note = 2'-O-methyl ribonucleotide
  modified_base 37: mod_base = OTHER; note = 2'-O-methyl ribonucleotide
  modified_base 38: mod_base = OTHER; note = 2'-O-methyl ribonucleotide
  modified_base 39: mod_base = OTHER; note = 2'-O-methyl ribonucleotide
  modified_base 40: mod_base = OTHER; note = 2'-O-methyl ribonucleotide
  modified_base 41: mod_base = OTHER; note = 2'-O-methyl ribonucleotide
  modified_base 42: mod_base = OTHER; note = 2'-O-methyl ribonucleotide
  modified_base 46: mod_base = OTHER; note = 2'-O-methyl ribonucleotide
  modified_base 48: mod_base = OTHER; note = 2'-O-methyl ribonucleotide
  modified_base 50: mod_base = OTHER; note = 2'-O-methyl ribonucleotide
  modified_base 52: mod_base = OTHER; note = 2'-O-methyl ribonucleotide
  modified_base 53: mod_base = OTHER; note = 2'-O-methyl ribonucleotide
  modified_base 54: mod_base = OTHER; note = 2'-O-methyl ribonucleotide
  modified_base 57: mod_base = OTHER; note = 2'-O-methyl ribonucleotide
  modified_base 61: mod_base = OTHER; note = 2'-O-methyl ribonucleotide
  modified_base 66: mod_base = OTHER; note = 2'-O-methyl ribonucleotide
  modified_base 67: mod_base = OTHER; note = 2'-O-methyl ribonucleotide
  modified_base 70: mod_base = OTHER; note = 2'-O-methyl ribonucleotide
  modified_base 71: mod_base = OTHER; note = 2'-O-methyl ribonucleotide
  modified_base 72: mod_base = OTHER; note = 2'-O-methyl ribonucleotide
  modified_base 74: mod_base = OTHER; note = 2'-O-methyl ribonucleotide
  modified_base 75: mod_base = OTHER; note = 2'-O-methyl ribonucleotide
  modified_base 76: mod_base = OTHER; note = 2'-O-methyl ribonucleotide
  modified_base 77: mod_base = OTHER; note = 2'-O-methyl ribonucleotide
  modified_base 78: mod_base = OTHER; note = 2'-O-methyl ribonucleotide
  modified_base 79: mod_base = OTHER; note = 2'-O-methyl ribonucleotide
  modified_base 80: mod_base = OTHER; note = 2'-O-methyl ribonucleotide
  modified_base 82: mod_base = OTHER; note = 2'-O-methyl ribonucleotide
  modified_base 83: mod_base = OTHER; note = 2'-O-methyl ribonucleotide
  modified_base 84: mod_base = OTHER; note = 2'-O-methyl ribonucleotide
  modified_base 85: mod_base = OTHER; note = 2'-O-methyl ribonucleotide
  modified_base 86: mod_base = OTHER; note = 2'-O-methyl ribonucleotide
  modified_base 87: mod_base = OTHER; note = 2'-O-methyl ribonucleotide
  modified_base 89: mod_base = OTHER; note = 2'-O-methyl ribonucleotide
  modified_base 92: mod_base = OTHER; note = 2'-O-methyl ribonucleotide
  modified_base 93: mod_base = OTHER; note = 2'-O-methyl ribonucleotide
  modified_base 94: mod_base = OTHER; note = 2'-O-methyl ribonucleotide
  modified_base 95: mod_base = OTHER; note = 2'-O-methyl ribonucleotide
  modified_base 96: mod_base = OTHER; note = 2'-O-methyl ribonucleotide
  modified_base 97: mod_base = OTHER; note = 2'-O-methyl ribonucleotide
  modified_base 98: mod_base = OTHER; note = 2'-O-methyl ribonucleotide
  modified_base 99: mod_base = OTHER; note = 2'-O-methyl ribonucleotide
  modified_base 100: mod_base = OTHER; note = 2'-O-methyl ribonucleotide
  modified_base 1..3: mod_base = OTHER; note = phosphorothioate linkage
  modified_base 64..65: mod_base = OTHER; note = phosphorothioate linkage
  modified_base 98..100: mod_base = OTHER; note = phosphorothioate linkage

SEQ ID NO: 1684 - RNA, 100 nt, synthetic construct; identical to SEQ ID NO: 55
  source 1..100: mol_type = other RNA
  modified_base 1: mod_base = OTHER; note = 2'-O-methyl ribonucleotide
  modified_base 2: mod_base = OTHER; note = 2'-O-methyl ribonucleotide
  modified_base 3: mod_base = OTHER; note = 2'-O-methyl ribonucleotide
  modified_base 21: mod_base = OTHER; note = 2'-O-methyl ribonucleotide
  modified_base 28: mod_base = OTHER; note = 2'-O-methyl ribonucleotide
  modified_base 29: mod_base = OTHER; note = 2'-O-methyl ribonucleotide
  modified_base 30: mod_base = OTHER; note = 2'-O-methyl ribonucleotide
  modified_base 31: mod_base = OTHER; note = 2'-O-methyl ribonucleotide
  modified_base 32: mod_base = OTHER; note = 2'-O-methyl ribonucleotide
  modified_base 34: mod_base = OTHER; note = 2'-O-methyl ribonucleotide
  modified_base 35: mod_base = OTHER; note = 2'-O-methyl ribonucleotide
  modified_base 36: mod_base = OTHER; note = 2'-O-methyl ribonucleotide
  modified_base 37: mod_base = OTHER; note = 2'-O-methyl ribonucleotide
  modified_base 38: mod_base = OTHER; note = 2'-O-methyl ribonucleotide
  modified_base 39: mod_base = OTHER; note = 2'-O-methyl ribonucleotide
  modified_base 40: mod_base = OTHER; note = 2'-O-methyl ribonucleotide
  modified_base 41: mod_base = OTHER; note = 2'-O-methyl ribonucleotide
  modified_base 42: mod_base = OTHER; note = 2'-O-methyl ribonucleotide
  modified_base 46: mod_base = OTHER; note = 2'-O-methyl ribonucleotide
  modified_base 48: mod_base = OTHER; note = 2'-O-methyl ribonucleotide
  modified_base 50: mod_base = OTHER; note = 2'-O-methyl ribonucleotide
  modified_base 52: mod_base = OTHER; note = 2'-O-methyl ribonucleotide
  modified_base 53: mod_base = OTHER; note = 2'-O-methyl ribonucleotide
  modified_base 54: mod_base = OTHER; note = 2'-O-methyl ribonucleotide
  modified_base 55: mod_base = OTHER; note = 2'-O-methyl ribonucleotide
  modified_base 56: mod_base = OTHER; note = 2'-O-methyl ribonucleotide
  modified_base 57: mod_base = OTHER; note = 2'-O-methyl ribonucleotide
  modified_base 60: mod_base = OTHER; note = 2'-O-methyl ribonucleotide
  modified_base 61: mod_base = OTHER; note = 2'-O-methyl ribonucleotide
  modified_base 66: mod_base = OTHER; note = 2'-O-methyl ribonucleotide
  modified_base 67: mod_base = OTHER; note = 2'-O-methyl ribonucleotide
  modified_base 70: mod_base = OTHER; note = 2'-O-methyl ribonucleotide
  modified_base 71: mod_base = OTHER; note = 2'-O-methyl ribonucleotide
  modified_base 72: mod_base = OTHER; note = 2'-O-methyl ribonucleotide
  modified_base 74: mod_base = OTHER; note = 2'-O-methyl ribonucleotide
  modified_base 75: mod_base = OTHER; note = 2'-O-methyl ribonucleotide
  modified_base 76: mod_base = OTHER; note = 2'-O-methyl ribonucleotide
  modified_base 77: mod_base = OTHER; note = 2'-O-methyl ribonucleotide
  modified_base 78: mod_base = OTHER; note = 2'-O-methyl ribonucleotide
  modified_base 79: mod_base = OTHER; note = 2'-O-methyl ribonucleotide
  modified_base 80: mod_base = OTHER; note = 2'-O-methyl ribonucleotide
  modified_base 81: mod_base = OTHER; note = 2'-O-methyl ribonucleotide
  modified_base 83: mod_base = OTHER; note = 2'-O-methyl ribonucleotide
  modified_base 84: mod_base = OTHER; note = 2'-O-methyl ribonucleotide
  modified_base 85: mod_base = OTHER; note = 2'-O-methyl ribonucleotide
  modified_base 86: mod_base = OTHER; note = 2'-O-methyl ribonucleotide
  modified_base 87: mod_base = OTHER; note = 2'-O-methyl ribonucleotide
  modified_base 88: mod_base = OTHER; note = 2'-O-methyl ribonucleotide
  modified_base 89: mod_base = OTHER; note = 2'-O-methyl ribonucleotide
  modified_base 90: mod_base = OTHER; note = 2'-O-methyl ribonucleotide
  modified_base 91: mod_base = OTHER; note = 2'-O-methyl ribonucleotide
  modified_base 92: mod_base = OTHER; note = 2'-O-methyl ribonucleotide
  modified_base 93: mod_base = OTHER; note = 2'-O-methyl ribonucleotide
  modified_base 94: mod_base = OTHER; note = 2'-O-methyl ribonucleotide
  modified_base 95: mod_base = OTHER; note = 2'-O-methyl ribonucleotide
  modified_base 96: mod_base = OTHER; note = 2'-O-methyl ribonucleotide
  modified_base 97: mod_base = OTHER; note = 2'-O-methyl ribonucleotide
  modified_base 98: mod_base = OTHER; note = 2'-O-methyl ribonucleotide
  modified_base 99: mod_base = OTHER; note = 2'-O-methyl ribonucleotide
  modified_base 100: mod_base = OTHER; note = 2'-O-methyl ribonucleotide
  modified_base 1..3: mod_base = OTHER; note = phosphorothioate linkage
  modified_base 64..65: mod_base = OTHER; note = phosphorothioate linkage
  modified_base 98..100: mod_base = OTHER; note = phosphorothioate linkage

SEQ ID NO: 1685 - RNA, 100 nt, synthetic construct; identical to SEQ ID NO: 421
  source 1..100: mol_type = other RNA
  modified_base 1: mod_base = OTHER; note = 2'-O-methyl ribonucleotide
  modified_base 2: mod_base = OTHER; note = 2'-O-methyl ribonucleotide
  modified_base 3: mod_base = OTHER; note = 2'-O-methyl ribonucleotide
  modified_base 21: mod_base = OTHER; note = 2'-O-methyl ribonucleotide
  modified_base 28: mod_base = OTHER; note = 2'-O-methyl ribonucleotide
  modified_base 29: mod_base = OTHER; note = 2'-O-methyl ribonucleotide
  modified_base 30: mod_base = OTHER; note = 2'-O-methyl ribonucleotide
  modified_base 31: mod_base = OTHER; note = 2'-O-methyl ribonucleotide
  modified_base 32: mod_base = OTHER; note = 2'-O-methyl ribonucleotide
  modified_base 34: mod_base = OTHER; note = 2'-O-methyl ribonucleotide
  modified_base 35: mod_base = OTHER; note = 2'-O-methyl ribonucleotide
  modified_base 36: mod_base = OTHER; note = 2'-O-methyl ribonucleotide
  modified_base 37: mod_base = OTHER; note = 2'-O-methyl ribonucleotide
  modified_base 38: mod_base = OTHER; note = 2'-O-methyl ribonucleotide
  modified_base 39: mod_base = OTHER; note = 2'-O-methyl ribonucleotide
  modified_base 40: mod_base = OTHER; note = 2'-O-methyl ribonucleotide
  modified_base 41: mod_base = OTHER; note = 2'-O-methyl ribonucleotide
  modified_base 42: mod_base = OTHER; note = 2'-O-methyl ribonucleotide
  modified_base 46: mod_base = OTHER; note = 2'-O-methyl ribonucleotide
  modified_base 48: mod_base = OTHER; note = 2'-O-methyl ribonucleotide
  modified_base 50: mod_base = OTHER; note = 2'-O-methyl ribonucleotide
  modified_base 52: mod_base = OTHER; note = 2'-O-methyl ribonucleotide
  modified_base 53: mod_base = OTHER; note = 2'-O-methyl ribonucleotide
  modified_base 54: mod_base = OTHER; note = 2'-O-methyl ribonucleotide
  modified_base 57: mod_base = OTHER; note = 2'-O-methyl ribonucleotide
  modified_base 61: mod_base = OTHER; note = 2'-O-methyl ribonucleotide
  modified_base 66: mod_base = OTHER; note = 2'-O-methyl ribonucleotide
  modified_base 67: mod_base = OTHER; note = 2'-O-methyl ribonucleotide
  modified_base 70: mod_base = OTHER; note = 2'-O-methyl ribonucleotide
  modified_base 71: mod_base = OTHER; note = 2'-O-methyl ribonucleotide
  modified_base 72: mod_base = OTHER; note = 2'-O-methyl ribonucleotide
  modified_base 74: mod_base = OTHER; note = 2'-O-methyl ribonucleotide
  modified_base 75: mod_base = OTHER; note = 2'-O-methyl ribonucleotide
  modified_base 76: mod_base = OTHER; note = 2'-O-methyl ribonucleotide
  modified_base 77: mod_base = OTHER; note = 2'-O-methyl ribonucleotide
  modified_base 78: mod_base = OTHER; note = 2'-O-methyl ribonucleotide
  modified_base 79: mod_base = OTHER; note = 2'-O-methyl ribonucleotide
  modified_base 80: mod_base = OTHER; note = 2'-O-methyl ribonucleotide
  modified_base 82: mod_base = OTHER; note = 2'-O-methyl ribonucleotide
  modified_base 83: mod_base = OTHER; note = 2'-O-methyl ribonucleotide
  modified_base 84: mod_base = OTHER; note = 2'-O-methyl ribonucleotide
  modified_base 85: mod_base = OTHER; note = 2'-O-methyl ribonucleotide
  modified_base 86: mod_base = OTHER; note = 2'-O-methyl ribonucleotide
  modified_base 87: mod_base = OTHER; note = 2'-O-methyl ribonucleotide
  modified_base 89: mod_base = OTHER; note = 2'-O-methyl ribonucleotide
  modified_base 92: mod_base = OTHER; note = 2'-O-methyl ribonucleotide
  modified_base 93: mod_base = OTHER; note = 2'-O-methyl ribonucleotide
  modified_base 94: mod_base = OTHER; note = 2'-O-methyl ribonucleotide
  modified_base 95: mod_base = OTHER; note = 2'-O-methyl ribonucleotide
  modified_base 96: mod_base = OTHER; note = 2'-O-methyl ribonucleotide
  modified_base 97: mod_base = OTHER; note = 2'-O-methyl ribonucleotide
  modified_base 98: mod_base = OTHER; note = 2'-O-methyl ribonucleotide
  modified_base 99: mod_base = OTHER; note = 2'-O-methyl ribonucleotide
  modified_base 100: mod_base = OTHER; note = 2'-O-methyl ribonucleotide
  modified_base 1..3: mod_base = OTHER; note = phosphorothioate linkage
  modified_base 45..46: mod_base = OTHER; note = phosphorothioate linkage
  modified_base 98..100: mod_base = OTHER; note = phosphorothioate linkage

SEQ ID NO: 1686 - RNA, 100 nt, synthetic construct; identical to SEQ ID NO: 422
  source 1..100: mol_type = other RNA
  modified_base 1: mod_base = OTHER; note = 2'-O-methyl ribonucleotide
  modified_base 2: mod_base = OTHER; note = 2'-O-methyl ribonucleotide
  modified_base 3: mod_base = OTHER; note = 2'-O-methyl ribonucleotide
  modified_base 21: mod_base = OTHER; note = 2'-O-methyl ribonucleotide
  modified_base 28: mod_base = OTHER; note = 2'-O-methyl ribonucleotide
  modified_base 29: mod_base = OTHER; note = 2'-O-methyl ribonucleotide
  modified_base 30: mod_base = OTHER; note = 2'-O-methyl ribonucleotide
  modified_base 31: mod_base = OTHER; note = 2'-O-methyl ribonucleotide
  modified_base 32: mod_base = OTHER; note = 2'-O-methyl ribonucleotide
  modified_base 34: mod_base = OTHER; note = 2'-O-methyl ribonucleotide
  modified_base 35: mod_base = OTHER; note = 2'-O-methyl ribonucleotide
  modified_base 36: mod_base = OTHER; note = 2'-O-methyl ribonucleotide
  modified_base 37: mod_base = OTHER; note = 2'-O-methyl ribonucleotide
  modified_base 38: mod_base = OTHER; note = 2'-O-methyl ribonucleotide
  modified_base 39: mod_base = OTHER; note = 2'-O-methyl ribonucleotide
  modified_base 40: mod_base = OTHER; note = 2'-O-methyl ribonucleotide
  modified_base 41: mod_base = OTHER; note = 2'-O-methyl ribonucleotide
  modified_base 42: mod_base = OTHER; note = 2'-O-methyl ribonucleotide
  modified_base 46: mod_base = OTHER; note = 2'-O-methyl ribonucleotide
  modified_base 48: mod_base = OTHER; note = 2'-O-methyl ribonucleotide
  modified_base 50: mod_base = OTHER; note = 2'-O-methyl ribonucleotide
  modified_base 52: mod_base = OTHER; note = 2'-O-methyl ribonucleotide
  modified_base 53: mod_base = OTHER; note = 2'-O-methyl ribonucleotide
  modified_base 54: mod_base = OTHER; note = 2'-O-methyl ribonucleotide
  modified_base 57: mod_base = OTHER; note = 2'-O-methyl ribonucleotide
  modified_base 61: mod_base = OTHER; note = 2'-O-methyl ribonucleotide
  modified_base 66: mod_base = OTHER; note = 2'-O-methyl ribonucleotide
  modified_base 67: mod_base = OTHER; note = 2'-O-methyl ribonucleotide
  modified_base 70: mod_base = OTHER; note = 2'-O-methyl ribonucleotide
  modified_base 71: mod_base = OTHER; note = 2'-O-methyl ribonucleotide
  modified_base 72: mod_base = OTHER; note = 2'-O-methyl ribonucleotide
  modified_base 74: mod_base = OTHER; note = 2'-O-methyl ribonucleotide
  modified_base 75: mod_base = OTHER; note = 2'-O-methyl ribonucleotide
  modified_base 76: mod_base = OTHER; note = 2'-O-methyl ribonucleotide
  modified_base 77: mod_base = OTHER; note = 2'-O-methyl ribonucleotide
  modified_base 78: mod_base = OTHER; note = 2'-O-methyl ribonucleotide
  modified_base 79: mod_base = OTHER; note = 2'-O-methyl ribonucleotide
  modified_base 80: mod_base = OTHER; note = 2'-O-methyl ribonucleotide
  modified_base 82: mod_base = OTHER; note = 2'-O-methyl ribonucleotide
  modified_base 83: mod_base = OTHER; note = 2'-O-methyl ribonucleotide
  modified_base 84: mod_base = OTHER; note = 2'-O-methyl ribonucleotide
  modified_base 85: mod_base = OTHER; note = 2'-O-methyl ribonucleotide
  modified_base 86: mod_base = OTHER; note = 2'-O-methyl ribonucleotide
  modified_base 87: mod_base = OTHER; note = 2'-O-methyl ribonucleotide
  modified_base 89: mod_base = OTHER; note = 2'-O-methyl ribonucleotide
  modified_base 92: mod_base = OTHER; note = 2'-O-methyl ribonucleotide
  modified_base 93: mod_base = OTHER; note = 2'-O-methyl ribonucleotide
  modified_base 94: mod_base = OTHER; note = 2'-O-methyl ribonucleotide
  modified_base 95: mod_base = OTHER; note = 2'-O-methyl ribonucleotide
  modified_base 96: mod_base = OTHER; note = 2'-O-methyl ribonucleotide
  modified_base 97: mod_base = OTHER; note = 2'-O-methyl ribonucleotide
  modified_base 98: mod_base = OTHER; note = 2'-O-methyl ribonucleotide
  modified_base 99: mod_base = OTHER; note = 2'-O-methyl ribonucleotide
  modified_base 100: mod_base = OTHER; note = 2'-O-methyl ribonucleotide
  modified_base 1..3: mod_base = OTHER; note = phosphorothioate linkage
  modified_base 45..46: mod_base = OTHER; note = phosphorothioate linkage
  modified_base 98..100: mod_base = OTHER; note = phosphorothioate linkage

SEQ ID NO: 1687 - RNA, 100 nt, synthetic construct; identical to SEQ ID NO: 55
  source 1..100: mol_type = other RNA
  modified_base 1: mod_base = OTHER; note = 2'-O-methyl ribonucleotide
  modified_base 2: mod_base = OTHER; note = 2'-O-methyl ribonucleotide
  modified_base 3: mod_base = OTHER; note = 2'-O-methyl ribonucleotide
  modified_base 21: mod_base = OTHER; note = 2'-O-methyl ribonucleotide
  modified_base 28: mod_base = OTHER; note = 2'-O-methyl ribonucleotide
  modified_base 29: mod_base = OTHER; note = 2'-O-methyl ribonucleotide
  modified_base 30: mod_base = OTHER; note = 2'-O-methyl ribonucleotide
  modified_base 31: mod_base = OTHER; note = 2'-O-methyl ribonucleotide
  modified_base 32: mod_base = OTHER; note = 2'-O-methyl ribonucleotide
  modified_base 34: mod_base = OTHER; note = 2'-O-methyl ribonucleotide
  modified_base 35: mod_base = OTHER; note = 2'-O-methyl ribonucleotide
  modified_base 36: mod_base = OTHER; note = 2'-O-methyl ribonucleotide
  modified_base 37: mod_base = OTHER; note = 2'-O-methyl ribonucleotide
  modified_base 38: mod_base = OTHER; note = 2'-O-methyl ribonucleotide
  modified_base 39: mod_base = OTHER; note = 2'-O-methyl ribonucleotide
  modified_base 40: mod_base = OTHER; note = 2'-O-methyl ribonucleotide
  modified_base 41: mod_base = OTHER; note = 2'-O-methyl ribonucleotide
  modified_base 42: mod_base = OTHER; note = 2'-O-methyl ribonucleotide
  modified_base 46: mod_base = OTHER; note = 2'-O-methyl ribonucleotide
  modified_base 48: mod_base = OTHER; note = 2'-O-methyl ribonucleotide
  modified_base 50: mod_base = OTHER; note = 2'-O-methyl ribonucleotide
  modified_base 52: mod_base = OTHER; note = 2'-O-methyl ribonucleotide
  modified_base 53: mod_base = OTHER; note = 2'-O-methyl ribonucleotide
  modified_base 54: mod_base = OTHER; note = 2'-O-methyl ribonucleotide
  modified_base 55: mod_base = OTHER; note = 2'-O-methyl ribonucleotide
  modified_base 56: mod_base = OTHER; note = 2'-O-methyl ribonucleotide
  modified_base 57: mod_base = OTHER; note = 2'-O-methyl ribonucleotide
  modified_base 60: mod_base = OTHER; note = 2'-O-methyl ribonucleotide
  modified_base 61: mod_base = OTHER; note = 2'-O-methyl ribonucleotide
  modified_base 66: mod_base = OTHER; note = 2'-O-methyl ribonucleotide
  modified_base 67: mod_base = OTHER; note = 2'-O-methyl ribonucleotide
  modified_base 70: mod_base = OTHER; note = 2'-O-methyl ribonucleotide
  modified_base 71: mod_base = OTHER; note = 2'-O-methyl ribonucleotide
  modified_base 72: mod_base = OTHER; note = 2'-O-methyl ribonucleotide
  modified_base 74: mod_base = OTHER; note = 2'-O-methyl ribonucleotide
  modified_base 75: mod_base = OTHER; note = 2'-O-methyl ribonucleotide
  modified_base 76: mod_base = OTHER; note = 2'-O-methyl ribonucleotide
  modified_base 77: mod_base = OTHER; note = 2'-O-methyl ribonucleotide
  modified_base 78: mod_base = OTHER; note = 2'-O-methyl ribonucleotide
  modified_base 79: mod_base = OTHER; note = 2'-O-methyl ribonucleotide
  modified_base 80: mod_base = OTHER; note = 2'-O-methyl ribonucleotide
  modified_base 81: mod_base = OTHER; note = 2'-O-methyl ribonucleotide
  modified_base 83: mod_base = OTHER; note = 2'-O-methyl ribonucleotide
  modified_base 84: mod_base = OTHER; note = 2'-O-methyl ribonucleotide
  modified_base 85: mod_base = OTHER; note = 2'-O-methyl ribonucleotide
  modified_base 86: mod_base = OTHER; note = 2'-O-methyl ribonucleotide
  modified_base 87: mod_base = OTHER; note = 2'-O-methyl ribonucleotide
  modified_base 88: mod_base = OTHER; note = 2'-O-methyl ribonucleotide
  modified_base 89: mod_base = OTHER; note = 2'-O-methyl ribonucleotide
  modified_base 90: mod_base = OTHER; note = 2'-O-methyl ribonucleotide
  modified_base 91: mod_base = OTHER; note = 2'-O-methyl ribonucleotide
  modified_base 92: mod_base = OTHER; note = 2'-O-methyl ribonucleotide
  modified_base 93: mod_base = OTHER; note = 2'-O-methyl ribonucleotide
  modified_base 94: mod_base = OTHER; note = 2'-O-methyl ribonucleotide
  modified_base 95: mod_base = OTHER; note = 2'-O-methyl ribonucleotide
  modified_base 96: mod_base = OTHER; note = 2'-O-methyl ribonucleotide
  modified_base 97: mod_base = OTHER; note = 2'-O-methyl ribonucleotide
  modified_base 98: mod_base = OTHER; note = 2'-O-methyl ribonucleotide
  modified_base 99: mod_base = OTHER; note = 2'-O-methyl ribonucleotide
  modified_base 100: mod_base = OTHER; note = 2'-O-methyl ribonucleotide
  modified_base 1..3: mod_base = OTHER; note = phosphorothioate linkage
  modified_base 45..46: mod_base = OTHER; note = phosphorothioate linkage
  modified_base 98..100: mod_base = OTHER; note = phosphorothioate linkage

SEQ ID NO: 1688 - RNA, 100 nt, synthetic construct; identical to SEQ ID NO: 55
  source 1..100: mol_type = other RNA
  modified_base 1: mod_base = OTHER; note = 2'-O-methyl ribonucleotide
  modified_base 2: mod_base = OTHER; note = 2'-O-methyl ribonucleotide
  modified_base 3: mod_base = OTHER; note = 2'-O-methyl ribonucleotide
  modified_base 21: mod_base = OTHER; note = 2'-O-methyl ribonucleotide
  modified_base 28: mod_base = OTHER; note = 2'-O-methyl ribonucleotide
  modified_base 29: mod_base = OTHER; note = 2'-O-methyl ribonucleotide
  modified_base 30: mod_base = OTHER; note = 2'-O-methyl ribonucleotide
  modified_base 31: mod_base = OTHER; note = 2'-O-methyl ribonucleotide
  modified_base 32: mod_base = OTHER; note = 2'-O-methyl ribonucleotide
  modified_base 33: mod_base = OTHER; note = 2'-O-methyl ribonucleotide
  modified_base 34: mod_base = OTHER; note = 2'-O-methyl ribonucleotide
  modified_base 35: mod_base = OTHER; note = 2'-O-methyl ribonucleotide
  modified_base 36: mod_base = OTHER; note = 2'-O-methyl ribonucleotide
  modified_base 37: mod_base = OTHER; note = 2'-O-methyl ribonucleotide
  modified_base 38: mod_base = OTHER; note = 2'-O-methyl ribonucleotide
  modified_base 39: mod_base = OTHER; note = 2'-O-methyl ribonucleotide
  modified_base 40: mod_base = OTHER; note = 2'-O-methyl ribonucleotide
  modified_base 41: mod_base = OTHER; note = 2'-O-methyl ribonucleotide
  modified_base 42: mod_base = OTHER; note = 2'-O-methyl ribonucleotide
  modified_base 46: mod_base = OTHER; note = 2'-O-methyl ribonucleotide
  modified_base 48: mod_base = OTHER; note = 2'-O-methyl ribonucleotide
  modified_base 50: mod_base = OTHER; note = 2'-O-methyl ribonucleotide
  modified_base 52: mod_base = OTHER; note = 2'-O-methyl ribonucleotide
  modified_base 53: mod_base = OTHER; note = 2'-O-methyl ribonucleotide
  modified_base 54: mod_base = OTHER; note = 2'-O-methyl ribonucleotide
  modified_base 57: mod_base = OTHER; note = 2'-O-methyl ribonucleotide
  modified_base 61: mod_base = OTHER; note = 2'-O-methyl ribonucleotide
  modified_base 66: mod_base = OTHER; note = 2'-O-methyl ribonucleotide
  modified_base 67: mod_base = OTHER; note = 2'-O-methyl ribonucleotide
  modified_base 70: mod_base = OTHER; note = 2'-O-methyl ribonucleotide
  modified_base 71: mod_base = OTHER; note = 2'-O-methyl ribonucleotide
  modified_base 72: mod_base = OTHER; note = 2'-O-methyl ribonucleotide
  modified_base 73: mod_base = OTHER; note = 2'-O-methyl ribonucleotide
  modified_base 74: mod_base = OTHER; note = 2'-O-methyl ribonucleotide
  modified_base 75: mod_base = OTHER; note = 2'-O-methyl ribonucleotide
  modified_base 76: mod_base = OTHER; note = 2'-O-methyl ribonucleotide
  modified_base 77: mod_base = OTHER; note = 2'-O-methyl ribonucleotide
  modified_base 78: mod_base = OTHER; note = 2'-O-methyl ribonucleotide
  modified_base 79: mod_base = OTHER; note = 2'-O-methyl ribonucleotide
  modified_base 80: mod_base = OTHER; note = 2'-O-methyl ribonucleotide
  modified_base 82: mod_base = OTHER; note = 2'-O-methyl ribonucleotide
  modified_base 83: mod_base = OTHER; note = 2'-O-methyl ribonucleotide
  modified_base 84: mod_base = OTHER; note = 2'-O-methyl ribonucleotide
  modified_base 85: mod_base = OTHER; note = 2'-O-methyl ribonucleotide
  modified_base 86: mod_base = OTHER; note = 2'-O-methyl ribonucleotide
  modified_base 87: mod_base = OTHER; note = 2'-O-methyl ribonucleotide
  modified_base 89: mod_base = OTHER; note = 2'-O-methyl ribonucleotide
  modified_base 92: mod_base = OTHER; note = 2'-O-methyl ribonucleotide
  modified_base 93: mod_base = OTHER; note = 2'-O-methyl ribonucleotide
  modified_base 94: mod_base = OTHER; note = 2'-O-methyl ribonucleotide
  modified_base 95: mod_base = OTHER; note = 2'-O-methyl ribonucleotide
  modified_base 96: mod_base = OTHER; note = 2'-O-methyl ribonucleotide
  modified_base 97: mod_base = OTHER; note = 2'-O-methyl ribonucleotide
  modified_base 98: mod_base = OTHER; note = 2'-O-methyl ribonucleotide
  modified_base 99: mod_base = OTHER; note = 2'-O-methyl ribonucleotide
  modified_base 100: mod_base = OTHER; note = 2'-O-methyl ribonucleotide
  modified_base 1..3: mod_base = OTHER; note = phosphorothioate linkage
  modified_base 45..46: mod_base = OTHER; note = phosphorothioate linkage
  modified_base 97..100: mod_base = OTHER; note = phosphorothioate linkage

SEQ ID NO: 1689 - RNA, 100 nt, synthetic construct; identical to SEQ ID NO: 421
  source 1..100: mol_type = other RNA
  modified_base 1: mod_base = OTHER; note = 2'-O-methyl ribonucleotide
  modified_base 2: mod_base = OTHER; note = 2'-O-methyl ribonucleotide
  modified_base 3: mod_base = OTHER; note = 2'-O-methyl ribonucleotide
  modified_base 21: mod_base = OTHER; note = 2'-O-methyl ribonucleotide
  modified_base 28: mod_base = OTHER; note = 2'-O-methyl ribonucleotide
  modified_base 29: mod_base = OTHER; note = 2'-O-methyl ribonucleotide
  modified_base 30: mod_base = OTHER; note = 2'-O-methyl ribonucleotide
  modified_base 31: mod_base = OTHER; note = 2'-O-methyl ribonucleotide
  modified_base 32: mod_base = OTHER; note = 2'-O-methyl ribonucleotide
  modified_base 34: mod_base = OTHER; note = 2'-O-methyl ribonucleotide
  modified_base 35: mod_base = OTHER; note = 2'-O-methyl ribonucleotide
  modified_base 36: mod_base = OTHER; note = 2'-O-methyl ribonucleotide
  modified_base 37: mod_base = OTHER; note = 2'-O-methyl ribonucleotide
  modified_base 38: mod_base = OTHER; note = 2'-O-methyl ribonucleotide
  modified_base 39: mod_base = OTHER; note = 2'-O-methyl ribonucleotide
  modified_base 40: mod_base = OTHER; note = 2'-O-methyl ribonucleotide
  modified_base 41: mod_base = OTHER; note = 2'-O-methyl ribonucleotide
  modified_base 42: mod_base = OTHER; note = 2'-O-methyl ribonucleotide
  modified_base 46: mod_base = OTHER; note = 2'-O-methyl ribonucleotide
  modified_base 48: mod_base = OTHER; note = 2'-O-methyl ribonucleotide
  modified_base 50: mod_base = OTHER; note = 2'-O-methyl ribonucleotide
  modified_base 52: mod_base = OTHER; note = 2'-O-methyl ribonucleotide
  modified_base 53: mod_base = OTHER; note = 2'-O-methyl ribonucleotide
  modified_base 54: mod_base = OTHER; note = 2'-O-methyl ribonucleotide
  modified_base 57: mod_base = OTHER; note = 2'-O-methyl ribonucleotide
  modified_base 61: mod_base = OTHER; note = 2'-O-methyl ribonucleotide
  modified_base 66: mod_base = OTHER; note = 2'-O-methyl ribonucleotide
  modified_base 67: mod_base = OTHER; note = 2'-O-methyl ribonucleotide
  modified_base 70: mod_base = OTHER; note = 2'-O-methyl ribonucleotide
  modified_base 71: mod_base = OTHER; note = 2'-O-methyl ribonucleotide
  modified_base 72: mod_base = OTHER; note = 2'-O-methyl ribonucleotide
  modified_base 74: mod_base = OTHER; note = 2'-O-methyl ribonucleotide
  modified_base 75: mod_base = OTHER; note = 2'-O-methyl ribonucleotide
  modified_base 76: mod_base = OTHER; note = 2'-O-methyl ribonucleotide
  modified_base 77: mod_base = OTHER; note = 2'-O-methyl ribonucleotide
  modified_base 78: mod_base = OTHER; note = 2'-O-methyl ribonucleotide
  modified_base 79: mod_base = OTHER; note = 2'-O-methyl ribonucleotide
  modified_base 80: mod_base = OTHER; note = 2'-O-methyl ribonucleotide
  modified_base 82: mod_base = OTHER; note = 2'-O-methyl ribonucleotide
  modified_base 83: mod_base = OTHER; note = 2'-O-methyl ribonucleotide
  modified_base 84: mod_base = OTHER; note = 2'-O-methyl ribonucleotide
  modified_base 85: mod_base = OTHER; note = 2'-O-methyl ribonucleotide
  modified_base 86: mod_base = OTHER; note = 2'-O-methyl ribonucleotide
  modified_base 87: mod_base = OTHER; note = 2'-O-methyl ribonucleotide
  modified_base 89: mod_base = OTHER; note = 2'-O-methyl ribonucleotide
  modified_base 92: mod_base = OTHER; note = 2'-O-methyl ribonucleotide
  modified_base 93: mod_base = OTHER; note = 2'-O-methyl ribonucleotide
  modified_base 94: mod_base = OTHER; note = 2'-O-methyl ribonucleotide
  modified_base 95: mod_base = OTHER; note = 2'-O-methyl ribonucleotide
  modified_base 96: mod_base = OTHER; note = 2'-O-methyl ribonucleotide
  modified_base 97: mod_base = OTHER; note = 2'-O-methyl ribonucleotide
  modified_base 98: mod_base = OTHER; note = 2'-O-methyl ribonucleotide
  modified_base 99: mod_base = OTHER; note = 2'-O-methyl ribonucleotide
  modified_base 100: mod_base = OTHER; note = 2'-O-methyl ribonucleotide
  modified_base 1..3: mod_base = OTHER; note = phosphorothioate linkage
  modified_base 25..26: mod_base = OTHER; note = phosphorothioate linkage
  modified_base 98..100: mod_base = OTHER; note = phosphorothioate linkage

SEQ ID NO: 1690 - RNA, 100 nt, synthetic construct; identical to SEQ ID NO: 422
  source 1..100: mol_type = other RNA
  modified_base 1: mod_base = OTHER; note = 2'-O-methyl ribonucleotide
  modified_base 2: mod_base = OTHER; note = 2'-O-methyl ribonucleotide
  modified_base 3: mod_base = OTHER; note = 2'-O-methyl ribonucleotide
  modified_base 21: mod_base = OTHER; note = 2'-O-methyl ribonucleotide
  modified_base 28: mod_base = OTHER; note = 2'-O-methyl ribonucleotide
  modified_base 29: mod_base = OTHER; note = 2'-O-methyl ribonucleotide
  modified_base 30: mod_base = OTHER; note = 2'-O-methyl ribonucleotide
  modified_base 31: mod_base = OTHER; note = 2'-O-methyl ribonucleotide
  modified_base 32: mod_base = OTHER; note = 2'-O-methyl ribonucleotide
  modified_base 34: mod_base = OTHER; note = 2'-O-methyl ribonucleotide
  modified_base 35: mod_base = OTHER; note = 2'-O-methyl ribonucleotide
  modified_base 36: mod_base = OTHER; note = 2'-O-methyl ribonucleotide
  modified_base 37: mod_base = OTHER; note = 2'-O-methyl ribonucleotide
  modified_base 38: mod_base = OTHER; note = 2'-O-methyl ribonucleotide
  modified_base 39: mod_base = OTHER; note = 2'-O-methyl ribonucleotide
  modified_base 40: mod_base = OTHER; note = 2'-O-methyl ribonucleotide
  modified_base 41: mod_base = OTHER; note = 2'-O-methyl ribonucleotide
  modified_base 42: mod_base = OTHER; note = 2'-O-methyl ribonucleotide
  modified_base 46: mod_base = OTHER; note = 2'-O-methyl ribonucleotide
  modified_base 48: mod_base = OTHER; note = 2'-O-methyl ribonucleotide
  modified_base 50: mod_base = OTHER; note = 2'-O-methyl ribonucleotide
  modified_base 52: mod_base = OTHER; note = 2'-O-methyl ribonucleotide
  modified_base 53: mod_base = OTHER; note = 2'-O-methyl ribonucleotide
  modified_base 54: mod_base = OTHER; note = 2'-O-methyl ribonucleotide
  modified_base 57: mod_base = OTHER; note = 2'-O-methyl ribonucleotide
  modified_base 61: mod_base = OTHER; note = 2'-O-methyl ribonucleotide
  modified_base 66: mod_base = OTHER; note = 2'-O-methyl ribonucleotide
  modified_base 67: mod_base = OTHER; note = 2'-O-methyl ribonucleotide
  modified_base 70: mod_base = OTHER; note = 2'-O-methyl ribonucleotide
  modified_base 71: mod_base = OTHER; note = 2'-O-methyl ribonucleotide
  modified_base 72: mod_base = OTHER; note = 2'-O-methyl ribonucleotide
  modified_base 74: mod_base = OTHER; note = 2'-O-methyl ribonucleotide
  modified_base 75: mod_base = OTHER; note = 2'-O-methyl ribonucleotide
  modified_base 76: mod_base = OTHER; note = 2'-O-methyl ribonucleotide
  modified_base 77: mod_base = OTHER; note = 2'-O-methyl ribonucleotide
  modified_base 78: mod_base = OTHER; note = 2'-O-methyl ribonucleotide
  modified_base 79: mod_base = OTHER; note = 2'-O-methyl ribonucleotide
  modified_base 80: mod_base = OTHER; note = 2'-O-methyl ribonucleotide
  modified_base 82: mod_base = OTHER; note = 2'-O-methyl ribonucleotide
  modified_base 83: mod_base = OTHER; note = 2'-O-methyl ribonucleotide
  modified_base 84: mod_base = OTHER; note = 2'-O-methyl ribonucleotide
  modified_base 85: mod_base = OTHER; note = 2'-O-methyl ribonucleotide
  modified_base 86: mod_base = OTHER; note = 2'-O-methyl ribonucleotide
  modified_base 87: mod_base = OTHER; note = 2'-O-methyl ribonucleotide
  modified_base 89: mod_base = OTHER; note = 2'-O-methyl ribonucleotide
  modified_base 92: mod_base = OTHER; note = 2'-O-methyl ribonucleotide
  modified_base 93: mod_base = OTHER; note = 2'-O-methyl ribonucleotide
  modified_base 94: mod_base = OTHER; note = 2'-O-methyl ribonucleotide
  modified_base 95: mod_base = OTHER; note = 2'-O-methyl ribonucleotide
  modified_base 96: mod_base = OTHER; note = 2'-O-methyl ribonucleotide
  modified_base 97: mod_base = OTHER; note = 2'-O-methyl ribonucleotide
  modified_base 98: mod_base = OTHER; note = 2'-O-methyl ribonucleotide
  modified_base 99: mod_base = OTHER; note = 2'-O-methyl ribonucleotide
  modified_base 100: mod_base = OTHER; note = 2'-O-methyl ribonucleotide
  modified_base 1..3: mod_base = OTHER; note = phosphorothioate linkage
  modified_base 25..26: mod_base = OTHER; note = phosphorothioate linkage
  modified_base 98..100: mod_base = OTHER; note = phosphorothioate linkage

SEQ ID NO: 1691 - RNA, 100 nt, synthetic construct; identical to SEQ ID NO: 55
  source 1..100: mol_type = other RNA
  modified_base 1: mod_base = OTHER; note = 2'-O-methyl ribonucleotide
  modified_base 2: mod_base = OTHER; note = 2'-O-methyl ribonucleotide
  modified_base 3: mod_base = OTHER; note = 2'-O-methyl ribonucleotide
  modified_base 21: mod_base = OTHER; note = 2'-O-methyl ribonucleotide
  modified_base 28: mod_base = OTHER; note = 2'-O-methyl ribonucleotide
  modified_base 29: mod_base = OTHER; note = 2'-O-methyl ribonucleotide
  modified_base 30: mod_base = OTHER; note = 2'-O-methyl ribonucleotide
  modified_base 31: mod_base = OTHER; note = 2'-O-methyl ribonucleotide
  modified_base 32: mod_base = OTHER; note = 2'-O-methyl ribonucleotide
  modified_base 34: mod_base = OTHER; note = 2'-O-methyl ribonucleotide
  modified_base 35: mod_base = OTHER; note = 2'-O-methyl ribonucleotide
  modified_base 36: mod_base = OTHER; note = 2'-O-methyl ribonucleotide
  modified_base 37: mod_base = OTHER; note = 2'-O-methyl ribonucleotide
  modified_base 38: mod_base = OTHER; note = 2'-O-methyl ribonucleotide
  modified_base 39: mod_base = OTHER; note = 2'-O-methyl ribonucleotide
  modified_base 40: mod_base = OTHER; note = 2'-O-methyl ribonucleotide
  modified_base 41: mod_base = OTHER; note = 2'-O-methyl ribonucleotide
  modified_base 42: mod_base = OTHER; note = 2'-O-methyl ribonucleotide
  modified_base 46: mod_base = OTHER; note = 2'-O-methyl ribonucleotide
  modified_base 48: mod_base = OTHER; note = 2'-O-methyl ribonucleotide
  modified_base 50: mod_base = OTHER; note = 2'-O-methyl ribonucleotide
  modified_base 52: mod_base = OTHER; note = 2'-O-methyl ribonucleotide
  modified_base 53: mod_base = OTHER; note = 2'-O-methyl ribonucleotide
  modified_base 54: mod_base = OTHER; note = 2'-O-methyl ribonucleotide
  modified_base 55: mod_base = OTHER; note = 2'-O-methyl ribonucleotide
  modified_base 56: mod_base = OTHER; note = 2'-O-methyl ribonucleotide
  modified_base 57: mod_base = OTHER; note = 2'-O-methyl ribonucleotide
  modified_base 60: mod_base = OTHER; note = 2'-O-methyl ribonucleotide
  modified_base 61: mod_base = OTHER; note = 2'-O-methyl ribonucleotide
  modified_base 66: mod_base = OTHER; note = 2'-O-methyl ribonucleotide
  modified_base 67: mod_base = OTHER; note = 2'-O-methyl ribonucleotide
  modified_base 70: mod_base = OTHER; note = 2'-O-methyl ribonucleotide
  modified_base 71: mod_base = OTHER; note = 2'-O-methyl ribonucleotide
  modified_base 72: mod_base = OTHER; note = 2'-O-methyl ribonucleotide
  modified_base 74: mod_base = OTHER; note = 2'-O-methyl ribonucleotide
  modified_base 75: mod_base = OTHER; note = 2'-O-methyl ribonucleotide
  modified_base 76: mod_base = OTHER; note = 2'-O-methyl ribonucleotide
  modified_base 77: mod_base = OTHER; note = 2'-O-methyl ribonucleotide
  modified_base 78: mod_base = OTHER; note = 2'-O-methyl ribonucleotide
  modified_base 79: mod_base = OTHER; note = 2'-O-methyl ribonucleotide
  modified_base 80: mod_base = OTHER; note = 2'-O-methyl ribonucleotide
  modified_base 81: mod_base = OTHER; note = 2'-O-methyl ribonucleotide
  modified_base 83: mod_base = OTHER; note = 2'-O-methyl ribonucleotide
  modified_base 84: mod_base = OTHER; note = 2'-O-methyl ribonucleotide
  modified_base 85: mod_base = OTHER; note = 2'-O-methyl ribonucleotide
  modified_base 86: mod_base = OTHER; note = 2'-O-methyl ribonucleotide
  modified_base 87: mod_base = OTHER; note = 2'-O-methyl ribonucleotide
  modified_base 88: mod_base = OTHER; note = 2'-O-methyl ribonucleotide
  modified_base 89: mod_base = OTHER; note = 2'-O-methyl ribonucleotide
  modified_base 90: mod_base = OTHER; note = 2'-O-methyl ribonucleotide
  modified_base 91: mod_base = OTHER; note = 2'-O-methyl ribonucleotide
  modified_base 92: mod_base = OTHER; note = 2'-O-methyl ribonucleotide
  modified_base 93: mod_base = OTHER; note = 2'-O-methyl ribonucleotide
  modified_base 94: mod_base = OTHER; note = 2'-O-methyl ribonucleotide
  modified_base 95: mod_base = OTHER; note = 2'-O-methyl ribonucleotide
  modified_base 96: mod_base = OTHER; note = 2'-O-methyl ribonucleotide
  modified_base 97: mod_base = OTHER; note = 2'-O-methyl ribonucleotide
  modified_base 98: mod_base = OTHER; note = 2'-O-methyl ribonucleotide
  modified_base 99: mod_base = OTHER; note = 2'-O-methyl ribonucleotide
  modified_base 100: mod_base = OTHER; note = 2'-O-methyl ribonucleotide
  modified_base 1..3: mod_base = OTHER; note = phosphorothioate linkage
  modified_base 25..26: mod_base = OTHER; note = phosphorothioate linkage
  modified_base 98..100: mod_base = OTHER; note = phosphorothioate linkage

SEQ ID NO: 1692 - RNA, 100 nt, synthetic construct; identical to SEQ ID NO: 55
  source 1..100: mol_type = other RNA
  modified_base 1: mod_base = OTHER; note = 2'-O-methyl ribonucleotide
  modified_base 2: mod_base = OTHER; note = 2'-O-methyl ribonucleotide
  modified_base 3: mod_base = OTHER; note = 2'-O-methyl ribonucleotide
  modified_base 21: mod_base = OTHER; note = 2'-O-methyl ribonucleotide
  modified_base 28: mod_base = OTHER; note = 2'-O-methyl ribonucleotide
  modified_base 29: mod_base = OTHER; note = 2'-O-methyl ribonucleotide
  modified_base 30: mod_base = OTHER; note = 2'-O-methyl ribonucleotide
  modified_base 31: mod_base = OTHER; note = 2'-O-methyl ribonucleotide
  modified_base 32: mod_base = OTHER; note = 2'-O-methyl ribonucleotide
  modified_base 34: mod_base = OTHER; note = 2'-O-methyl ribonucleotide
  modified_base 35: mod_base = OTHER; note = 2'-O-methyl ribonucleotide
  modified_base 36: mod_base = OTHER; note = 2'-O-methyl ribonucleotide
  modified_base 37: mod_base = OTHER; note = 2'-O-methyl ribonucleotide
  modified_base 38: mod_base = OTHER; note = 2'-O-methyl ribonucleotide
  modified_base 39: mod_base = OTHER; note = 2'-O-methyl ribonucleotide
  modified_base 40: mod_base = OTHER; note = 2'-O-methyl ribonucleotide
  modified_base 41: mod_base = OTHER; note = 2'-O-methyl ribonucleotide
  modified_base 42: mod_base = OTHER; note = 2'-O-methyl ribonucleotide
  modified_base 46: mod_base = OTHER; note = 2'-O-methyl ribonucleotide
  modified_base 48: mod_base = OTHER; note = 2'-O-methyl ribonucleotide
  modified_base 50: mod_base = OTHER; note = 2'-O-methyl ribonucleotide
  modified_base 52: mod_base = OTHER; note = 2'-O-methyl ribonucleotide
  modified_base 53: mod_base = OTHER; note = 2'-O-methyl ribonucleotide
  modified_base 54: mod_base = OTHER; note = 2'-O-methyl ribonucleotide
  modified_base 55: mod_base = OTHER; note = 2'-O-methyl ribonucleotide
  modified_base 56: mod_base = OTHER; note = 2'-O-methyl ribonucleotide
  modified_base 57: mod_base = OTHER; note = 2'-O-methyl ribonucleotide
  modified_base 60: mod_base = OTHER; note = 2'-O-methyl ribonucleotide
  modified_base 61: mod_base = OTHER; note = 2'-O-methyl ribonucleotide
  modified_base 66: mod_base = OTHER; note = 2'-O-methyl ribonucleotide
  modified_base 67: mod_base = OTHER; note = 2'-O-methyl ribonucleotide
  modified_base 70: mod_base = OTHER; note = 2'-O-methyl ribonucleotide
  modified_base 71: mod_base = OTHER; note = 2'-O-methyl ribonucleotide
  modified_base 72: mod_base = OTHER; note = 2'-O-methyl ribonucleotide
  modified_base 74: mod_base = OTHER; note = 2'-O-methyl ribonucleotide
  modified_base 75: mod_base = OTHER; note = 2'-O-methyl ribonucleotide
  modified_base 76: mod_base = OTHER; note = 2'-O-methyl ribonucleotide
  modified_base 77: mod_base = OTHER; note = 2'-O-methyl ribonucleotide
  modified_base 78: mod_base = OTHER; note = 2'-O-methyl ribonucleotide
  modified_base 79: mod_base = OTHER; note = 2'-O-methyl ribonucleotide
  modified_base 80: mod_base = OTHER; note = 2'-O-methyl ribonucleotide
  modified_base 82: mod_base = OTHER; note = 2'-O-methyl ribonucleotide
  modified_base 83: mod_base = OTHER; note = 2'-O-methyl ribonucleotide
  modified_base 84: mod_base = OTHER; note = 2'-O-methyl ribonucleotide
  modified_base 85: mod_base = OTHER; note = 2'-O-methyl ribonucleotide
  modified_base 86: mod_base = OTHER; note = 2'-O-methyl ribonucleotide
  modified_base 87: mod_base = OTHER; note = 2'-O-methyl ribonucleotide
  modified_base 89: mod_base = OTHER; note = 2'-O-methyl ribonucleotide
  modified_base 92: mod_base = OTHER; note = 2'-O-methyl ribonucleotide
  modified_base 93: mod_base = OTHER; note = 2'-O-methyl ribonucleotide
  modified_base 94: mod_base = OTHER; note = 2'-O-methyl ribonucleotide
  modified_base 95: mod_base = OTHER; note = 2'-O-methyl ribonucleotide
  modified_base 96: mod_base = OTHER; note = 2'-O-methyl ribonucleotide
  modified_base 97: mod_base = OTHER; note = 2'-O-methyl ribonucleotide
  modified_base 98: mod_base = OTHER; note = 2'-O-methyl ribonucleotide
  modified_base 99: mod_base = OTHER; note = 2'-O-methyl ribonucleotide
  modified_base 100: mod_base = OTHER; note = 2'-O-methyl ribonucleotide
  modified_base 1..3: mod_base = OTHER; note = phosphorothioate linkage
  modified_base 25..26: mod_base = OTHER; note = phosphorothioate linkage
  modified_base 45..46: mod_base = OTHER; note = phosphorothioate linkage
  modified_base 98..100: mod_base = OTHER; note = phosphorothioate linkage

SEQ ID NO: 1693 - RNA, 100 nt, synthetic construct; identical to SEQ ID NO: 421
  source 1..100: mol_type = other RNA
  modified_base 1: mod_base = OTHER; note = 2'-O-methyl ribonucleotide
  modified_base 2: mod_base = OTHER; note = 2'-O-methyl ribonucleotide
  modified_base 3: mod_base = OTHER; note = 2'-O-methyl ribonucleotide
  modified_base 21: mod_base = OTHER; note = 2'-O-methyl ribonucleotide
  modified_base 28: mod_base = OTHER; note = 2'-O-methyl ribonucleotide
  modified_base 29: mod_base = OTHER; note = 2'-O-methyl ribonucleotide
  modified_base 30: mod_base = OTHER; note = 2'-O-methyl ribonucleotide
  modified_base 31: mod_base = OTHER; note = 2'-O-methyl ribonucleotide
  modified_base 32: mod_base = OTHER; note = 2'-O-methyl ribonucleotide
  modified_base 34: mod_base = OTHER; note = 2'-O-methyl ribonucleotide
  modified_base 35: mod_base = OTHER; note = 2'-O-methyl ribonucleotide
  modified_base 36: mod_base = OTHER; note = 2'-O-methyl ribonucleotide
  modified_base 37: mod_base = OTHER; note = 2'-O-methyl ribonucleotide
  modified_base 38: mod_base = OTHER; note = 2'-O-methyl ribonucleotide
  modified_base 39: mod_base = OTHER; note = 2'-O-methyl ribonucleotide
  modified_base 40: mod_base = OTHER; note = 2'-O-methyl ribonucleotide
  modified_base 41: mod_base = OTHER; note = 2'-O-methyl ribonucleotide
  modified_base 42: mod_base = OTHER; note = 2'-O-methyl ribonucleotide
  modified_base 46: mod_base = OTHER; note = 2'-O-methyl ribonucleotide
  modified_base 48: mod_base = OTHER; note = 2'-O-methyl ribonucleotide
  modified_base 50: mod_base = OTHER; note = 2'-O-methyl ribonucleotide
  modified_base 52: mod_base = OTHER; note = 2'-O-methyl ribonucleotide
  modified_base 53: mod_base = OTHER; note = 2'-O-methyl ribonucleotide
  modified_base 54: mod_base = OTHER; note = 2'-O-methyl ribonucleotide
  modified_base 57: mod_base = OTHER; note = 2'-O-methyl ribonucleotide
  modified_base 61: mod_base = OTHER; note = 2'-O-methyl ribonucleotide
  modified_base 66: mod_base = OTHER; note = 2'-O-methyl ribonucleotide
  modified_base 67: mod_base = OTHER; note = 2'-O-methyl ribonucleotide
  modified_base 70: mod_base = OTHER; note = 2'-O-methyl ribonucleotide
  modified_base 71: mod_base = OTHER; note = 2'-O-methyl ribonucleotide
  modified_base 72: mod_base = OTHER; note = 2'-O-methyl ribonucleotide
  modified_base 74: mod_base = OTHER; note = 2'-O-methyl ribonucleotide
  modified_base 75: mod_base = OTHER; note = 2'-O-methyl ribonucleotide
  modified_base 76: mod_base = OTHER; note = 2'-O-methyl ribonucleotide
  modified_base 77: mod_base = OTHER; note = 2'-O-methyl ribonucleotide
  modified_base 78: mod_base = OTHER; note = 2'-O-methyl ribonucleotide
  modified_base 79: mod_base = OTHER; note = 2'-O-methyl ribonucleotide
  modified_base 80: mod_base = OTHER; note = 2'-O-methyl ribonucleotide
  modified_base 82: mod_base = OTHER; note = 2'-O-methyl ribonucleotide
  modified_base 83: mod_base = OTHER; note = 2'-O-methyl ribonucleotide
  modified_base 84: mod_base = OTHER; note = 2'-O-methyl ribonucleotide
  modified_base 85: mod_base = OTHER; note = 2'-O-methyl ribonucleotide
  modified_base 86: mod_base = OTHER; note = 2'-O-methyl ribonucleotide
  modified_base 87: mod_base = OTHER; note = 2'-O-methyl ribonucleotide
  modified_base 89: mod_base = OTHER; note = 2'-O-methyl ribonucleotide
  modified_base 92: mod_base = OTHER; note = 2'-O-methyl ribonucleotide
  modified_base 93: mod_base = OTHER; note = 2'-O-methyl ribonucleotide
  modified_base 94: mod_base = OTHER; note = 2'-O-methyl ribonucleotide
  modified_base 95: mod_base = OTHER; note = 2'-O-methyl ribonucleotide
  modified_base 96: mod_base = OTHER; note = 2'-O-methyl ribonucleotide
  modified_base 97: mod_base = OTHER; note = 2'-O-methyl ribonucleotide
  modified_base 98: mod_base = OTHER; note = 2'-O-methyl ribonucleotide
  modified_base 99: mod_base = OTHER; note = 2'-O-methyl ribonucleotide
  modified_base 100: mod_base = OTHER; note = 2'-O-methyl ribonucleotide
  modified_base 1..3: mod_base = OTHER; note = phosphorothioate linkage
  modified_base 25..26: mod_base = OTHER; note = phosphorothioate linkage
  modified_base 64..65: mod_base = OTHER; note = phosphorothioate linkage
  modified_base 98..100: mod_base = OTHER; note = phosphorothioate linkage

SEQ ID NO: 1694 - RNA, 100 nt, synthetic construct; identical to SEQ ID NO: 422
  source 1..100: mol_type = other RNA
  modified_base 1: mod_base = OTHER; note = 2'-O-methyl ribonucleotide
  modified_base 2: mod_base = OTHER; note = 2'-O-methyl ribonucleotide
  modified_base 3: mod_base = OTHER; note = 2'-O-methyl ribonucleotide
  modified_base 21: mod_base = OTHER; note = 2'-O-methyl ribonucleotide
  modified_base 28: mod_base = OTHER; note = 2'-O-methyl ribonucleotide
  modified_base 29: mod_base = OTHER; note = 2'-O-methyl ribonucleotide
  modified_base 30: mod_base = OTHER; note = 2'-O-methyl ribonucleotide
  modified_base 31: mod_base = OTHER; note = 2'-O-methyl ribonucleotide
  modified_base 32: mod_base = OTHER; note = 2'-O-methyl ribonucleotide
  modified_base 34: mod_base = OTHER; note = 2'-O-methyl ribonucleotide
  modified_base 35: mod_base = OTHER; note = 2'-O-methyl ribonucleotide
  modified_base 36: mod_base = OTHER; note = 2'-O-methyl ribonucleotide
  modified_base 37: mod_base = OTHER; note = 2'-O-methyl ribonucleotide
  modified_base 38: mod_base = OTHER; note = 2'-O-methyl ribonucleotide
  modified_base 39: mod_base = OTHER; note = 2'-O-methyl ribonucleotide
  modified_base 40: mod_base = OTHER; note = 2'-O-methyl ribonucleotide
  modified_base 41: mod_base = OTHER; note = 2'-O-methyl ribonucleotide
  modified_base 42: mod_base = OTHER; note = 2'-O-methyl ribonucleotide
  modified_base 46: mod_base = OTHER; note = 2'-O-methyl ribonucleotide
  modified_base 48: mod_base = OTHER; note = 2'-O-methyl ribonucleotide
  modified_base 50: mod_base = OTHER; note = 2'-O-methyl ribonucleotide
  modified_base 52: mod_base = OTHER; note = 2'-O-methyl ribonucleotide
  modified_base 53: mod_base = OTHER; note = 2'-O-methyl ribonucleotide
  modified_base 54: mod_base = OTHER; note = 2'-O-methyl ribonucleotide
  modified_base 57: mod_base = OTHER; note = 2'-O-methyl ribonucleotide
  modified_base 61: mod_base = OTHER; note = 2'-O-methyl ribonucleotide
  modified_base 66: mod_base = OTHER; note = 2'-O-methyl ribonucleotide
  modified_base 67: mod_base = OTHER; note = 2'-O-methyl ribonucleotide
  modified_base 70: mod_base = OTHER; note = 2'-O-methyl ribonucleotide
  modified_base 71: mod_base = OTHER; note = 2'-O-methyl ribonucleotide
  modified_base 72: mod_base = OTHER; note = 2'-O-methyl ribonucleotide
  modified_base 74: mod_base = OTHER; note = 2'-O-methyl ribonucleotide
  modified_base 75: mod_base = OTHER; note = 2'-O-methyl ribonucleotide
  modified_base 76: mod_base = OTHER; note = 2'-O-methyl ribonucleotide
  modified_base 77: mod_base = OTHER; note = 2'-O-methyl ribonucleotide
  modified_base 78: mod_base = OTHER; note = 2'-O-methyl ribonucleotide
  modified_base 79: mod_base = OTHER; note = 2'-O-methyl ribonucleotide
  modified_base 80: mod_base = OTHER; note = 2'-O-methyl ribonucleotide
  modified_base 82: mod_base = OTHER; note = 2'-O-methyl ribonucleotide
  modified_base 83: mod_base = OTHER; note = 2'-O-methyl ribonucleotide
  modified_base 84: mod_base = OTHER; note = 2'-O-methyl ribonucleotide
  modified_base 85: mod_base = OTHER; note = 2'-O-methyl ribonucleotide
  modified_base 86: mod_base = OTHER; note = 2'-O-methyl ribonucleotide
  modified_base 87: mod_base = OTHER; note = 2'-O-methyl ribonucleotide
  modified_base 89: mod_base = OTHER; note = 2'-O-methyl ribonucleotide
  modified_base 92: mod_base = OTHER; note = 2'-O-methyl ribonucleotide
  modified_base 93: mod_base = OTHER; note = 2'-O-methyl ribonucleotide
  modified_base 94: mod_base = OTHER; note = 2'-O-methyl ribonucleotide
  modified_base 95: mod_base = OTHER; note = 2'-O-methyl ribonucleotide
  modified_base 96: mod_base = OTHER; note = 2'-O-methyl ribonucleotide
  modified_base 97: mod_base = OTHER; note = 2'-O-methyl ribonucleotide
  modified_base 98: mod_base = OTHER; note = 2'-O-methyl ribonucleotide
  modified_base 99: mod_base = OTHER; note = 2'-O-methyl ribonucleotide
  modified_base 100: mod_base = OTHER; note = 2'-O-methyl ribonucleotide
  modified_base 1..3: mod_base = OTHER; note = phosphorothioate linkage
  modified_base 25..26: mod_base = OTHER; note = phosphorothioate linkage
  modified_base 64..65: mod_base = OTHER; note = phosphorothioate linkage
  modified_base 98..100: mod_base = OTHER; note = phosphorothioate linkage

SEQ ID NO: 1695 - RNA, 100 nt, synthetic construct; identical to SEQ ID NO: 55
  source 1..100: mol_type = other RNA
  modified_base 1: mod_base = OTHER; note = 2'-O-methyl ribonucleotide
  modified_base 2: mod_base = OTHER; note = 2'-O-methyl ribonucleotide
  modified_base 3: mod_base = OTHER; note = 2'-O-methyl ribonucleotide
  modified_base 21: mod_base = OTHER; note = 2'-O-methyl ribonucleotide
  modified_base 28: mod_base = OTHER; note = 2'-O-methyl ribonucleotide
  modified_base 29: mod_base = OTHER; note = 2'-O-methyl ribonucleotide
  modified_base 30: mod_base = OTHER; note = 2'-O-methyl ribonucleotide
  modified_base 31: mod_base = OTHER; note = 2'-O-methyl ribonucleotide
  modified_base 32: mod_base = OTHER; note = 2'-O-methyl ribonucleotide
  modified_base 34: mod_base = OTHER; note = 2'-O-methyl ribonucleotide
  modified_base 35: mod_base = OTHER; note = 2'-O-methyl ribonucleotide
  modified_base 36: mod_base = OTHER; note = 2'-O-methyl ribonucleotide
  modified_base 37: mod_base = OTHER; note = 2'-O-methyl ribonucleotide
  modified_base 38: mod_base = OTHER; note = 2'-O-methyl ribonucleotide
  modified_base 39: mod_base = OTHER; note = 2'-O-methyl ribonucleotide
  modified_base 40: mod_base = OTHER; note = 2'-O-methyl ribonucleotide
  modified_base 41: mod_base = OTHER; note = 2'-O-methyl ribonucleotide
  modified_base 42: mod_base = OTHER; note = 2'-O-methyl ribonucleotide
  modified_base 46: mod_base = OTHER; note = 2'-O-methyl ribonucleotide
  modified_base 48: mod_base = OTHER; note = 2'-O-methyl ribonucleotide
  modified_base 50: mod_base = OTHER; note = 2'-O-methyl ribonucleotide
  modified_base 52: mod_base = OTHER; note = 2'-O-methyl ribonucleotide
  modified_base 53: mod_base = OTHER; note = 2'-O-methyl ribonucleotide
  modified_base 54: mod_base = OTHER; note = 2'-O-methyl ribonucleotide
  modified_base 55: mod_base = OTHER; note = 2'-O-methyl ribonucleotide
  modified_base 56: mod_base = OTHER; note = 2'-O-methyl ribonucleotide
  modified_base 57: mod_base = OTHER; note = 2'-O-methyl ribonucleotide
  modified_base 60: mod_base = OTHER; note = 2'-O-methyl ribonucleotide
  modified_base 61: mod_base = OTHER; note = 2'-O-methyl ribonucleotide
  modified_base 66: mod_base = OTHER; note = 2'-O-methyl ribonucleotide
  modified_base 67: mod_base = OTHER; note = 2'-O-methyl ribonucleotide
  modified_base 70: mod_base = OTHER; note = 2'-O-methyl ribonucleotide
  modified_base 71: mod_base = OTHER; note = 2'-O-methyl ribonucleotide
  modified_base 72: mod_base = OTHER; note = 2'-O-methyl ribonucleotide
  modified_base 74: mod_base = OTHER; note = 2'-O-methyl ribonucleotide
  modified_base 75: mod_base = OTHER; note = 2'-O-methyl ribonucleotide
  modified_base 76: mod_base = OTHER; note = 2'-O-methyl ribonucleotide
  modified_base 77: mod_base = OTHER; note = 2'-O-methyl ribonucleotide
  modified_base 78: mod_base = OTHER; note = 2'-O-methyl ribonucleotide
  modified_base 79: mod_base = OTHER; note = 2'-O-methyl ribonucleotide
  modified_base 80: mod_base = OTHER; note = 2'-O-methyl ribonucleotide
  modified_base 81: mod_base = OTHER; note = 2'-O-methyl ribonucleotide
  modified_base 83: mod_base = OTHER; note = 2'-O-methyl ribonucleotide
  modified_base 84: mod_base = OTHER; note = 2'-O-methyl ribonucleotide
  modified_base 85: mod_base = OTHER; note = 2'-O-methyl ribonucleotide
  modified_base 86: mod_base = OTHER; note = 2'-O-methyl ribonucleotide
  modified_base 87: mod_base = OTHER; note = 2'-O-methyl ribonucleotide
  modified_base 88: mod_base = OTHER; note = 2'-O-methyl ribonucleotide
  modified_base 89: mod_base = OTHER; note = 2'-O-methyl ribonucleotide
  modified_base 90: mod_base = OTHER; note = 2'-O-methyl ribonucleotide
  modified_base 91: mod_base = OTHER; note = 2'-O-methyl ribonucleotide
  modified_base 92: mod_base = OTHER; note = 2'-O-methyl ribonucleotide
  modified_base 93: mod_base = OTHER; note = 2'-O-methyl ribonucleotide
  modified_base 94: mod_base = OTHER; note = 2'-O-methyl ribonucleotide
  modified_base 95: mod_base = OTHER; note = 2'-O-methyl ribonucleotide
  modified_base 96: mod_base = OTHER; note = 2'-O-methyl ribonucleotide
  modified_base 97: mod_base = OTHER; note = 2'-O-methyl ribonucleotide
  modified_base 98: mod_base = OTHER; note = 2'-O-methyl ribonucleotide
  modified_base 99: mod_base = OTHER; note = 2'-O-methyl ribonucleotide
  modified_base 100: mod_base = OTHER; note = 2'-O-methyl ribonucleotide
  modified_base 1..3: mod_base = OTHER; note = phosphorothioate linkage
  modified_base 25..26: mod_base = OTHER; note = phosphorothioate linkage
  modified_base 64..65: mod_base = OTHER; note = phosphorothioate linkage
  modified_base 98..100: mod_base = OTHER; note = phosphorothioate linkage

SEQ ID NO: 1696 - RNA, 100 nt, synthetic construct; identical to SEQ ID NO: 421
  source 1..100: mol_type = other RNA
  modified_base 1: mod_base = OTHER; note = 2'-O-methyl ribonucleotide
  modified_base 2: mod_base = OTHER; note = 2'-O-methyl ribonucleotide
  modified_base 3: mod_base = OTHER; note = 2'-O-methyl ribonucleotide
  modified_base 21: mod_base = OTHER; note = 2'-O-methyl ribonucleotide
  modified_base 28: mod_base = OTHER; note = 2'-O-methyl ribonucleotide
  modified_base 29: mod_base = OTHER; note = 2'-O-methyl ribonucleotide
  modified_base 30: mod_base = OTHER; note = 2'-O-methyl ribonucleotide
  modified_base 31: mod_base = OTHER; note = 2'-O-methyl ribonucleotide
  modified_base 32: mod_base = OTHER; note = 2'-O-methyl ribonucleotide
  modified_base 34: mod_base = OTHER; note = 2'-O-methyl ribonucleotide
  modified_base 35: mod_base = OTHER; note = 2'-O-methyl ribonucleotide
  modified_base 36: mod_base = OTHER; note = 2'-O-methyl ribonucleotide
  modified_base 37: mod_base = OTHER; note = 2'-O-methyl ribonucleotide
  modified_base 38: mod_base = OTHER; note = 2'-O-methyl ribonucleotide
  modified_base 39: mod_base = OTHER; note = 2'-O-methyl ribonucleotide
  modified_base 40: mod_base = OTHER; note = 2'-O-methyl ribonucleotide
  modified_base 41: mod_base = OTHER; note = 2'-O-methyl ribonucleotide
  modified_base 42: mod_base = OTHER; note = 2'-O-methyl ribonucleotide
  modified_base 46: mod_base = OTHER; note = 2'-O-methyl ribonucleotide
  modified_base 48: mod_base = OTHER; note = 2'-O-methyl ribonucleotide
  modified_base 50: mod_base = OTHER; note = 2'-O-methyl ribonucleotide
  modified_base 52: mod_base = OTHER; note = 2'-O-methyl ribonucleotide
  modified_base 53: mod_base = OTHER; note = 2'-O-methyl ribonucleotide
  modified_base 54: mod_base = OTHER; note = 2'-O-methyl ribonucleotide
  modified_base 57: mod_base = OTHER; note = 2'-O-methyl ribonucleotide
  modified_base 61: mod_base = OTHER; note = 2'-O-methyl ribonucleotide
  modified_base 66: mod_base = OTHER; note = 2'-O-methyl ribonucleotide
  modified_base 67: mod_base = OTHER; note = 2'-O-methyl ribonucleotide
  modified_base 70: mod_base = OTHER; note = 2'-O-methyl ribonucleotide
  modified_base 71: mod_base = OTHER; note = 2'-O-methyl ribonucleotide
  modified_base 72: mod_base = OTHER; note = 2'-O-methyl ribonucleotide
  modified_base 74: mod_base = OTHER; note = 2'-O-methyl ribonucleotide
  modified_base 75: mod_base = OTHER; note = 2'-O-methyl ribonucleotide
  modified_base 76: mod_base = OTHER; note = 2'-O-methyl ribonucleotide
  modified_base 77: mod_base = OTHER; note = 2'-O-methyl ribonucleotide
  modified_base 78: mod_base = OTHER; note = 2'-O-methyl ribonucleotide
  modified_base 79: mod_base = OTHER; note = 2'-O-methyl ribonucleotide
  modified_base 80: mod_base = OTHER; note = 2'-O-methyl ribonucleotide
  modified_base 82: mod_base = OTHER; note = 2'-O-methyl ribonucleotide
  modified_base 83: mod_base = OTHER; note = 2'-O-methyl ribonucleotide
  modified_base 84: mod_base = OTHER; note = 2'-O-methyl ribonucleotide
  modified_base 85: mod_base = OTHER; note = 2'-O-methyl ribonucleotide
  modified_base 86: mod_base = OTHER; note = 2'-O-methyl ribonucleotide
  modified_base 87: mod_base = OTHER; note = 2'-O-methyl ribonucleotide
  modified_base 89: mod_base = OTHER; note = 2'-O-methyl ribonucleotide
  modified_base 92: mod_base = OTHER; note = 2'-O-methyl ribonucleotide
  modified_base 93: mod_base = OTHER; note = 2'-O-methyl ribonucleotide
  modified_base 94: mod_base = OTHER; note = 2'-O-methyl ribonucleotide
  modified_base 95: mod_base = OTHER; note = 2'-O-methyl ribonucleotide
  modified_base 96: mod_base = OTHER; note = 2'-O-methyl ribonucleotide
  modified_base 97: mod_base = OTHER; note = 2'-O-methyl ribonucleotide
  modified_base 98: mod_base = OTHER; note = 2'-O-methyl ribonucleotide
  modified_base 99: mod_base = OTHER; note = 2'-O-methyl ribonucleotide
  modified_base 100: mod_base = OTHER; note = 2'-O-methyl ribonucleotide
  modified_base 1..3: mod_base = OTHER; note = phosphorothioate linkage
  modified_base 25..26: mod_base = OTHER; note = phosphorothioate linkage
  modified_base 45..46: mod_base = OTHER; note = phosphorothioate linkage
  modified_base 64..65: mod_base = OTHER; note = phosphorothioate linkage
  modified_base 98..100: mod_base = OTHER; note = phosphorothioate linkage

SEQ ID NO: 1697 - RNA, 100 nt, synthetic construct; identical to SEQ ID NO: 422
  source 1..100: mol_type = other RNA
  modified_base 1: mod_base = OTHER; note = 2'-O-methyl ribonucleotide
  modified_base 2: mod_base = OTHER; note = 2'-O-methyl ribonucleotide
  modified_base 3: mod_base = OTHER; note = 2'-O-methyl ribonucleotide
  modified_base 21: mod_base = OTHER; note = 2'-O-methyl ribonucleotide
  modified_base 28: mod_base = OTHER; note = 2'-O-methyl ribonucleotide
  modified_base 29: mod_base = OTHER; note = 2'-O-methyl ribonucleotide
  modified_base 30: mod_base = OTHER; note = 2'-O-methyl ribonucleotide
  modified_base 31: mod_base = OTHER; note = 2'-O-methyl ribonucleotide
  modified_base 32: mod_base = OTHER; note = 2'-O-methyl ribonucleotide
  modified_base 34: mod_base = OTHER; note = 2'-O-methyl ribonucleotide
  modified_base 35: mod_base = OTHER; note = 2'-O-methyl ribonucleotide
  modified_base 36: mod_base = OTHER; note = 2'-O-methyl ribonucleotide
  modified_base 37: mod_base = OTHER; note = 2'-O-methyl ribonucleotide
  modified_base 38: mod_base = OTHER; note = 2'-O-methyl ribonucleotide
  modified_base 39: mod_base = OTHER; note = 2'-O-methyl ribonucleotide
  modified_base 40: mod_base = OTHER; note = 2'-O-methyl ribonucleotide
  modified_base 41: mod_base = OTHER; note = 2'-O-methyl ribonucleotide
  modified_base 42: mod_base = OTHER; note = 2'-O-methyl ribonucleotide
  modified_base 46: mod_base = OTHER; note = 2'-O-methyl ribonucleotide
  modified_base 48: mod_base = OTHER; note = 2'-O-methyl ribonucleotide
  modified_base 50: mod_base = OTHER; note = 2'-O-methyl ribonucleotide
  modified_base 52: mod_base = OTHER; note = 2'-O-methyl ribonucleotide
  modified_base 53: mod_base = OTHER; note = 2'-O-methyl ribonucleotide
  modified_base 54: mod_base = OTHER; note = 2'-O-methyl ribonucleotide
  modified_base 57: mod_base = OTHER; note = 2'-O-methyl ribonucleotide
  modified_base 61: mod_base = OTHER; note = 2'-O-methyl ribonucleotide
  modified_base 66: mod_base = OTHER; note = 2'-O-methyl ribonucleotide
  modified_base 67: mod_base = OTHER; note = 2'-O-methyl ribonucleotide
  modified_base 70: mod_base = OTHER; note = 2'-O-methyl ribonucleotide
  modified_base 71: mod_base = OTHER; note = 2'-O-methyl ribonucleotide
  modified_base 72: mod_base = OTHER; note = 2'-O-methyl ribonucleotide
  modified_base 74: mod_base = OTHER; note = 2'-O-methyl ribonucleotide
  modified_base 75: mod_base = OTHER; note = 2'-O-methyl ribonucleotide
  modified_base 76: mod_base = OTHER; note = 2'-O-methyl ribonucleotide
  modified_base 77: mod_base = OTHER; note = 2'-O-methyl ribonucleotide
  modified_base 78: mod_base = OTHER; note = 2'-O-methyl ribonucleotide
  modified_base 79: mod_base = OTHER; note = 2'-O-methyl ribonucleotide
  modified_base 80: mod_base = OTHER; note = 2'-O-methyl ribonucleotide
  modified_base 82: mod_base = OTHER; note = 2'-O-methyl ribonucleotide
  modified_base 83: mod_base = OTHER; note = 2'-O-methyl ribonucleotide
  modified_base 84: mod_base = OTHER; note = 2'-O-methyl ribonucleotide
  modified_base 85: mod_base = OTHER; note = 2'-O-methyl ribonucleotide
  modified_base 86: mod_base = OTHER; note = 2'-O-methyl ribonucleotide
  modified_base 87: mod_base = OTHER; note = 2'-O-methyl ribonucleotide
  modified_base 89: mod_base = OTHER; note = 2'-O-methyl ribonucleotide
  modified_base 92: mod_base = OTHER; note = 2'-O-methyl ribonucleotide
  modified_base 93: mod_base = OTHER; note = 2'-O-methyl ribonucleotide
  modified_base 94: mod_base = OTHER; note = 2'-O-methyl ribonucleotide
  modified_base 95: mod_base = OTHER; note = 2'-O-methyl ribonucleotide
  modified_base 96: mod_base = OTHER; note = 2'-O-methyl ribonucleotide
  modified_base 97: mod_base = OTHER; note = 2'-O-methyl ribonucleotide
  modified_base 98: mod_base = OTHER; note = 2'-O-methyl ribonucleotide
  modified_base 99: mod_base = OTHER; note = 2'-O-methyl ribonucleotide
  modified_base 100: mod_base = OTHER; note = 2'-O-methyl ribonucleotide
  modified_base 1..3: mod_base = OTHER; note = phosphorothioate linkage
  modified_base 25..26: mod_base = OTHER; note = phosphorothioate linkage
  modified_base 45..46: mod_base = OTHER; note = phosphorothioate linkage
  modified_base 64..65: mod_base = OTHER; note = phosphorothioate linkage
  modified_base 98..100: mod_base = OTHER; note = phosphorothioate linkage

SEQ ID NO: 1698 - RNA, 100 nt, synthetic construct; identical to SEQ ID NO: 55
  source 1..100: mol_type = other RNA
  modified_base 1: mod_base = OTHER; note = 2'-O-methyl ribonucleotide
  modified_base 2: mod_base = OTHER; note = 2'-O-methyl ribonucleotide
  modified_base 3: mod_base = OTHER; note = 2'-O-methyl ribonucleotide
  modified_base 21: mod_base = OTHER; note = 2'-O-methyl ribonucleotide
  modified_base 28: mod_base = OTHER; note = 2'-O-methyl ribonucleotide
  modified_base 29: mod_base = OTHER; note = 2'-O-methyl ribonucleotide
  modified_base 30: mod_base = OTHER; note = 2'-O-methyl ribonucleotide
  modified_base 31: mod_base = OTHER; note = 2'-O-methyl ribonucleotide
  modified_base 32: mod_base = OTHER; note = 2'-O-methyl ribonucleotide
  modified_base 34: mod_base = OTHER; note = 2'-O-methyl ribonucleotide
  modified_base 35: mod_base = OTHER; note = 2'-O-methyl ribonucleotide
  modified_base 36: mod_base = OTHER; note = 2'-O-methyl ribonucleotide
  modified_base 37: mod_base = OTHER; note = 2'-O-methyl ribonucleotide
  modified_base 38: mod_base = OTHER; note = 2'-O-methyl ribonucleotide
  modified_base 39: mod_base = OTHER; note = 2'-O-methyl ribonucleotide
  modified_base 40: mod_base = OTHER; note = 2'-O-methyl ribonucleotide
  modified_base 41: mod_base = OTHER; note = 2'-O-methyl ribonucleotide
  modified_base 42: mod_base = OTHER; note = 2'-O-methyl ribonucleotide
  modified_base 46: mod_base = OTHER; note = 2'-O-methyl ribonucleotide
  modified_base 48: mod_base = OTHER; note = 2'-O-methyl ribonucleotide
  modified_base 50: mod_base = OTHER; note = 2'-O-methyl ribonucleotide
  modified_base 52: mod_base = OTHER; note = 2'-O-methyl ribonucleotide
  modified_base 53: mod_base = OTHER; note = 2'-O-methyl ribonucleotide
  modified_base 54: mod_base = OTHER; note = 2'-O-methyl ribonucleotide
  modified_base 55: mod_base = OTHER; note = 2'-O-methyl ribonucleotide
  modified_base 56: mod_base = OTHER; note = 2'-O-methyl ribonucleotide
  modified_base 57: mod_base = OTHER; note = 2'-O-methyl ribonucleotide
  modified_base 60: mod_base = OTHER; note = 2'-O-methyl ribonucleotide
  modified_base 61: mod_base = OTHER; note = 2'-O-methyl ribonucleotide
  modified_base 66: mod_base = OTHER; note = 2'-O-methyl ribonucleotide
  modified_base 67: mod_base = OTHER; note = 2'-O-methyl ribonucleotide
  modified_base 70: mod_base = OTHER; note = 2'-O-methyl ribonucleotide
  modified_base 71: mod_base = OTHER; note = 2'-O-methyl ribonucleotide
  modified_base 72: mod_base = OTHER; note = 2'-O-methyl ribonucleotide
  modified_base 74: mod_base = OTHER; note = 2'-O-methyl ribonucleotide
  modified_base 75: mod_base = OTHER; note = 2'-O-methyl ribonucleotide
  modified_base 76: mod_base = OTHER; note = 2'-O-methyl ribonucleotide
  modified_base 77: mod_base = OTHER; note = 2'-O-methyl ribonucleotide
  modified_base 78: mod_base = OTHER; note = 2'-O-methyl ribonucleotide
  modified_base 79: mod_base = OTHER; note = 2'-O-methyl ribonucleotide
  modified_base 80: mod_base = OTHER; note = 2'-O-methyl ribonucleotide
  modified_base 81: mod_base = OTHER; note = 2'-O-methyl ribonucleotide
  modified_base 83: mod_base = OTHER; note = 2'-O-methyl ribonucleotide
  modified_base 84: mod_base = OTHER; note = 2'-O-methyl ribonucleotide
  modified_base 85: mod_base = OTHER; note = 2'-O-methyl ribonucleotide
  modified_base 86: mod_base = OTHER; note = 2'-O-methyl ribonucleotide
  modified_base 87: mod_base = OTHER; note = 2'-O-methyl ribonucleotide
  modified_base 88: mod_base = OTHER; note = 2'-O-methyl ribonucleotide
  modified_base 89: mod_base = OTHER; note = 2'-O-methyl ribonucleotide
  modified_base 90: mod_base = OTHER; note = 2'-O-methyl ribonucleotide
  modified_base 91: mod_base = OTHER; note = 2'-O-methyl ribonucleotide
  modified_base 92: mod_base = OTHER; note = 2'-O-methyl ribonucleotide
  modified_base 93: mod_base = OTHER; note = 2'-O-methyl ribonucleotide
  modified_base 94: mod_base = OTHER; note = 2'-O-methyl ribonucleotide
  modified_base 95: mod_base = OTHER; note = 2'-O-methyl ribonucleotide
  modified_base 96: mod_base = OTHER; note = 2'-O-methyl ribonucleotide
  modified_base 97: mod_base = OTHER; note = 2'-O-methyl ribonucleotide
  modified_base 98: mod_base = OTHER; note = 2'-O-methyl ribonucleotide
  modified_base 99: mod_base = OTHER; note = 2'-O-methyl ribonucleotide
  modified_base 100: mod_base = OTHER; note = 2'-O-methyl ribonucleotide
  modified_base 1..3: mod_base = OTHER; note = phosphorothioate linkage
  modified_base 25..26: mod_base = OTHER; note = phosphorothioate linkage
  modified_base 45..46: mod_base = OTHER; note = phosphorothioate linkage
  modified_base 64..65: mod_base = OTHER; note = phosphorothioate linkage
  modified_base 98..100: mod_base = OTHER; note = phosphorothioate linkage

SEQ ID NO: 1699 - RNA, 103 nt, synthetic construct
  source 1..103: mol_type = other RNA
  modified_base 1: mod_base = OTHER; note = 2'-O-methyl ribonucleotide
  modified_base 2: mod_base = OTHER; note = 2'-O-methyl ribonucleotide
  modified_base 3: mod_base = OTHER; note = 2'-O-methyl ribonucleotide
  modified_base 21: mod_base = OTHER; note = 2'-O-methyl ribonucleotide
  modified_base 28: mod_base = OTHER; note = 2'-O-methyl ribonucleotide
  modified_base 29: mod_base = OTHER; note = 2'-O-methyl ribonucleotide
  modified_base 30: mod_base = OTHER; note = 2'-O-methyl ribonucleotide
  modified_base 31: mod_base = OTHER; note = 2'-O-methyl ribonucleotide
  modified_base 32: mod_base = OTHER; note = 2'-O-methyl ribonucleotide
  modified_base 34: mod_base = OTHER; note = 2'-O-methyl ribonucleotide
  modified_base 35: mod_base = OTHER; note = 2'-O-methyl ribonucleotide
  modified_base 36: mod_base = OTHER; note = 2'-O-methyl ribonucleotide
  modified_base 37: mod_base = OTHER; note = 2'-O-methyl ribonucleotide
  modified_base 38: mod_base = OTHER; note = 2'-O-methyl ribonucleotide
  modified_base 39: mod_base = OTHER; note = 2'-O-methyl ribonucleotide
  modified_base 40: mod_base = OTHER; note = 2'-O-methyl ribonucleotide
  modified_base 41: mod_base = OTHER; note = 2'-O-methyl ribonucleotide
  modified_base 42: mod_base = OTHER; note = 2'-O-methyl ribonucleotide
  modified_base 46: mod_base = OTHER; note = 2'-O-methyl ribonucleotide
  modified_base 48: mod_base = OTHER; note = 2'-O-methyl ribonucleotide
  modified_base 50: mod_base = OTHER; note = 2'-O-methyl ribonucleotide
  modified_base 52: mod_base = OTHER; note = 2'-O-methyl ribonucleotide
  modified_base 53: mod_base = OTHER; note = 2'-O-methyl ribonucleotide
  modified_base 54: mod_base = OTHER; note = 2'-O-methyl ribonucleotide
  modified_base 57: mod_base = OTHER; note = 2'-O-methyl ribonucleotide
  modified_base 61: mod_base = OTHER; note = 2'-O-methyl ribonucleotide
  modified_base 66: mod_base = OTHER; note = 2'-O-methyl ribonucleotide
  modified_base 67: mod_base = OTHER; note = 2'-O-methyl ribonucleotide
  modified_base 70: mod_base = OTHER; note = 2'-O-methyl ribonucleotide
  modified_base 71: mod_base = OTHER; note = 2'-O-methyl ribonucleotide
  modified_base 72: mod_base = OTHER; note = 2'-O-methyl ribonucleotide
  modified_base 74: mod_base = OTHER; note = 2'-O-methyl ribonucleotide
  modified_base 75: mod_base = OTHER; note = 2'-O-methyl ribonucleotide
  modified_base 76: mod_base = OTHER; note = 2'-O-methyl ribonucleotide
  modified_base 77: mod_base = OTHER; note = 2'-O-methyl ribonucleotide
  modified_base 78: mod_base = OTHER; note = 2'-O-methyl ribonucleotide
  modified_base 79: mod_base = OTHER; note = 2'-O-methyl ribonucleotide
  modified_base 80: mod_base = OTHER; note = 2'-O-methyl ribonucleotide
  modified_base 82: mod_base = OTHER; note = 2'-O-methyl ribonucleotide
  modified_base 83: mod_base = OTHER; note = 2'-O-methyl ribonucleotide
  modified_base 84: mod_base = OTHER; note = 2'-O-methyl ribonucleotide
  modified_base 85: mod_base = OTHER; note = 2'-O-methyl ribonucleotide
  modified_base 86: mod_base = OTHER; note = 2'-O-methyl ribonucleotide
  modified_base 87: mod_base = OTHER; note = 2'-O-methyl ribonucleotide
  modified_base 89: mod_base = OTHER; note = 2'-O-methyl ribonucleotide
  modified_base 92: mod_base = OTHER; note = 2'-O-methyl ribonucleotide
  modified_base 93: mod_base = OTHER; note = 2'-O-methyl ribonucleotide
  modified_base 94: mod_base = OTHER; note = 2'-O-methyl ribonucleotide
  modified_base 95: mod_base = OTHER; note = 2'-O-methyl ribonucleotide
  modified_base 96: mod_base = OTHER; note = 2'-O-methyl ribonucleotide
  modified_base 97: mod_base = OTHER; note = 2'-O-methyl ribonucleotide
  modified_base 98: mod_base = OTHER; note = 2'-O-methyl ribonucleotide
  modified_base 99: mod_base = OTHER; note = 2'-O-methyl ribonucleotide
  modified_base 100: mod_base = OTHER; note = 2'-O-methyl ribonucleotide
  modified_base 1..4: mod_base = OTHER; note = phosphorothioate linkage
  modified_base 97..100: mod_base = OTHER; note = phosphorothioate linkage
gagatacctgagtaactttcgttttagagctagaaatagcaagttaaaataaggctagtccgttatcaacttgaaaaagtggcaccgagtcggtgcttttttt

SEQ ID NO: 1700 - RNA, 103 nt, synthetic construct
  source 1..103: mol_type = other RNA
  modified_base 1: mod_base = OTHER; note = 2'-O-methyl ribonucleotide
  modified_base 2: mod_base = OTHER; note = 2'-O-methyl ribonucleotide
  modified_base 3: mod_base = OTHER; note = 2'-O-methyl ribonucleotide
  modified_base 21: mod_base = OTHER; note = 2'-O-methyl ribonucleotide
  modified_base 28: mod_base = OTHER; note = 2'-O-methyl ribonucleotide
  modified_base 29: mod_base = OTHER; note = 2'-O-methyl ribonucleotide
  modified_base 30: mod_base = OTHER; note = 2'-O-methyl ribonucleotide
  modified_base 31: mod_base = OTHER; note = 2'-O-methyl ribonucleotide
  modified_base 32: mod_base = OTHER; note = 2'-O-methyl ribonucleotide
  modified_base 34: mod_base = OTHER; note = 2'-O-methyl ribonucleotide
  modified_base 35: mod_base = OTHER; note = 2'-O-methyl ribonucleotide
  modified_base 36: mod_base = OTHER; note = 2'-O-methyl ribonucleotide
  modified_base 37: mod_base = OTHER; note = 2'-O-methyl ribonucleotide
  modified_base 38: mod_base = OTHER; note = 2'-O-methyl ribonucleotide
  modified_base 39: mod_base = OTHER; note = 2'-O-methyl ribonucleotide
  modified_base 40: mod_base = OTHER; note = 2'-O-methyl ribonucleotide
  modified_base 41: mod_base = OTHER; note = 2'-O-methyl ribonucleotide
  modified_base 42: mod_base = OTHER; note = 2'-O-methyl ribonucleotide
  modified_base 46: mod_base = OTHER; note = 2'-O-methyl ribonucleotide
  modified_base 48: mod_base = OTHER; note = 2'-O-methyl ribonucleotide
  modified_base 50: mod_base = OTHER; note = 2'-O-methyl ribonucleotide
  modified_base 52: mod_base = OTHER; note = 2'-O-methyl ribonucleotide
  modified_base 53: mod_base = OTHER; note = 2'-O-methyl ribonucleotide
  modified_base 54: mod_base = OTHER; note = 2'-O-methyl ribonucleotide
  modified_base 55: mod_base = OTHER; note = 2'-O-methyl ribonucleotide
  modified_base 56: mod_base = OTHER; note = 2'-O-methyl ribonucleotide
  modified_base 57: mod_base = OTHER; note = 2'-O-methyl ribonucleotide
  modified_base 60: mod_base = OTHER; note = 2'-O-methyl ribonucleotide
  modified_base 61: mod_base = OTHER; note = 2'-O-methyl ribonucleotide
  modified_base 66: mod_base = OTHER; note = 2'-O-methyl ribonucleotide
  modified_base 67: mod_base = OTHER; note = 2'-O-methyl ribonucleotide
  modified_base 70: mod_base = OTHER; note = 2'-O-methyl ribonucleotide
  modified_base 71: mod_base = OTHER; note = 2'-O-methyl ribonucleotide
  modified_base 72: mod_base = OTHER; note = 2'-O-methyl ribonucleotide
  modified_base 74: mod_base = OTHER; note = 2'-O-methyl ribonucleotide
  modified_base 75: mod_base = OTHER; note = 2'-O-methyl ribonucleotide
  modified_base 76: mod_base = OTHER; note = 2'-O-methyl ribonucleotide
  modified_base 77: mod_base = OTHER; note = 2'-O-methyl ribonucleotide
  modified_base 78: mod_base = OTHER; note = 2'-O-methyl ribonucleotide
  modified_base 79: mod_base = OTHER; note = 2'-O-methyl ribonucleotide
  modified_base 80: mod_base = OTHER; note = 2'-O-methyl ribonucleotide
  modified_base 81: mod_base = OTHER; note = 2'-O-methyl ribonucleotide
  modified_base 83: mod_base = OTHER; note = 2'-O-methyl ribonucleotide
  modified_base 84: mod_base = OTHER; note = 2'-O-methyl ribonucleotide
  modified_base 85: mod_base = OTHER; note = 2'-O-methyl ribonucleotide
  modified_base 86: mod_base = OTHER; note = 2'-O-methyl ribonucleotide
  modified_base 87: mod_base = OTHER; note = 2'-O-methyl ribonucleotide
  modified_base 88: mod_base = OTHER; note = 2'-O-methyl ribonucleotide
  modified_base 89: mod_base = OTHER; note = 2'-O-methyl ribonucleotide
  modified_base 90: mod_base = OTHER; note = 2'-O-methyl ribonucleotide
  modified_base 91: mod_base = OTHER; note = 2'-O-methyl ribonucleotide
  modified_base 92: mod_base = OTHER; note = 2'-O-methyl ribonucleotide
  modified_base 93: mod_base = OTHER; note = 2'-O-methyl ribonucleotide
  modified_base 94: mod_base = OTHER; note = 2'-O-methyl ribonucleotide
  modified_base 95: mod_base = OTHER; note = 2'-O-methyl ribonucleotide
  modified_base 96: mod_base = OTHER; note = 2'-O-methyl ribonucleotide
  modified_base 97: mod_base = OTHER; note = 2'-O-methyl ribonucleotide
  modified_base 98: mod_base = OTHER; note = 2'-O-methyl ribonucleotide
  modified_base 99: mod_base = OTHER; note = 2'-O-methyl ribonucleotide
  modified_base 100: mod_base = OTHER; note = 2'-O-methyl ribonucleotide
  modified_base 1..4: mod_base = OTHER; note = phosphorothioate linkage
  modified_base 97..100: mod_base = OTHER; note = phosphorothioate linkage
caggttccatgggatgctctgttttagagctagaaatagcaagttaaaataaggctagtccgttatcaacttgaaaaagtggcaccgagtcggtgcttttttt

SEQ ID NO: 1701 - RNA, 103 nt, synthetic construct; identical to SEQ ID NO: 1643
  source 1..103: mol_type = other RNA
  modified_base 1: mod_base = OTHER; note = 2'-O-methyl ribonucleotide
  modified_base 2: mod_base = OTHER; note = 2'-O-methyl ribonucleotide
  modified_base 3: mod_base = OTHER; note = 2'-O-methyl ribonucleotide
  modified_base 21: mod_base = OTHER; note = 2'-O-methyl ribonucleotide
  modified_base 28: mod_base = OTHER; note = 2'-O-methyl ribonucleotide
  modified_base 29: mod_base = OTHER; note = 2'-O-methyl ribonucleotide
  modified_base 30: mod_base = OTHER; note = 2'-O-methyl ribonucleotide
  modified_base 31: mod_base = OTHER; note = 2'-O-methyl ribonucleotide
  modified_base 32: mod_base = OTHER; note = 2'-O-methyl ribonucleotide
  modified_base 34: mod_base = OTHER; note = 2'-O-methyl ribonucleotide
  modified_base 35: mod_base = OTHER; note = 2'-O-methyl ribonucleotide
  modified_base 36: mod_base = OTHER; note = 2'-O-methyl ribonucleotide
  modified_base 37: mod_base = OTHER; note = 2'-O-methyl ribonucleotide
  modified_base 38: mod_base = OTHER; note = 2'-O-methyl ribonucleotide
  modified_base 39: mod_base = OTHER; note = 2'-O-methyl ribonucleotide
  modified_base 40: mod_base = OTHER; note = 2'-O-methyl ribonucleotide
  modified_base 41: mod_base = OTHER; note = 2'-O-methyl ribonucleotide
  modified_base 42: mod_base = OTHER; note = 2'-O-methyl ribonucleotide
  modified_base 46: mod_base = OTHER; note = 2'-O-methyl ribonucleotide
  modified_base 48: mod_base = OTHER; note = 2'-O-methyl ribonucleotide
  modified_base 50: mod_base = OTHER; note = 2'-O-methyl ribonucleotide
  modified_base 52: mod_base = OTHER; note = 2'-O-methyl ribonucleotide
  modified_base 53: mod_base = OTHER; note = 2'-O-methyl ribonucleotide
  modified_base 54: mod_base = OTHER; note = 2'-O-methyl ribonucleotide
  modified_base 57: mod_base = OTHER; note = 2'-O-methyl ribonucleotide
  modified_base 61: mod_base = OTHER; note = 2'-O-methyl ribonucleotide
  modified_base 66: mod_base = OTHER; note = 2'-O-methyl ribonucleotide
  modified_base 67: mod_base = OTHER; note = 2'-O-methyl ribonucleotide
  modified_base 70: mod_base = OTHER; note = 2'-O-methyl ribonucleotide
  modified_base 71: mod_base = OTHER; note = 2'-O-methyl ribonucleotide
  modified_base 72: mod_base = OTHER; note = 2'-O-methyl ribonucleotide
  modified_base 74: mod_base = OTHER; note = 2'-O-methyl ribonucleotide
  modified_base 75: mod_base = OTHER; note = 2'-O-methyl ribonucleotide
  modified_base 76: mod_base = OTHER; note = 2'-O-methyl ribonucleotide
  modified_base 77: mod_base = OTHER; note = 2'-O-methyl ribonucleotide
  modified_base 78: mod_base = OTHER; note = 2'-O-methyl ribonucleotide
  modified_base 79: mod_base = OTHER; note = 2'-O-methyl ribonucleotide
  modified_base 80: mod_base = OTHER; note = 2'-O-methyl ribonucleotide
  modified_base 82: mod_base = OTHER; note = 2'-O-methyl ribonucleotide
  modified_base 83: mod_base = OTHER; note = 2'-O-methyl ribonucleotide
  modified_base 84: mod_base = OTHER; note = 2'-O-methyl ribonucleotide
  modified_base 85: mod_base = OTHER; note = 2'-O-methyl ribonucleotide
  modified_base 86: mod_base = OTHER; note = 2'-O-methyl ribonucleotide
  modified_base 87: mod_base = OTHER; note = 2'-O-methyl ribonucleotide
  modified_base 89: mod_base = OTHER; note = 2'-O-methyl ribonucleotide
  modified_base 92: mod_base = OTHER; note = 2'-O-methyl ribonucleotide
  modified_base 93: mod_base = OTHER; note = 2'-O-methyl ribonucleotide
  modified_base 94: mod_base = OTHER; note = 2'-O-methyl ribonucleotide
  modified_base 95: mod_base = OTHER; note = 2'-O-methyl ribonucleotide
  modified_base 96: mod_base = OTHER; note = 2'-O-methyl ribonucleotide
  modified_base 97: mod_base = OTHER; note = 2'-O-methyl ribonucleotide
  modified_base 98: mod_base = OTHER; note = 2'-O-methyl ribonucleotide
  modified_base 99: mod_base = OTHER; note = 2'-O-methyl ribonucleotide
  modified_base 100: mod_base = OTHER; note = 2'-O-methyl ribonucleotide
  modified_base 1..4: mod_base = OTHER; note = phosphorothioate linkage
  modified_base 64..65: mod_base = OTHER; note = phosphorothioate linkage
  modified_base 97..100: mod_base = OTHER; note = phosphorothioate linkage

SEQ ID NO: 1702 - RNA, 103 nt, synthetic construct; identical to SEQ ID NO: 1699
  source 1..103: mol_type = other RNA
  modified_base 1: mod_base = OTHER; note = 2'-O-methyl ribonucleotide
  modified_base 2: mod_base = OTHER; note = 2'-O-methyl ribonucleotide
  modified_base 3: mod_base = OTHER; note = 2'-O-methyl ribonucleotide
  modified_base 21: mod_base = OTHER; note = 2'-O-methyl ribonucleotide
  modified_base 28: mod_base = OTHER; note = 2'-O-methyl ribonucleotide
  modified_base 29: mod_base = OTHER; note = 2'-O-methyl ribonucleotide
  modified_base 30: mod_base = OTHER; note = 2'-O-methyl ribonucleotide
  modified_base 31: mod_base = OTHER; note = 2'-O-methyl ribonucleotide
  modified_base 32: mod_base = OTHER; note = 2'-O-methyl ribonucleotide
  modified_base 34: mod_base = OTHER; note = 2'-O-methyl ribonucleotide
  modified_base 35: mod_base = OTHER; note = 2'-O-methyl ribonucleotide
  modified_base 36: mod_base = OTHER; note = 2'-O-methyl ribonucleotide
  modified_base 37: mod_base = OTHER; note = 2'-O-methyl ribonucleotide
  modified_base 38: mod_base = OTHER; note = 2'-O-methyl ribonucleotide
  modified_base 39: mod_base = OTHER; note = 2'-O-methyl ribonucleotide
  modified_base 40: mod_base = OTHER; note = 2'-O-methyl ribonucleotide
  modified_base 41: mod_base = OTHER; note = 2'-O-methyl ribonucleotide
  modified_base 42: mod_base = OTHER; note = 2'-O-methyl ribonucleotide
  modified_base 46: mod_base = OTHER; note = 2'-O-methyl ribonucleotide
  modified_base 48: mod_base = OTHER; note = 2'-O-methyl ribonucleotide
  modified_base 50: mod_base = OTHER; note = 2'-O-methyl ribonucleotide
  modified_base 52: mod_base = OTHER; note = 2'-O-methyl ribonucleotide
  modified_base 53: mod_base = OTHER; note = 2'-O-methyl ribonucleotide
  modified_base 54: mod_base = OTHER; note = 2'-O-methyl ribonucleotide
  modified_base 57: mod_base = OTHER; note = 2'-O-methyl ribonucleotide
  modified_base 61: mod_base = OTHER; note = 2'-O-methyl ribonucleotide
  modified_base 66: mod_base = OTHER; note = 2'-O-methyl ribonucleotide
  modified_base 67: mod_base = OTHER; note = 2'-O-methyl ribonucleotide
  modified_base 70: mod_base = OTHER; note = 2'-O-methyl ribonucleotide
  modified_base 71: mod_base = OTHER; note = 2'-O-methyl ribonucleotide
  modified_base 72: mod_base = OTHER; note = 2'-O-methyl ribonucleotide
  modified_base 74: mod_base = OTHER; note = 2'-O-methyl ribonucleotide
  modified_base 75: mod_base = OTHER; note = 2'-O-methyl ribonucleotide
  modified_base 76: mod_base = OTHER; note = 2'-O-methyl ribonucleotide
  modified_base 77: mod_base = OTHER; note = 2'-O-methyl ribonucleotide
  modified_base 78: mod_base = OTHER; note = 2'-O-methyl ribonucleotide
  modified_base 79: mod_base = OTHER; note = 2'-O-methyl ribonucleotide
  modified_base 80: mod_base = OTHER; note = 2'-O-methyl ribonucleotide
  modified_base 82: mod_base = OTHER; note = 2'-O-methyl ribonucleotide
  modified_base 83: mod_base = OTHER; note = 2'-O-methyl ribonucleotide
  modified_base 84: mod_base = OTHER; note = 2'-O-methyl ribonucleotide
  modified_base 85: mod_base = OTHER; note = 2'-O-methyl ribonucleotide
  modified_base 86: mod_base = OTHER; note = 2'-O-methyl ribonucleotide
  modified_base 87: mod_base = OTHER; note = 2'-O-methyl ribonucleotide
  modified_base 89: mod_base = OTHER; note = 2'-O-methyl ribonucleotide
  modified_base 92: mod_base = OTHER; note = 2'-O-methyl ribonucleotide
  modified_base 93: mod_base = OTHER; note = 2'-O-methyl ribonucleotide
  modified_base 94: mod_base = OTHER; note = 2'-O-methyl ribonucleotide
  modified_base 95: mod_base = OTHER; note = 2'-O-methyl ribonucleotide
  modified_base 96: mod_base = OTHER; note = 2'-O-methyl ribonucleotide
  modified_base 97: mod_base = OTHER; note = 2'-O-methyl ribonucleotide
  modified_base 98: mod_base = OTHER; note = 2'-O-methyl ribonucleotide
  modified_base 99: mod_base = OTHER; note = 2'-O-methyl ribonucleotide
  modified_base 100: mod_base = OTHER; note = 2'-O-methyl ribonucleotide
  modified_base 1..4: mod_base = OTHER; note = phosphorothioate linkage
  modified_base 64..65: mod_base = OTHER; note = phosphorothioate linkage
  modified_base 97..100: mod_base = OTHER; note = phosphorothioate linkage

SEQ ID NO: 1703 - RNA, 103 nt, synthetic construct; identical to SEQ ID NO: 1700
  source 1..103: mol_type = other RNA
  modified_base 1: mod_base = OTHER; note = 2'-O-methyl ribonucleotide
  modified_base 2: mod_base = OTHER; note = 2'-O-methyl ribonucleotide
  modified_base 3: mod_base = OTHER; note = 2'-O-methyl ribonucleotide
  modified_base 21: mod_base = OTHER; note = 2'-O-methyl ribonucleotide
  modified_base 28: mod_base = OTHER; note = 2'-O-methyl ribonucleotide
  modified_base 29: mod_base = OTHER; note = 2'-O-methyl ribonucleotide
  modified_base 30: mod_base = OTHER; note = 2'-O-methyl ribonucleotide
  modified_base 31: mod_base = OTHER; note = 2'-O-methyl ribonucleotide
  modified_base 32: mod_base = OTHER; note = 2'-O-methyl ribonucleotide
  modified_base 34: mod_base = OTHER; note = 2'-O-methyl ribonucleotide
  modified_base 35: mod_base = OTHER; note = 2'-O-methyl ribonucleotide
  modified_base 36: mod_base = OTHER; note = 2'-O-methyl ribonucleotide
  modified_base 37: mod_base = OTHER; note = 2'-O-methyl ribonucleotide
  modified_base 38: mod_base = OTHER; note = 2'-O-methyl ribonucleotide
  modified_base 39: mod_base = OTHER; note = 2'-O-methyl ribonucleotide
  modified_base 40: mod_base = OTHER; note = 2'-O-methyl ribonucleotide
  modified_base 41: mod_base = OTHER; note = 2'-O-methyl ribonucleotide
  modified_base 42: mod_base = OTHER; note = 2'-O-methyl ribonucleotide
  modified_base 46: mod_base = OTHER; note = 2'-O-methyl ribonucleotide
  modified_base 48: mod_base = OTHER; note = 2'-O-methyl ribonucleotide
  modified_base 50: mod_base = OTHER; note = 2'-O-methyl ribonucleotide
  modified_base 52: mod_base = OTHER; note = 2'-O-methyl ribonucleotide
  modified_base 53: mod_base = OTHER; note = 2'-O-methyl ribonucleotide
  modified_base 54: mod_base = OTHER; note = 2'-O-methyl ribonucleotide
  modified_base 55: mod_base = OTHER; note = 2'-O-methyl ribonucleotide
  modified_base 56: mod_base = OTHER; note = 2'-O-methyl ribonucleotide
  modified_base 57: mod_base = OTHER; note = 2'-O-methyl ribonucleotide
  modified_base 60: mod_base = OTHER; note = 2'-O-methyl ribonucleotide
  modified_base 61: mod_base = OTHER; note = 2'-O-methyl ribonucleotide
  modified_base 66: mod_base = OTHER; note = 2'-O-methyl ribonucleotide
  modified_base 67: mod_base = OTHER; note = 2'-O-methyl ribonucleotide
  modified_base 70: mod_base = OTHER; note = 2'-O-methyl ribonucleotide
  modified_base 71: mod_base = OTHER; note = 2'-O-methyl ribonucleotide
  modified_base 72: mod_base = OTHER; note = 2'-O-methyl ribonucleotide
  modified_base 74: mod_base = OTHER; note = 2'-O-methyl ribonucleotide
  modified_base 75: mod_base = OTHER; note = 2'-O-methyl ribonucleotide
  modified_base 76: mod_base = OTHER; note = 2'-O-methyl ribonucleotide
  modified_base 77: mod_base = OTHER; note = 2'-O-methyl ribonucleotide
  modified_base 78: mod_base = OTHER; note = 2'-O-methyl ribonucleotide
  modified_base 79: mod_base = OTHER; note = 2'-O-methyl ribonucleotide
  modified_base 80: mod_base = OTHER; note = 2'-O-methyl ribonucleotide
  modified_base 81: mod_base = OTHER; note = 2'-O-methyl ribonucleotide
  modified_base 83: mod_base = OTHER; note = 2'-O-methyl ribonucleotide
  modified_base 84: mod_base = OTHER; note = 2'-O-methyl ribonucleotide
  modified_base 85: mod_base = OTHER; note = 2'-O-methyl ribonucleotide
  modified_base 86: mod_base = OTHER; note = 2'-O-methyl ribonucleotide
  modified_base 87: mod_base = OTHER; note = 2'-O-methyl ribonucleotide
  modified_base 88: mod_base = OTHER; note = 2'-O-methyl ribonucleotide
  modified_base 89: mod_base = OTHER; note = 2'-O-methyl ribonucleotide
  modified_base 90: mod_base = OTHER; note = 2'-O-methyl ribonucleotide
  modified_base 91: mod_base = OTHER; note = 2'-O-methyl ribonucleotide
  modified_base 92: mod_base = OTHER; note = 2'-O-methyl ribonucleotide
  modified_base 93: mod_base = OTHER; note = 2'-O-methyl ribonucleotide
  modified_base 94: mod_base = OTHER; note = 2'-O-methyl ribonucleotide
  modified_base 95: mod_base = OTHER; note = 2'-O-methyl ribonucleotide
  modified_base 96: mod_base = OTHER; note = 2'-O-methyl ribonucleotide
  modified_base 97: mod_base = OTHER; note = 2'-O-methyl ribonucleotide
  modified_base 98: mod_base = OTHER; note = 2'-O-methyl ribonucleotide
  modified_base 99: mod_base = OTHER; note = 2'-O-methyl ribonucleotide
  modified_base 100: mod_base = OTHER; note = 2'-O-methyl ribonucleotide
  modified_base 1..4: mod_base = OTHER; note = phosphorothioate linkage
  modified_base 64..65: mod_base = OTHER; note = phosphorothioate linkage
  modified_base 97..100: mod_base = OTHER; note = phosphorothioate linkage

SEQ ID NO: 1704 - RNA, 103 nt, synthetic construct; identical to SEQ ID NO: 1643
  source 1..103: mol_type = other RNA
  modified_base 1: mod_base = OTHER; note = 2'-O-methyl ribonucleotide
  modified_base 2: mod_base = OTHER; note = 2'-O-methyl ribonucleotide
  modified_base 3: mod_base = OTHER; note = 2'-O-methyl ribonucleotide
  modified_base 21: mod_base = OTHER; note = 2'-O-methyl ribonucleotide
  modified_base 28: mod_base = OTHER; note = 2'-O-methyl ribonucleotide
  modified_base 29: mod_base = OTHER; note = 2'-O-methyl ribonucleotide
  modified_base 30: mod_base = OTHER; note = 2'-O-methyl ribonucleotide
  modified_base 31: mod_base = OTHER; note = 2'-O-methyl ribonucleotide
  modified_base 32: mod_base = OTHER; note = 2'-O-methyl ribonucleotide
  modified_base 34: mod_base = OTHER; note = 2'-O-methyl ribonucleotide
  modified_base 35: mod_base = OTHER; note = 2'-O-methyl ribonucleotide
  modified_base 36: mod_base = OTHER; note = 2'-O-methyl ribonucleotide
  modified_base 37: mod_base = OTHER; note = 2'-O-methyl ribonucleotide
  modified_base 38: mod_base = OTHER; note = 2'-O-methyl ribonucleotide
  modified_base 39: mod_base = OTHER; note = 2'-O-methyl ribonucleotide
  modified_base 40: mod_base = OTHER; note = 2'-O-methyl ribonucleotide
  modified_base 41: mod_base = OTHER; note = 2'-O-methyl ribonucleotide
  modified_base 42: mod_base = OTHER; note = 2'-O-methyl ribonucleotide
  modified_base 46: mod_base = OTHER; note = 2'-O-methyl ribonucleotide
  modified_base 48: mod_base = OTHER; note = 2'-O-methyl ribonucleotide
  modified_base 50: mod_base = OTHER; note = 2'-O-methyl ribonucleotide
  modified_base 52: mod_base = OTHER; note = 2'-O-methyl ribonucleotide
  modified_base 53: mod_base = OTHER; note = 2'-O-methyl ribonucleotide
  modified_base 54: mod_base = OTHER; note = 2'-O-methyl ribonucleotide
  modified_base 57: mod_base = OTHER; note = 2'-O-methyl ribonucleotide
  modified_base 61: mod_base = OTHER; note = 2'-O-methyl ribonucleotide
  modified_base 66: mod_base = OTHER; note = 2'-O-methyl ribonucleotide
  modified_base 67: mod_base = OTHER; note = 2'-O-methyl ribonucleotide
  modified_base 70: mod_base = OTHER; note = 2'-O-methyl ribonucleotide
  modified_base 71: mod_base = OTHER; note = 2'-O-methyl ribonucleotide
  modified_base 72: mod_base = OTHER; note = 2'-O-methyl ribonucleotide
  modified_base 74: mod_base = OTHER; note = 2'-O-methyl ribonucleotide
  modified_base 75: mod_base = OTHER; note = 2'-O-methyl ribonucleotide
  modified_base 76: mod_base = OTHER; note = 2'-O-methyl ribonucleotide
  modified_base 77: mod_base = OTHER; note = 2'-O-methyl ribonucleotide
  modified_base 78: mod_base = OTHER; note = 2'-O-methyl ribonucleotide
  modified_base 79: mod_base = OTHER; note = 2'-O-methyl ribonucleotide
  modified_base 80: mod_base = OTHER; note = 2'-O-methyl ribonucleotide
  modified_base 82: mod_base = OTHER; note = 2'-O-methyl ribonucleotide
  modified_base 83: mod_base = OTHER; note = 2'-O-methyl ribonucleotide
  modified_base 84: mod_base = OTHER; note = 2'-O-methyl ribonucleotide
  modified_base 85: mod_base = OTHER; note = 2'-O-methyl ribonucleotide
  modified_base 86: mod_base = OTHER; note = 2'-O-methyl ribonucleotide
  modified_base 87: mod_base = OTHER; note = 2'-O-methyl ribonucleotide
  modified_base 89: mod_base = OTHER; note = 2'-O-methyl ribonucleotide
  modified_base 92: mod_base = OTHER; note = 2'-O-methyl ribonucleotide
  modified_base 93: mod_base = OTHER; note = 2'-O-methyl ribonucleotide
  modified_base 94: mod_base = OTHER; note = 2'-O-methyl ribonucleotide
  modified_base 95: mod_base = OTHER; note = 2'-O-methyl ribonucleotide
  modified_base 96: mod_base = OTHER; note = 2'-O-methyl ribonucleotide
  modified_base 97: mod_base = OTHER; note = 2'-O-methyl ribonucleotide
  modified_base 98: mod_base = OTHER; note = 2'-O-methyl ribonucleotide
  modified_base 99: mod_base = OTHER; note = 2'-O-methyl ribonucleotide
  modified_base 100: mod_base = OTHER; note = 2'-O-methyl ribonucleotide
  modified_base 1..4: mod_base = OTHER; note = phosphorothioate linkage
  modified_base 45..46: mod_base = OTHER; note = phosphorothioate linkage
  modified_base 97..100: mod_base = OTHER; note = phosphorothioate linkage

SEQ ID NO: 1705 - RNA, 103 nt, synthetic construct; identical to SEQ ID NO: 1699
  source 1..103: mol_type = other RNA
  modified_base 1: mod_base = OTHER; note = 2'-O-methyl ribonucleotide
  modified_base 2: mod_base = OTHER; note = 2'-O-methyl ribonucleotide
  modified_base 3: mod_base = OTHER; note = 2'-O-methyl ribonucleotide
  modified_base 21: mod_base = OTHER; note = 2'-O-methyl ribonucleotide
  modified_base 28: mod_base = OTHER; note = 2'-O-methyl ribonucleotide
  modified_base 29: mod_base = OTHER; note = 2'-O-methyl ribonucleotide
  modified_base 30: mod_base = OTHER; note = 2'-O-methyl ribonucleotide
  modified_base 31: mod_base = OTHER; note = 2'-O-methyl ribonucleotide
  modified_base 32: mod_base = OTHER; note = 2'-O-methyl ribonucleotide
  modified_base 34: mod_base = OTHER; note = 2'-O-methyl ribonucleotide
  modified_base 35: mod_base = OTHER; note = 2'-O-methyl ribonucleotide
  modified_base 36: mod_base = OTHER; note = 2'-O-methyl ribonucleotide
  modified_base 37: mod_base = OTHER; note = 2'-O-methyl ribonucleotide
  modified_base 38: mod_base = OTHER; note = 2'-O-methyl ribonucleotide
  modified_base 39: mod_base = OTHER; note = 2'-O-methyl ribonucleotide
  modified_base 40: mod_base = OTHER; note = 2'-O-methyl ribonucleotide
  modified_base 41: mod_base = OTHER; note = 2'-O-methyl ribonucleotide
  modified_base 42: mod_base = OTHER; note = 2'-O-methyl ribonucleotide
  modified_base 46: mod_base = OTHER; note = 2'-O-methyl ribonucleotide
  modified_base 48: mod_base = OTHER; note = 2'-O-methyl ribonucleotide
  modified_base 50: mod_base = OTHER; note = 2'-O-methyl ribonucleotide
  modified_base 52: mod_base = OTHER; note = 2'-O-methyl ribonucleotide
  modified_base 53: mod_base = OTHER; note = 2'-O-methyl ribonucleotide
  modified_base 54: mod_base = OTHER; note = 2'-O-methyl ribonucleotide
  modified_base 57: mod_base = OTHER; note = 2'-O-methyl ribonucleotide
  modified_base 61: mod_base = OTHER; note = 2'-O-methyl ribonucleotide
  modified_base 66: mod_base = OTHER; note = 2'-O-methyl ribonucleotide
  modified_base 67: mod_base = OTHER; note = 2'-O-methyl ribonucleotide
  modified_base 70: mod_base = OTHER; note = 2'-O-methyl ribonucleotide
  modified_base 71: mod_base = OTHER; note = 2'-O-methyl ribonucleotide
  modified_base 72: mod_base = OTHER; note = 2'-O-methyl ribonucleotide
  modified_base 74: mod_base = OTHER; note = 2'-O-methyl ribonucleotide
  modified_base 75: mod_base = OTHER; note = 2'-O-methyl ribonucleotide
  modified_base 76: mod_base = OTHER; note = 2'-O-methyl ribonucleotide
  modified_base 77: mod_base = OTHER; note = 2'-O-methyl ribonucleotide
  modified_base 78: mod_base = OTHER; note = 2'-O-methyl ribonucleotide
  modified_base 79: mod_base = OTHER; note = 2'-O-methyl ribonucleotide
  modified_base 80: mod_base = OTHER; note = 2'-O-methyl ribonucleotide
  modified_base 82: mod_base = OTHER; note = 2'-O-methyl ribonucleotide
  modified_base 83: mod_base = OTHER; note = 2'-O-methyl ribonucleotide
  modified_base 84: mod_base = OTHER; note = 2'-O-methyl ribonucleotide
  modified_base 85: mod_base = OTHER; note = 2'-O-methyl ribonucleotide
  modified_base 86: mod_base = OTHER; note = 2'-O-methyl ribonucleotide
  modified_base 87: mod_base = OTHER; note = 2'-O-methyl ribonucleotide
  modified_base 89: mod_base = OTHER; note = 2'-O-methyl ribonucleotide
  modified_base 92: mod_base = OTHER; note = 2'-O-methyl ribonucleotide
  modified_base 93: mod_base = OTHER; note = 2'-O-methyl ribonucleotide
  modified_base 94: mod_base = OTHER; note = 2'-O-methyl ribonucleotide
  modified_base 95: mod_base = OTHER; note = 2'-O-methyl ribonucleotide
  modified_base 96: mod_base = OTHER; note = 2'-O-methyl ribonucleotide
  modified_base 97: mod_base = OTHER; note = 2'-O-methyl ribonucleotide
  modified_base 98: mod_base = OTHER; note = 2'-O-methyl ribonucleotide
  modified_base 99: mod_base = OTHER; note = 2'-O-methyl ribonucleotide
  modified_base 100: mod_base = OTHER; note = 2'-O-methyl ribonucleotide
  modified_base 1..4: mod_base = OTHER; note = phosphorothioate linkage
  modified_base 45..46: mod_base = OTHER; note = phosphorothioate linkage
  modified_base 97..100: mod_base = OTHER; note = phosphorothioate linkage

SEQ ID NO: 1706 - RNA, 103 nt, synthetic construct; identical to SEQ ID NO: 1700
  source 1..103: mol_type = other RNA
  modified_base 1: mod_base = OTHER; note = 2'-O-methyl ribonucleotide
  modified_base 2: mod_base = OTHER; note = 2'-O-methyl ribonucleotide
  modified_base 3: mod_base = OTHER; note = 2'-O-methyl ribonucleotide
  modified_base 21: mod_base = OTHER; note = 2'-O-methyl ribonucleotide
  modified_base 28: mod_base = OTHER; note = 2'-O-methyl ribonucleotide
  modified_base 29: mod_base = OTHER; note = 2'-O-methyl ribonucleotide
  modified_base 30: mod_base = OTHER; note = 2'-O-methyl ribonucleotide
  modified_base 31: mod_base = OTHER; note = 2'-O-methyl ribonucleotide
  modified_base 32: mod_base = OTHER; note = 2'-O-methyl ribonucleotide
  modified_base 34: mod_base = OTHER; note = 2'-O-methyl ribonucleotide
  modified_base 35: mod_base = OTHER; note = 2'-O-methyl ribonucleotide
  modified_base 36: mod_base = OTHER; note = 2'-O-methyl ribonucleotide
  modified_base 37: mod_base = OTHER; note = 2'-O-methyl ribonucleotide
  modified_base 38: mod_base = OTHER; note = 2'-O-methyl ribonucleotide
  modified_base 39: mod_base = OTHER; note = 2'-O-methyl ribonucleotide
  modified_base 40: mod_base = OTHER; note = 2'-O-methyl ribonucleotide
  modified_base 41: mod_base = OTHER; note = 2'-O-methyl ribonucleotide
  modified_base 42: mod_base = OTHER; note = 2'-O-methyl ribonucleotide
  modified_base 46: mod_base = OTHER; note = 2'-O-methyl ribonucleotide
  modified_base 48: mod_base = OTHER; note = 2'-O-methyl ribonucleotide
  modified_base 50: mod_base = OTHER; note = 2'-O-methyl ribonucleotide
  modified_base 52: mod_base = OTHER; note = 2'-O-methyl ribonucleotide
  modified_base 53: mod_base = OTHER; note = 2'-O-methyl ribonucleotide
  modified_base 54: mod_base = OTHER; note = 2'-O-methyl ribonucleotide
  modified_base 55: mod_base = OTHER; note = 2'-O-methyl ribonucleotide
  modified_base 56: mod_base = OTHER; note = 2'-O-methyl ribonucleotide
  modified_base 57: mod_base = OTHER; note = 2'-O-methyl ribonucleotide
  modified_base 60: mod_base = OTHER; note = 2'-O-methyl ribonucleotide
  modified_base 61: mod_base = OTHER; note = 2'-O-methyl ribonucleotide
  modified_base 66: mod_base = OTHER; note = 2'-O-methyl ribonucleotide
  modified_base 67: mod_base = OTHER; note = 2'-O-methyl ribonucleotide
  modified_base 70: mod_base = OTHER; note = 2'-O-methyl ribonucleotide
  modified_base 71: mod_base = OTHER; note = 2'-O-methyl ribonucleotide
  modified_base 72: mod_base = OTHER; note = 2'-O-methyl ribonucleotide
  modified_base 74: mod_base = OTHER; note = 2'-O-methyl ribonucleotide
  modified_base 75: mod_base = OTHER; note = 2'-O-methyl ribonucleotide
  modified_base 76: mod_base = OTHER; note = 2'-O-methyl ribonucleotide
  modified_base 77: mod_base = OTHER; note = 2'-O-methyl ribonucleotide
  modified_base 78: mod_base = OTHER; note = 2'-O-methyl ribonucleotide
  modified_base 79: mod_base = OTHER; note = 2'-O-methyl ribonucleotide
  modified_base 80: mod_base = OTHER; note = 2'-O-methyl ribonucleotide
  modified_base 81: mod_base = OTHER; note = 2'-O-methyl ribonucleotide
  modified_base 83: mod_base = OTHER; note = 2'-O-methyl ribonucleotide
  modified_base 84: mod_base = OTHER; note = 2'-O-methyl ribonucleotide
  modified_base 85: mod_base = OTHER; note = 2'-O-methyl ribonucleotide
  modified_base 86: mod_base = OTHER; note = 2'-O-methyl ribonucleotide
  modified_base 87: mod_base = OTHER; note = 2'-O-methyl ribonucleotide
  modified_base 88: mod_base = OTHER; note = 2'-O-methyl ribonucleotide
  modified_base 89: mod_base = OTHER; note = 2'-O-methyl ribonucleotide
  modified_base 90: mod_base = OTHER; note = 2'-O-methyl ribonucleotide
  modified_base 91: mod_base = OTHER; note = 2'-O-methyl ribonucleotide
  modified_base 92: mod_base = OTHER; note = 2'-O-methyl ribonucleotide
  modified_base 93: mod_base = OTHER; note = 2'-O-methyl ribonucleotide
  modified_base 94: mod_base = OTHER; note = 2'-O-methyl ribonucleotide
  modified_base 95: mod_base = OTHER; note = 2'-O-methyl ribonucleotide
  modified_base 96: mod_base = OTHER; note = 2'-O-methyl ribonucleotide
  modified_base 97: mod_base = OTHER; note = 2'-O-methyl ribonucleotide
  modified_base 98: mod_base = OTHER; note = 2'-O-methyl ribonucleotide
  modified_base 99: mod_base = OTHER; note = 2'-O-methyl ribonucleotide
  modified_base 100: mod_base = OTHER; note = 2'-O-methyl ribonucleotide
  modified_base 1..4: mod_base = OTHER; note = phosphorothioate linkage
  modified_base 45..46: mod_base = OTHER; note = phosphorothioate linkage
  modified_base 97..100: mod_base = OTHER; note = phosphorothioate linkage

SEQ ID NO: 1707 - RNA, 103 nt, synthetic construct; identical to SEQ ID NO: 1643
  source 1..103: mol_type = other RNA
  modified_base 1: mod_base = OTHER; note = 2'-O-methyl ribonucleotide
  modified_base 2: mod_base = OTHER; note = 2'-O-methyl ribonucleotide
  modified_base 3: mod_base = OTHER; note = 2'-O-methyl ribonucleotide
  modified_base 21: mod_base = OTHER; note = 2'-O-methyl ribonucleotide
  modified_base 28: mod_base = OTHER; note = 2'-O-methyl ribonucleotide
  modified_base 29: mod_base = OTHER; note = 2'-O-methyl ribonucleotide
  modified_base 30: mod_base = OTHER; note = 2'-O-methyl ribonucleotide
  modified_base 31: mod_base = OTHER; note = 2'-O-methyl ribonucleotide
  modified_base 32: mod_base = OTHER; note = 2'-O-methyl ribonucleotide
  modified_base 34: mod_base = OTHER; note = 2'-O-methyl ribonucleotide
  modified_base 35: mod_base = OTHER; note = 2'-O-methyl ribonucleotide
  modified_base 36: mod_base = OTHER; note = 2'-O-methyl ribonucleotide
  modified_base 37: mod_base = OTHER; note = 2'-O-methyl ribonucleotide
  modified_base 38: mod_base = OTHER; note = 2'-O-methyl ribonucleotide
  modified_base 39: mod_base = OTHER; note = 2'-O-methyl ribonucleotide
  modified_base 40: mod_base = OTHER; note = 2'-O-methyl ribonucleotide
  modified_base 41: mod_base = OTHER; note = 2'-O-methyl ribonucleotide
  modified_base 42: mod_base = OTHER; note = 2'-O-methyl ribonucleotide
  modified_base 46: mod_base = OTHER; note = 2'-O-methyl ribonucleotide
  modified_base 48: mod_base = OTHER; note = 2'-O-methyl ribonucleotide
  modified_base 50: mod_base = OTHER; note = 2'-O-methyl ribonucleotide
  modified_base 52: mod_base = OTHER; note = 2'-O-methyl ribonucleotide
  modified_base 53: mod_base = OTHER; note = 2'-O-methyl ribonucleotide
  modified_base 54: mod_base = OTHER; note = 2'-O-methyl ribonucleotide
  modified_base 57: mod_base = OTHER; note = 2'-O-methyl ribonucleotide
  modified_base 61: mod_base = OTHER; note = 2'-O-methyl ribonucleotide
  modified_base 66: mod_base = OTHER; note = 2'-O-methyl ribonucleotide
  modified_base 67: mod_base = OTHER; note = 2'-O-methyl ribonucleotide
  modified_base 70: mod_base = OTHER; note = 2'-O-methyl ribonucleotide
  modified_base 71: mod_base = OTHER; note = 2'-O-methyl ribonucleotide
  modified_base 72: mod_base = OTHER; note = 2'-O-methyl ribonucleotide
  modified_base 74: mod_base = OTHER; note = 2'-O-methyl ribonucleotide
  modified_base 75: mod_base = OTHER; note = 2'-O-methyl ribonucleotide
  modified_base 76: mod_base = OTHER; note = 2'-O-methyl ribonucleotide
  modified_base 77: mod_base = OTHER; note = 2'-O-methyl ribonucleotide
  modified_base 78: mod_base = OTHER; note = 2'-O-methyl ribonucleotide
  modified_base 79: mod_base = OTHER; note = 2'-O-methyl ribonucleotide
  modified_base 80: mod_base = OTHER; note = 2'-O-methyl ribonucleotide
  modified_base 82: mod_base = OTHER; note = 2'-O-methyl ribonucleotide
  modified_base 83: mod_base = OTHER; note = 2'-O-methyl ribonucleotide
  modified_base 84: mod_base = OTHER; note = 2'-O-methyl ribonucleotide
  modified_base 85: mod_base = OTHER; note = 2'-O-methyl ribonucleotide
  modified_base 86: mod_base = OTHER; note = 2'-O-methyl ribonucleotide
  modified_base 87: mod_base = OTHER; note = 2'-O-methyl ribonucleotide
  modified_base 89: mod_base = OTHER; note = 2'-O-methyl ribonucleotide
  modified_base 92: mod_base = OTHER; note = 2'-O-methyl ribonucleotide
  modified_base 93: mod_base = OTHER; note = 2'-O-methyl ribonucleotide
  modified_base 94: mod_base = OTHER; note = 2'-O-methyl ribonucleotide
  modified_base 95: mod_base = OTHER; note = 2'-O-methyl ribonucleotide
  modified_base 96: mod_base = OTHER; note = 2'-O-methyl ribonucleotide
  modified_base 97: mod_base = OTHER; note = 2'-O-methyl ribonucleotide
  modified_base 98: mod_base = OTHER; note = 2'-O-methyl ribonucleotide
  modified_base 99: mod_base = OTHER; note = 2'-O-methyl ribonucleotide
  modified_base 100: mod_base = OTHER; note = 2'-O-methyl ribonucleotide
  modified_base 1..4: mod_base = OTHER; note = phosphorothioate linkage
  modified_base 25..26: mod_base = OTHER; note = phosphorothioate linkage
  modified_base 97..100: mod_base = OTHER; note = phosphorothioate linkage

SEQ ID NO: 1708 - RNA, 103 nt, synthetic construct; identical to SEQ ID NO: 1699
  source 1..103: mol_type = other RNA
  modified_base 1: mod_base = OTHER; note = 2'-O-methyl ribonucleotide
  modified_base 2: mod_base = OTHER; note = 2'-O-methyl ribonucleotide
  modified_base 3: mod_base = OTHER; note = 2'-O-methyl ribonucleotide
  modified_base 21: mod_base = OTHER; note = 2'-O-methyl ribonucleotide
  modified_base 28: mod_base = OTHER; note = 2'-O-methyl ribonucleotide
  modified_base 29: mod_base = OTHER; note = 2'-O-methyl ribonucleotide
  modified_base 30: mod_base = OTHER; note = 2'-O-methyl ribonucleotide
  modified_base 31: mod_base = OTHER; note = 2'-O-methyl ribonucleotide
  modified_base 32: mod_base = OTHER; note = 2'-O-methyl ribonucleotide
  modified_base 34: mod_base = OTHER; note = 2'-O-methyl ribonucleotide
  modified_base 35: mod_base = OTHER; note = 2'-O-methyl ribonucleotide
  modified_base 36: mod_base = OTHER; note = 2'-O-methyl ribonucleotide
  modified_base 37: mod_base = OTHER; note = 2'-O-methyl ribonucleotide
  modified_base 38: mod_base = OTHER; note = 2'-O-methyl ribonucleotide
  modified_base 39: mod_base = OTHER; note = 2'-O-methyl ribonucleotide
  modified_base 40: mod_base = OTHER; note = 2'-O-methyl ribonucleotide
  modified_base 41: mod_base = OTHER; note = 2'-O-methyl ribonucleotide
  modified_base 42: mod_base = OTHER; note = 2'-O-methyl ribonucleotide
  modified_base 46: mod_base = OTHER; note = 2'-O-methyl ribonucleotide
  modified_base 48: mod_base = OTHER; note = 2'-O-methyl ribonucleotide
  modified_base 50: mod_base = OTHER; note = 2'-O-methyl ribonucleotide
  modified_base 52: mod_base = OTHER; note = 2'-O-methyl ribonucleotide
  modified_base 53: mod_base = OTHER; note = 2'-O-methyl ribonucleotide
  modified_base 54: mod_base = OTHER; note = 2'-O-methyl ribonucleotide
  modified_base 57: mod_base = OTHER; note = 2'-O-methyl ribonucleotide
  modified_base 61: mod_base = OTHER; note = 2'-O-methyl ribonucleotide
  modified_base 66: mod_base = OTHER; note = 2'-O-methyl ribonucleotide
  modified_base 67: mod_base = OTHER; note = 2'-O-methyl ribonucleotide
  modified_base 70: mod_base = OTHER; note = 2'-O-methyl ribonucleotide
  modified_base 71: mod_base = OTHER; note = 2'-O-methyl ribonucleotide
  modified_base 72: mod_base = OTHER; note = 2'-O-methyl ribonucleotide
  modified_base 74: mod_base = OTHER; note = 2'-O-methyl ribonucleotide
  modified_base 75: mod_base = OTHER; note = 2'-O-methyl ribonucleotide
  modified_base 76: mod_base = OTHER; note = 2'-O-methyl ribonucleotide
  modified_base 77: mod_base = OTHER; note = 2'-O-methyl ribonucleotide
  modified_base 78: mod_base = OTHER; note = 2'-O-methyl ribonucleotide
  modified_base 79: mod_base = OTHER; note = 2'-O-methyl ribonucleotide
  modified_base 80: mod_base = OTHER; note = 2'-O-methyl ribonucleotide
  modified_base 82: mod_base = OTHER; note = 2'-O-methyl ribonucleotide
  modified_base 83: mod_base = OTHER; note = 2'-O-methyl ribonucleotide
  modified_base 84: mod_base = OTHER; note = 2'-O-methyl ribonucleotide
  modified_base 85: mod_base = OTHER; note = 2'-O-methyl ribonucleotide
  modified_base 86: mod_base = OTHER; note = 2'-O-methyl ribonucleotide
  modified_base 87: mod_base = OTHER; note = 2'-O-methyl ribonucleotide
  modified_base 89: mod_base = OTHER; note = 2'-O-methyl ribonucleotide
  modified_base 92: mod_base = OTHER; note = 2'-O-methyl ribonucleotide
  modified_base 93: mod_base = OTHER; note = 2'-O-methyl ribonucleotide
  modified_base 94: mod_base = OTHER; note = 2'-O-methyl ribonucleotide
  modified_base 95: mod_base = OTHER; note = 2'-O-methyl ribonucleotide
  modified_base 96: mod_base = OTHER; note = 2'-O-methyl ribonucleotide
  modified_base 97: mod_base = OTHER; note = 2'-O-methyl ribonucleotide
  modified_base 98: mod_base = OTHER; note = 2'-O-methyl ribonucleotide
  modified_base 99: mod_base = OTHER; note = 2'-O-methyl ribonucleotide
  modified_base 100: mod_base = OTHER; note = 2'-O-methyl ribonucleotide
  modified_base 1..4: mod_base = OTHER; note = phosphorothioate linkage
  modified_base 25..26: mod_base = OTHER; note = phosphorothioate linkage
  modified_base 97..100: mod_base = OTHER; note = phosphorothioate linkage

SEQ ID NO: 1709 - RNA, 103 nt, synthetic construct; identical to SEQ ID NO: 1700
  source 1..103: mol_type = other RNA
  modified_base 1: mod_base = OTHER; note = 2'-O-methyl ribonucleotide
  modified_base 2: mod_base = OTHER; note = 2'-O-methyl ribonucleotide
  modified_base 3: mod_base = OTHER; note = 2'-O-methyl ribonucleotide
  modified_base 21: mod_base = OTHER; note = 2'-O-methyl ribonucleotide
  modified_base 28: mod_base = OTHER; note = 2'-O-methyl ribonucleotide
  modified_base 29: mod_base = OTHER; note = 2'-O-methyl ribonucleotide
  modified_base 30: mod_base = OTHER; note = 2'-O-methyl ribonucleotide
  modified_base 31: mod_base = OTHER; note = 2'-O-methyl ribonucleotide
  modified_base 32: mod_base = OTHER; note = 2'-O-methyl ribonucleotide
  modified_base 34: mod_base = OTHER; note = 2'-O-methyl ribonucleotide
  modified_base 35: mod_base = OTHER; note = 2'-O-methyl ribonucleotide
  modified_base 36: mod_base = OTHER; note = 2'-O-methyl ribonucleotide
  modified_base 37: mod_base = OTHER; note = 2'-O-methyl ribonucleotide
  modified_base 38: mod_base = OTHER; note = 2'-O-methyl ribonucleotide
  modified_base 39: mod_base = OTHER; note = 2'-O-methyl ribonucleotide
  modified_base 40: mod_base = OTHER; note = 2'-O-methyl ribonucleotide
  modified_base 41: mod_base = OTHER; note = 2'-O-methyl ribonucleotide
  modified_base 42: mod_base = OTHER; note = 2'-O-methyl ribonucleotide
  modified_base 46: mod_base = OTHER; note = 2'-O-methyl ribonucleotide
  modified_base 48: mod_base = OTHER; note = 2'-O-methyl ribonucleotide
  modified_base 50: mod_base = OTHER; note = 2'-O-methyl ribonucleotide
  modified_base 52: mod_base = OTHER; note = 2'-O-methyl ribonucleotide
  modified_base 53: mod_base = OTHER; note = 2'-O-methyl ribonucleotide
  modified_base 54: mod_base = OTHER; note = 2'-O-methyl ribonucleotide
  modified_base 55: mod_base = OTHER; note = 2'-O-methyl ribonucleotide
  modified_base 56: mod_base = OTHER; note = 2'-O-methyl ribonucleotide
  modified_base 57: mod_base = OTHER; note = 2'-O-methyl ribonucleotide
  modified_base 60: mod_base = OTHER; note = 2'-O-methyl ribonucleotide
  modified_base 61: mod_base = OTHER; note = 2'-O-methyl ribonucleotide
  modified_base 66: mod_base = OTHER; note = 2'-O-methyl ribonucleotide
  modified_base 67: mod_base = OTHER; note = 2'-O-methyl ribonucleotide
  modified_base 70: mod_base = OTHER; note = 2'-O-methyl ribonucleotide
  modified_base 71: mod_base = OTHER; note = 2'-O-methyl ribonucleotide
  modified_base 72: mod_base = OTHER; note = 2'-O-methyl ribonucleotide
  modified_base 74: mod_base = OTHER; note = 2'-O-methyl ribonucleotide
  modified_base 75: mod_base = OTHER; note = 2'-O-methyl ribonucleotide
  modified_base 76: mod_base = OTHER; note = 2'-O-methyl ribonucleotide
  modified_base 77: mod_base = OTHER; note = 2'-O-methyl ribonucleotide
  modified_base 78: mod_base = OTHER; note = 2'-O-methyl ribonucleotide
  modified_base 79: mod_base = OTHER; note = 2'-O-methyl ribonucleotide
  modified_base 80: mod_base = OTHER; note = 2'-O-methyl ribonucleotide
  modified_base 81: mod_base = OTHER; note = 2'-O-methyl ribonucleotide
  modified_base 83: mod_base = OTHER; note = 2'-O-methyl ribonucleotide
  modified_base 84: mod_base = OTHER; note = 2'-O-methyl ribonucleotide
  modified_base 85: mod_base = OTHER; note = 2'-O-methyl ribonucleotide
  modified_base 86: mod_base = OTHER; note = 2'-O-methyl ribonucleotide
  modified_base 87: mod_base = OTHER; note = 2'-O-methyl ribonucleotide
  modified_base 88: mod_base = OTHER; note = 2'-O-methyl ribonucleotide
  modified_base 89: mod_base = OTHER; note = 2'-O-methyl ribonucleotide
  modified_base 90: mod_base = OTHER; note = 2'-O-methyl ribonucleotide
  modified_base 91: mod_base = OTHER; note = 2'-O-methyl ribonucleotide
  modified_base 92: mod_base = OTHER; note = 2'-O-methyl ribonucleotide
  modified_base 93: mod_base = OTHER; note = 2'-O-methyl ribonucleotide
  modified_base 94: mod_base = OTHER; note = 2'-O-methyl ribonucleotide
  modified_base 95: mod_base = OTHER; note = 2'-O-methyl ribonucleotide
  modified_base 96: mod_base = OTHER; note = 2'-O-methyl ribonucleotide
  modified_base 97: mod_base = OTHER; note = 2'-O-methyl ribonucleotide
  modified_base 98: mod_base = OTHER; note = 2'-O-methyl ribonucleotide
  modified_base 99: mod_base = OTHER; note = 2'-O-methyl ribonucleotide
  modified_base 100: mod_base = OTHER; note = 2'-O-methyl ribonucleotide
  modified_base 1..4: mod_base = OTHER; note = phosphorothioate linkage
  modified_base 25..26: mod_base = OTHER; note = phosphorothioate linkage
  modified_base 97..100: mod_base = OTHER; note = phosphorothioate linkage

SEQ ID NO: 1710 - RNA, 103 nt, synthetic construct; identical to SEQ ID NO: 1643
  source 1..103: mol_type = other RNA
  modified_base 1: mod_base = OTHER; note = 2'-O-methyl ribonucleotide
  modified_base 2: mod_base = OTHER; note = 2'-O-methyl ribonucleotide
  modified_base 3: mod_base = OTHER; note = 2'-O-methyl ribonucleotide
  modified_base 21: mod_base = OTHER; note = 2'-O-methyl ribonucleotide
  modified_base 28: mod_base = OTHER; note = 2'-O-methyl ribonucleotide
  modified_base 29: mod_base = OTHER; note = 2'-O-methyl ribonucleotide
  modified_base 30: mod_base = OTHER; note = 2'-O-methyl ribonucleotide
  modified_base 31: mod_base = OTHER; note = 2'-O-methyl ribonucleotide
  modified_base 32: mod_base = OTHER; note = 2'-O-methyl ribonucleotide
  modified_base 34: mod_base = OTHER; note = 2'-O-methyl ribonucleotide
  modified_base 35: mod_base = OTHER; note = 2'-O-methyl ribonucleotide
  modified_base 36: mod_base = OTHER; note = 2'-O-methyl ribonucleotide
  modified_base 37: mod_base = OTHER; note = 2'-O-methyl ribonucleotide
  modified_base 38: mod_base = OTHER; note = 2'-O-methyl ribonucleotide
  modified_base 39: mod_base = OTHER; note = 2'-O-methyl ribonucleotide
  modified_base 40: mod_base = OTHER; note = 2'-O-methyl ribonucleotide
  modified_base 41: mod_base = OTHER; note = 2'-O-methyl ribonucleotide
  modified_base 42: mod_base = OTHER; note = 2'-O-methyl ribonucleotide
  modified_base 46: mod_base = OTHER; note = 2'-O-methyl ribonucleotide
  modified_base 48: mod_base = OTHER; note = 2'-O-methyl ribonucleotide
  modified_base 50: mod_base = OTHER; note = 2'-O-methyl ribonucleotide
  modified_base 52: mod_base = OTHER; note = 2'-O-methyl ribonucleotide
  modified_base 53: mod_base = OTHER; note = 2'-O-methyl ribonucleotide
  modified_base 54: mod_base = OTHER; note = 2'-O-methyl ribonucleotide
  modified_base 57: mod_base = OTHER; note = 2'-O-methyl ribonucleotide
  modified_base 61: mod_base = OTHER; note = 2'-O-methyl ribonucleotide
  modified_base 66: mod_base = OTHER; note = 2'-O-methyl ribonucleotide
  modified_base 67: mod_base = OTHER; note = 2'-O-methyl ribonucleotide
  modified_base 70: mod_base = OTHER; note = 2'-O-methyl ribonucleotide
  modified_base 71: mod_base = OTHER; note = 2'-O-methyl ribonucleotide
  modified_base 72: mod_base = OTHER; note = 2'-O-methyl ribonucleotide
  modified_base 74: mod_base = OTHER; note = 2'-O-methyl ribonucleotide
  modified_base 75: mod_base = OTHER; note = 2'-O-methyl ribonucleotide
  modified_base 76: mod_base = OTHER; note = 2'-O-methyl ribonucleotide
  modified_base 77: mod_base = OTHER; note = 2'-O-methyl ribonucleotide
  modified_base 78: mod_base = OTHER; note = 2'-O-methyl ribonucleotide
  modified_base 79: mod_base = OTHER; note = 2'-O-methyl ribonucleotide
  modified_base 80: mod_base = OTHER; note = 2'-O-methyl ribonucleotide
  modified_base 82: mod_base = OTHER; note = 2'-O-methyl ribonucleotide
  modified_base 83: mod_base = OTHER; note = 2'-O-methyl ribonucleotide
  modified_base 84: mod_base = OTHER; note = 2'-O-methyl ribonucleotide
  modified_base 85: mod_base = OTHER; note = 2'-O-methyl ribonucleotide
  modified_base 86: mod_base = OTHER; note = 2'-O-methyl ribonucleotide
  modified_base 87: mod_base = OTHER; note = 2'-O-methyl ribonucleotide
  modified_base 89: mod_base = OTHER; note = 2'-O-methyl ribonucleotide
  modified_base 92: mod_base = OTHER; note = 2'-O-methyl ribonucleotide
  modified_base 93: mod_base = OTHER; note = 2'-O-methyl ribonucleotide
  modified_base 94: mod_base = OTHER; note = 2'-O-methyl ribonucleotide
  modified_base 95: mod_base = OTHER; note = 2'-O-methyl ribonucleotide
  modified_base 96: mod_base = OTHER; note = 2'-O-methyl ribonucleotide
  modified_base 97: mod_base = OTHER; note = 2'-O-methyl ribonucleotide
  modified_base 98: mod_base = OTHER; note = 2'-O-methyl ribonucleotide
  modified_base 99: mod_base = OTHER; note = 2'-O-methyl ribonucleotide
  modified_base 100: mod_base = OTHER; note = 2'-O-methyl ribonucleotide
  modified_base 1..4: mod_base = OTHER; note = phosphorothioate linkage
  modified_base 45..46: mod_base = OTHER; note = phosphorothioate linkage
  modified_base 64..65: mod_base = OTHER; note = phosphorothioate linkage
  modified_base 97..100: mod_base = OTHER; note = phosphorothioate linkage

SEQ ID NO: 1711 - RNA, 103 nt, synthetic construct; identical to SEQ ID NO: 1699
  source 1..103: mol_type = other RNA
  modified_base 1: mod_base = OTHER; note = 2'-O-methyl ribonucleotide
  modified_base 2: mod_base = OTHER; note = 2'-O-methyl ribonucleotide
  modified_base 3: mod_base = OTHER; note = 2'-O-methyl ribonucleotide
  modified_base 21: mod_base = OTHER; note = 2'-O-methyl ribonucleotide
  modified_base 28: mod_base = OTHER; note = 2'-O-methyl ribonucleotide
  modified_base 29: mod_base = OTHER; note = 2'-O-methyl ribonucleotide
  modified_base 30: mod_base = OTHER; note = 2'-O-methyl ribonucleotide
  modified_base 31: mod_base = OTHER; note = 2'-O-methyl ribonucleotide
  modified_base 32: mod_base = OTHER; note = 2'-O-methyl ribonucleotide
  modified_base 34: mod_base = OTHER; note = 2'-O-methyl ribonucleotide
  modified_base 35: mod_base = OTHER; note = 2'-O-methyl ribonucleotide
  modified_base 36: mod_base = OTHER; note = 2'-O-methyl ribonucleotide
  modified_base 37: mod_base = OTHER; note = 2'-O-methyl ribonucleotide
  modified_base 38: mod_base = OTHER; note = 2'-O-methyl ribonucleotide
  modified_base 39: mod_base = OTHER; note = 2'-O-methyl ribonucleotide
  modified_base 40: mod_base = OTHER; note = 2'-O-methyl ribonucleotide
  modified_base 41: mod_base = OTHER; note = 2'-O-methyl ribonucleotide
  modified_base 42: mod_base = OTHER; note = 2'-O-methyl ribonucleotide
  modified_base 46: mod_base = OTHER; note = 2'-O-methyl ribonucleotide
  modified_base 48: mod_base = OTHER; note = 2'-O-methyl ribonucleotide
  modified_base 50: mod_base = OTHER; note = 2'-O-methyl ribonucleotide
  modified_base 52: mod_base = OTHER; note = 2'-O-methyl ribonucleotide
  modified_base 53: mod_base = OTHER; note = 2'-O-methyl ribonucleotide
  modified_base 54: mod_base = OTHER; note = 2'-O-methyl ribonucleotide
  modified_base 57: mod_base = OTHER; note = 2'-O-methyl ribonucleotide
  modified_base 61: mod_base = OTHER; note = 2'-O-methyl ribonucleotide
  modified_base 66: mod_base = OTHER; note = 2'-O-methyl ribonucleotide
  modified_base 67: mod_base = OTHER; note = 2'-O-methyl ribonucleotide
  modified_base 70: mod_base = OTHER; note = 2'-O-methyl ribonucleotide
  modified_base 71: mod_base = OTHER; note = 2'-O-methyl ribonucleotide
  modified_base 72: mod_base = OTHER; note = 2'-O-methyl ribonucleotide
  modified_base 74: mod_base = OTHER; note = 2'-O-methyl ribonucleotide
  modified_base 75: mod_base = OTHER; note = 2'-O-methyl ribonucleotide
  modified_base 76: mod_base = OTHER; note = 2'-O-methyl ribonucleotide
  modified_base 77: mod_base = OTHER; note = 2'-O-methyl ribonucleotide
  modified_base 78: mod_base = OTHER; note = 2'-O-methyl ribonucleotide
  modified_base 79: mod_base = OTHER; note = 2'-O-methyl ribonucleotide
  modified_base 80: mod_base = OTHER; note = 2'-O-methyl ribonucleotide
  modified_base 82: mod_base = OTHER; note = 2'-O-methyl ribonucleotide
  modified_base 83: mod_base = OTHER; note = 2'-O-methyl ribonucleotide
  modified_base 84: mod_base = OTHER; note = 2'-O-methyl ribonucleotide
  modified_base 85: mod_base = OTHER; note = 2'-O-methyl ribonucleotide
  modified_base 86: mod_base = OTHER; note = 2'-O-methyl ribonucleotide
  modified_base 87: mod_base = OTHER; note = 2'-O-methyl ribonucleotide
  modified_base 89: mod_base = OTHER; note = 2'-O-methyl ribonucleotide
  modified_base 92: mod_base = OTHER; note = 2'-O-methyl ribonucleotide
  modified_base 93: mod_base = OTHER; note = 2'-O-methyl ribonucleotide
  modified_base 94: mod_base = OTHER; note = 2'-O-methyl ribonucleotide
  modified_base 95: mod_base = OTHER; note = 2'-O-methyl ribonucleotide
  modified_base 96: mod_base = OTHER; note = 2'-O-methyl ribonucleotide
  modified_base 97: mod_base = OTHER; note = 2'-O-methyl ribonucleotide
  modified_base 98: mod_base = OTHER; note = 2'-O-methyl ribonucleotide
  modified_base 99: mod_base = OTHER; note = 2'-O-methyl ribonucleotide
  modified_base 100: mod_base = OTHER; note = 2'-O-methyl ribonucleotide
  modified_base 1..4: mod_base = OTHER; note = phosphorothioate linkage
  modified_base 45..46: mod_base = OTHER; note = phosphorothioate linkage
  modified_base 64..65: mod_base = OTHER; note = phosphorothioate linkage
  modified_base 97..100: mod_base = OTHER; note = phosphorothioate linkage

SEQ ID NO: 1712 - RNA, 103 nt, synthetic construct; identical to SEQ ID NO: 1700
  source 1..103: mol_type = other RNA
  modified_base 1: mod_base = OTHER; note = 2'-O-methyl ribonucleotide
  modified_base 2: mod_base = OTHER; note = 2'-O-methyl ribonucleotide
  modified_base 3: mod_base = OTHER; note = 2'-O-methyl ribonucleotide
  modified_base 21: mod_base = OTHER; note = 2'-O-methyl ribonucleotide
  modified_base 28: mod_base = OTHER; note = 2'-O-methyl ribonucleotide
  modified_base 29: mod_base = OTHER; note = 2'-O-methyl ribonucleotide
  modified_base 30: mod_base = OTHER; note = 2'-O-methyl ribonucleotide
  modified_base 31: mod_base = OTHER; note = 2'-O-methyl ribonucleotide
  modified_base 32: mod_base = OTHER; note = 2'-O-methyl ribonucleotide
  modified_base 34: mod_base = OTHER; note = 2'-O-methyl ribonucleotide
  modified_base 35: mod_base = OTHER; note = 2'-O-methyl ribonucleotide
  modified_base 36: mod_base = OTHER; note = 2'-O-methyl ribonucleotide
  modified_base 37: mod_base = OTHER; note = 2'-O-methyl ribonucleotide
  modified_base 38: mod_base = OTHER; note = 2'-O-methyl ribonucleotide
  modified_base 39: mod_base = OTHER; note = 2'-O-methyl ribonucleotide
  modified_base 40: mod_base = OTHER; note = 2'-O-methyl ribonucleotide
  modified_base 41: mod_base = OTHER; note = 2'-O-methyl ribonucleotide
  modified_base 42: mod_base = OTHER; note = 2'-O-methyl ribonucleotide
  modified_base 46: mod_base = OTHER; note = 2'-O-methyl ribonucleotide
  modified_base 48: mod_base = OTHER; note = 2'-O-methyl ribonucleotide
  modified_base 50: mod_base = OTHER; note = 2'-O-methyl ribonucleotide
  modified_base 52: mod_base = OTHER; note = 2'-O-methyl ribonucleotide
  modified_base 53: mod_base = OTHER; note = 2'-O-methyl ribonucleotide
  modified_base 54: mod_base = OTHER; note = 2'-O-methyl ribonucleotide
  modified_base 55: mod_base = OTHER; note = 2'-O-methyl ribonucleotide
  modified_base 56: mod_base = OTHER; note = 2'-O-methyl ribonucleotide
  modified_base 57: mod_base = OTHER; note = 2'-O-methyl ribonucleotide
  modified_base 60: mod_base = OTHER; note = 2'-O-methyl ribonucleotide
  modified_base 61: mod_base = OTHER; note = 2'-O-methyl ribonucleotide
  modified_base 66: mod_base = OTHER; note = 2'-O-methyl ribonucleotide
  modified_base 67: mod_base = OTHER; note = 2'-O-methyl ribonucleotide
  modified_base 70: mod_base = OTHER; note = 2'-O-methyl ribonucleotide
  modified_base 71: mod_base = OTHER; note = 2'-O-methyl ribonucleotide
  modified_base 72: mod_base = OTHER; note = 2'-O-methyl ribonucleotide
  modified_base 74: mod_base = OTHER; note = 2'-O-methyl ribonucleotide
  modified_base 75: mod_base = OTHER; note = 2'-O-methyl ribonucleotide
  modified_base 76: mod_base = OTHER; note = 2'-O-methyl ribonucleotide
  modified_base 77: mod_base = OTHER; note = 2'-O-methyl ribonucleotide
  modified_base 78: mod_base = OTHER; note = 2'-O-methyl ribonucleotide
  modified_base 79: mod_base = OTHER; note = 2'-O-methyl ribonucleotide
  modified_base 80: mod_base = OTHER; note = 2'-O-methyl ribonucleotide
  modified_base 81: mod_base = OTHER; note = 2'-O-methyl ribonucleotide
  modified_base 83: mod_base = OTHER; note = 2'-O-methyl ribonucleotide
  modified_base 84: mod_base = OTHER; note = 2'-O-methyl ribonucleotide
  modified_base 85: mod_base = OTHER; note = 2'-O-methyl ribonucleotide
  modified_base 86: mod_base = OTHER; note = 2'-O-methyl ribonucleotide
  modified_base 87: mod_base = OTHER; note = 2'-O-methyl ribonucleotide
  modified_base 88: mod_base = OTHER; note = 2'-O-methyl ribonucleotide
  modified_base 89: mod_base = OTHER; note = 2'-O-methyl ribonucleotide
  modified_base 90: mod_base = OTHER; note = 2'-O-methyl ribonucleotide
  modified_base 91: mod_base = OTHER; note = 2'-O-methyl ribonucleotide
  modified_base 92: mod_base = OTHER; note = 2'-O-methyl ribonucleotide
  modified_base 93: mod_base = OTHER; note = 2'-O-methyl ribonucleotide
  modified_base 94: mod_base = OTHER; note = 2'-O-methyl ribonucleotide
  modified_base 95: mod_base = OTHER; note = 2'-O-methyl ribonucleotide
  modified_base 96: mod_base = OTHER; note = 2'-O-methyl ribonucleotide
  modified_base 97: mod_base = OTHER; note = 2'-O-methyl ribonucleotide
  modified_base 98: mod_base = OTHER; note = 2'-O-methyl ribonucleotide
  modified_base 99: mod_base = OTHER; note = 2'-O-methyl ribonucleotide
  modified_base 100: mod_base = OTHER; note = 2'-O-methyl ribonucleotide
  modified_base 1..4: mod_base = OTHER; note = phosphorothioate linkage
  modified_base 45..46: mod_base = OTHER; note = phosphorothioate linkage
  modified_base 64..65: mod_base = OTHER; note = phosphorothioate linkage
  modified_base 97..100: mod_base = OTHER; note = phosphorothioate linkage

SEQ ID NO: 1713 - RNA, 103 nt, synthetic construct; identical to SEQ ID NO: 1643
  source 1..103: mol_type = other RNA
  modified_base 1: mod_base = OTHER; note = 2'-O-methyl ribonucleotide
  modified_base 2: mod_base = OTHER; note = 2'-O-methyl ribonucleotide
  modified_base 3: mod_base = OTHER; note = 2'-O-methyl ribonucleotide
  modified_base 21: mod_base = OTHER; note = 2'-O-methyl ribonucleotide
  modified_base 28: mod_base = OTHER; note = 2'-O-methyl ribonucleotide
  modified_base 29: mod_base = OTHER; note = 2'-O-methyl ribonucleotide
  modified_base 30: mod_base = OTHER; note = 2'-O-methyl ribonucleotide
  modified_base 31: mod_base = OTHER; note = 2'-O-methyl ribonucleotide
  modified_base 32: mod_base = OTHER; note = 2'-O-methyl ribonucleotide
  modified_base 34: mod_base = OTHER; note = 2'-O-methyl ribonucleotide
  modified_base 35: mod_base = OTHER; note = 2'-O-methyl ribonucleotide
  modified_base 36: mod_base = OTHER; note = 2'-O-methyl ribonucleotide
  modified_base 37: mod_base = OTHER; note = 2'-O-methyl ribonucleotide
  modified_base 38: mod_base = OTHER; note = 2'-O-methyl ribonucleotide
  modified_base 39: mod_base = OTHER; note = 2'-O-methyl ribonucleotide
  modified_base 40: mod_base = OTHER; note = 2'-O-methyl ribonucleotide
  modified_base 41: mod_base = OTHER; note = 2'-O-methyl ribonucleotide
  modified_base 42: mod_base = OTHER; note = 2'-O-methyl ribonucleotide
  modified_base 46: mod_base = OTHER; note = 2'-O-methyl ribonucleotide
  modified_base 48: mod_base = OTHER; note = 2'-O-methyl ribonucleotide
  modified_base 50: mod_base = OTHER; note = 2'-O-methyl ribonucleotide
  modified_base 52: mod_base = OTHER; note = 2'-O-methyl ribonucleotide
  modified_base 53: mod_base = OTHER; note = 2'-O-methyl ribonucleotide
  modified_base 54: mod_base = OTHER; note = 2'-O-methyl ribonucleotide
  modified_base 57: mod_base = OTHER; note = 2'-O-methyl ribonucleotide
  modified_base 61: mod_base = OTHER; note = 2'-O-methyl ribonucleotide
  modified_base 66: mod_base = OTHER; note = 2'-O-methyl ribonucleotide
  modified_base 67: mod_base = OTHER; note = 2'-O-methyl ribonucleotide
  modified_base 70: mod_base = OTHER; note = 2'-O-methyl ribonucleotide
  modified_base 71: mod_base = OTHER; note = 2'-O-methyl ribonucleotide
  modified_base 72: mod_base = OTHER; note = 2'-O-methyl ribonucleotide
  modified_base 74: mod_base = OTHER; note = 2'-O-methyl ribonucleotide
  modified_base 75: mod_base = OTHER; note = 2'-O-methyl ribonucleotide
  modified_base 76: mod_base = OTHER; note = 2'-O-methyl ribonucleotide
  modified_base 77: mod_base = OTHER; note = 2'-O-methyl ribonucleotide
  modified_base 78: mod_base = OTHER; note = 2'-O-methyl ribonucleotide
  modified_base 79: mod_base = OTHER; note = 2'-O-methyl ribonucleotide
  modified_base 80: mod_base = OTHER; note = 2'-O-methyl ribonucleotide
  modified_base 82: mod_base = OTHER; note = 2'-O-methyl ribonucleotide
  modified_base 83: mod_base = OTHER; note = 2'-O-methyl ribonucleotide
  modified_base 84: mod_base = OTHER; note = 2'-O-methyl ribonucleotide
  modified_base 85: mod_base = OTHER; note = 2'-O-methyl ribonucleotide
  modified_base 86: mod_base = OTHER; note = 2'-O-methyl ribonucleotide
  modified_base 87: mod_base = OTHER; note = 2'-O-methyl ribonucleotide
  modified_base 89: mod_base = OTHER; note = 2'-O-methyl ribonucleotide
  modified_base 92: mod_base = OTHER; note = 2'-O-methyl ribonucleotide
  modified_base 93: mod_base = OTHER; note = 2'-O-methyl ribonucleotide
  modified_base 94: mod_base = OTHER; note = 2'-O-methyl ribonucleotide
  modified_base 95: mod_base = OTHER; note = 2'-O-methyl ribonucleotide
  modified_base 96: mod_base = OTHER; note = 2'-O-methyl ribonucleotide
  modified_base 97: mod_base = OTHER; note = 2'-O-methyl ribonucleotide
  modified_base 98: mod_base = OTHER; note = 2'-O-methyl ribonucleotide
  modified_base 99: mod_base = OTHER; note = 2'-O-methyl ribonucleotide
  modified_base 100: mod_base = OTHER; note = 2'-O-methyl ribonucleotide
  modified_base 1..4: mod_base = OTHER; note = phosphorothioate linkage
  modified_base 25..26: mod_base = OTHER; note = phosphorothioate linkage
  modified_base 45..46: mod_base = OTHER; note = phosphorothioate linkage
  modified_base 97..100: mod_base = OTHER; note = phosphorothioate linkage

SEQ ID NO: 1714 - RNA, 103 nt, synthetic construct; identical to SEQ ID NO: 1699
  source 1..103: mol_type = other RNA
  modified_base 1: mod_base = OTHER; note = 2'-O-methyl ribonucleotide
  modified_base 2: mod_base = OTHER; note = 2'-O-methyl ribonucleotide
  modified_base 3: mod_base = OTHER; note = 2'-O-methyl ribonucleotide
  modified_base 21: mod_base = OTHER; note = 2'-O-methyl ribonucleotide
  modified_base 28: mod_base = OTHER; note = 2'-O-methyl ribonucleotide
  modified_base 29: mod_base = OTHER; note = 2'-O-methyl ribonucleotide
  modified_base 30: mod_base = OTHER; note = 2'-O-methyl ribonucleotide
  modified_base 31: mod_base = OTHER; note = 2'-O-methyl ribonucleotide
  modified_base 32: mod_base = OTHER; note = 2'-O-methyl ribonucleotide
  modified_base 34: mod_base = OTHER; note = 2'-O-methyl ribonucleotide
  modified_base 35: mod_base = OTHER; note = 2'-O-methyl ribonucleotide
  modified_base 36: mod_base = OTHER; note = 2'-O-methyl ribonucleotide
  modified_base 37: mod_base = OTHER; note = 2'-O-methyl ribonucleotide
  modified_base 38: mod_base = OTHER; note = 2'-O-methyl ribonucleotide
  modified_base 39: mod_base = OTHER; note = 2'-O-methyl ribonucleotide
  modified_base 40: mod_base = OTHER; note = 2'-O-methyl ribonucleotide
  modified_base 41: mod_base = OTHER; note = 2'-O-methyl ribonucleotide
  modified_base 42: mod_base = OTHER; note = 2'-O-methyl ribonucleotide
  modified_base 46: mod_base = OTHER; note = 2'-O-methyl ribonucleotide
  modified_base 48: mod_base = OTHER; note = 2'-O-methyl ribonucleotide
  modified_base 50: mod_base = OTHER; note = 2'-O-methyl ribonucleotide
  modified_base 52: mod_base = OTHER; note = 2'-O-methyl ribonucleotide
  modified_base 53: mod_base = OTHER; note = 2'-O-methyl ribonucleotide
  modified_base 54: mod_base = OTHER; note = 2'-O-methyl ribonucleotide
  modified_base 57: mod_base = OTHER; note = 2'-O-methyl ribonucleotide
  modified_base 61: mod_base = OTHER; note = 2'-O-methyl ribonucleotide
  modified_base 66: mod_base = OTHER; note = 2'-O-methyl ribonucleotide
  modified_base 67: mod_base = OTHER; note = 2'-O-methyl ribonucleotide
  modified_base 70: mod_base = OTHER; note = 2'-O-methyl ribonucleotide
  modified_base 71: mod_base = OTHER; note = 2'-O-methyl ribonucleotide
  modified_base 72: mod_base = OTHER; note = 2'-O-methyl ribonucleotide
  modified_base 74: mod_base = OTHER; note = 2'-O-methyl ribonucleotide
  modified_base 75: mod_base = OTHER; note = 2'-O-methyl ribonucleotide
  modified_base 76: mod_base = OTHER; note = 2'-O-methyl ribonucleotide
  modified_base 77: mod_base = OTHER; note = 2'-O-methyl ribonucleotide
  modified_base 78: mod_base = OTHER; note = 2'-O-methyl ribonucleotide
  modified_base 79: mod_base = OTHER; note = 2'-O-methyl ribonucleotide
  modified_base 80: mod_base = OTHER; note = 2'-O-methyl ribonucleotide
  modified_base 82: mod_base = OTHER; note = 2'-O-methyl ribonucleotide
  modified_base 83: mod_base = OTHER; note = 2'-O-methyl ribonucleotide
  modified_base 84: mod_base = OTHER; note = 2'-O-methyl ribonucleotide
  modified_base 85: mod_base = OTHER; note = 2'-O-methyl ribonucleotide
  modified_base 86: mod_base = OTHER; note = 2'-O-methyl ribonucleotide
  modified_base 87: mod_base = OTHER; note = 2'-O-methyl ribonucleotide
  modified_base 89: mod_base = OTHER; note = 2'-O-methyl ribonucleotide
  modified_base 92: mod_base = OTHER; note = 2'-O-methyl ribonucleotide
  modified_base 93: mod_base = OTHER; note = 2'-O-methyl ribonucleotide
  modified_base 94: mod_base = OTHER; note = 2'-O-methyl ribonucleotide
  modified_base 95: mod_base = OTHER; note = 2'-O-methyl ribonucleotide
  modified_base 96: mod_base = OTHER; note = 2'-O-methyl ribonucleotide
  modified_base 97: mod_base = OTHER; note = 2'-O-methyl ribonucleotide
  modified_base 98: mod_base = OTHER; note = 2'-O-methyl ribonucleotide
  modified_base 99: mod_base = OTHER; note = 2'-O-methyl ribonucleotide
  modified_base 100: mod_base = OTHER; note = 2'-O-methyl ribonucleotide
  modified_base 1..4: mod_base = OTHER; note = phosphorothioate linkage
  modified_base 25..26: mod_base = OTHER; note = phosphorothioate linkage
  modified_base 45..46: mod_base = OTHER; note = phosphorothioate linkage
  modified_base 97..100: mod_base = OTHER; note = phosphorothioate linkage

SEQ ID NO: 1715 - RNA, 103 nt, synthetic construct; identical to SEQ ID NO: 1700
  source 1..103: mol_type = other RNA
  modified_base 1: mod_base = OTHER; note = 2'-O-methyl ribonucleotide
  modified_base 2: mod_base = OTHER; note = 2'-O-methyl ribonucleotide
  modified_base 3: mod_base = OTHER; note = 2'-O-methyl ribonucleotide
  modified_base 21: mod_base = OTHER; note = 2'-O-methyl ribonucleotide
  modified_base 28: mod_base = OTHER; note = 2'-O-methyl ribonucleotide
  modified_base 29: mod_base = OTHER; note = 2'-O-methyl ribonucleotide
  modified_base 30: mod_base = OTHER; note = 2'-O-methyl ribonucleotide
  modified_base 31: mod_base = OTHER; note = 2'-O-methyl ribonucleotide
  modified_base 32: mod_base = OTHER; note = 2'-O-methyl ribonucleotide
  modified_base 34: mod_base = OTHER; note = 2'-O-methyl ribonucleotide
  modified_base 35: mod_base = OTHER; note = 2'-O-methyl ribonucleotide
  modified_base 36: mod_base = OTHER; note = 2'-O-methyl ribonucleotide
  modified_base 37: mod_base = OTHER; note = 2'-O-methyl ribonucleotide
  modified_base 38: mod_base = OTHER; note = 2'-O-methyl ribonucleotide
  modified_base 39: mod_base = OTHER; note = 2'-O-methyl ribonucleotide
  modified_base 40: mod_base = OTHER; note = 2'-O-methyl ribonucleotide
  modified_base 41: mod_base = OTHER; note = 2'-O-methyl ribonucleotide
  modified_base 42: mod_base = OTHER; note = 2'-O-methyl ribonucleotide
  modified_base 46: mod_base = OTHER; note = 2'-O-methyl ribonucleotide
  modified_base 48: mod_base = OTHER; note = 2'-O-methyl ribonucleotide
  modified_base 50: mod_base = OTHER; note = 2'-O-methyl ribonucleotide
  modified_base 52: mod_base = OTHER; note = 2'-O-methyl ribonucleotide
  modified_base 53: mod_base = OTHER; note = 2'-O-methyl ribonucleotide
  modified_base 54: mod_base = OTHER; note = 2'-O-methyl ribonucleotide
  modified_base 55: mod_base = OTHER; note = 2'-O-methyl ribonucleotide
  modified_base 56: mod_base = OTHER; note = 2'-O-methyl ribonucleotide
  modified_base 57: mod_base = OTHER; note = 2'-O-methyl ribonucleotide
  modified_base 60: mod_base = OTHER; note = 2'-O-methyl ribonucleotide
  modified_base 61: mod_base = OTHER; note = 2'-O-methyl ribonucleotide
  modified_base 66: mod_base = OTHER; note = 2'-O-methyl ribonucleotide
  modified_base 67: mod_base = OTHER; note = 2'-O-methyl ribonucleotide
  modified_base 70: mod_base = OTHER; note = 2'-O-methyl ribonucleotide
  modified_base 71: mod_base = OTHER; note = 2'-O-methyl ribonucleotide
  modified_base 72: mod_base = OTHER; note = 2'-O-methyl ribonucleotide
  modified_base 74: mod_base = OTHER; note = 2'-O-methyl ribonucleotide
  modified_base 75: mod_base = OTHER; note = 2'-O-methyl ribonucleotide
  modified_base 76: mod_base = OTHER; note = 2'-O-methyl ribonucleotide
  modified_base 77: mod_base = OTHER; note = 2'-O-methyl ribonucleotide
  modified_base 78: mod_base = OTHER; note = 2'-O-methyl ribonucleotide
  modified_base 79: mod_base = OTHER; note = 2'-O-methyl ribonucleotide
  modified_base 80: mod_base = OTHER; note = 2'-O-methyl ribonucleotide
  modified_base 81: mod_base = OTHER; note = 2'-O-methyl ribonucleotide
  modified_base 83: mod_base = OTHER; note = 2'-O-methyl ribonucleotide
  modified_base 84: mod_base = OTHER; note = 2'-O-methyl ribonucleotide
  modified_base 85: mod_base = OTHER; note = 2'-O-methyl ribonucleotide
  modified_base 86: mod_base = OTHER; note = 2'-O-methyl ribonucleotide
  modified_base 87: mod_base = OTHER; note = 2'-O-methyl ribonucleotide
  modified_base 88: mod_base = OTHER; note = 2'-O-methyl ribonucleotide
  modified_base 89: mod_base = OTHER; note = 2'-O-methyl ribonucleotide
  modified_base 90: mod_base = OTHER; note = 2'-O-methyl ribonucleotide
  modified_base 91: mod_base = OTHER; note = 2'-O-methyl ribonucleotide
  modified_base 92: mod_base = OTHER; note = 2'-O-methyl ribonucleotide
  modified_base 93: mod_base = OTHER; note = 2'-O-methyl ribonucleotide
  modified_base 94: mod_base = OTHER; note = 2'-O-methyl ribonucleotide
  modified_base 95: mod_base = OTHER; note = 2'-O-methyl ribonucleotide
  modified_base 96: mod_base = OTHER; note = 2'-O-methyl ribonucleotide
  modified_base 97: mod_base = OTHER; note = 2'-O-methyl ribonucleotide
  modified_base 98: mod_base = OTHER; note = 2'-O-methyl ribonucleotide
  modified_base 99: mod_base = OTHER; note = 2'-O-methyl ribonucleotide
  modified_base 100: mod_base = OTHER; note = 2'-O-methyl ribonucleotide
  modified_base 1..4: mod_base = OTHER; note = phosphorothioate linkage
  modified_base 25..26: mod_base = OTHER; note = phosphorothioate linkage
  modified_base 45..46: mod_base = OTHER; note = phosphorothioate linkage
  modified_base 97..100: mod_base = OTHER; note = phosphorothioate linkage

SEQ ID NO: 1716 - RNA, 103 nt, synthetic construct; identical to SEQ ID NO: 1643
  source 1..103: mol_type = other RNA
  modified_base 1: mod_base = OTHER; note = 2'-O-methyl ribonucleotide
  modified_base 2: mod_base = OTHER; note = 2'-O-methyl ribonucleotide
  modified_base 3: mod_base = OTHER; note = 2'-O-methyl ribonucleotide
  modified_base 21: mod_base = OTHER; note = 2'-O-methyl ribonucleotide
  modified_base 28: mod_base = OTHER; note = 2'-O-methyl ribonucleotide
  modified_base 29: mod_base = OTHER; note = 2'-O-methyl ribonucleotide
  modified_base 30: mod_base = OTHER; note = 2'-O-methyl ribonucleotide
  modified_base 31: mod_base = OTHER; note = 2'-O-methyl ribonucleotide
  modified_base 32: mod_base = OTHER; note = 2'-O-methyl ribonucleotide
  modified_base 34: mod_base = OTHER; note = 2'-O-methyl ribonucleotide
  modified_base 35: mod_base = OTHER; note = 2'-O-methyl ribonucleotide
  modified_base 36: mod_base = OTHER; note = 2'-O-methyl ribonucleotide
  modified_base 37: mod_base = OTHER; note = 2'-O-methyl ribonucleotide
  modified_base 38: mod_base = OTHER; note = 2'-O-methyl ribonucleotide
  modified_base 39: mod_base = OTHER; note = 2'-O-methyl ribonucleotide
  modified_base 40: mod_base = OTHER; note = 2'-O-methyl ribonucleotide
  modified_base 41: mod_base = OTHER; note = 2'-O-methyl ribonucleotide
  modified_base 42: mod_base = OTHER; note = 2'-O-methyl ribonucleotide
  modified_base 46: mod_base = OTHER; note = 2'-O-methyl ribonucleotide
  modified_base 48: mod_base = OTHER; note = 2'-O-methyl ribonucleotide
  modified_base 50: mod_base = OTHER; note = 2'-O-methyl ribonucleotide
  modified_base 52: mod_base = OTHER; note = 2'-O-methyl ribonucleotide
  modified_base 53: mod_base = OTHER; note = 2'-O-methyl ribonucleotide
  modified_base 54: mod_base = OTHER; note = 2'-O-methyl ribonucleotide
  modified_base 57: mod_base = OTHER; note = 2'-O-methyl ribonucleotide
  modified_base 61: mod_base = OTHER; note = 2'-O-methyl ribonucleotide
  modified_base 66: mod_base = OTHER; note = 2'-O-methyl ribonucleotide
  modified_base 67: mod_base = OTHER; note = 2'-O-methyl ribonucleotide
  modified_base 70: mod_base = OTHER; note = 2'-O-methyl ribonucleotide
  modified_base 71: mod_base = OTHER; note = 2'-O-methyl ribonucleotide
  modified_base 72: mod_base = OTHER; note = 2'-O-methyl ribonucleotide
  modified_base 74: mod_base = OTHER; note = 2'-O-methyl ribonucleotide
  modified_base 75: mod_base = OTHER; note = 2'-O-methyl ribonucleotide
  modified_base 76: mod_base = OTHER; note = 2'-O-methyl ribonucleotide
  modified_base 77: mod_base = OTHER; note = 2'-O-methyl ribonucleotide
  modified_base 78: mod_base = OTHER; note = 2'-O-methyl ribonucleotide
  modified_base 79: mod_base = OTHER; note = 2'-O-methyl ribonucleotide
  modified_base 80: mod_base = OTHER; note = 2'-O-methyl ribonucleotide
  modified_base 82: mod_base = OTHER; note = 2'-O-methyl ribonucleotide
  modified_base 83: mod_base = OTHER; note = 2'-O-methyl ribonucleotide
  modified_base 84: mod_base = OTHER; note = 2'-O-methyl ribonucleotide
  modified_base 85: mod_base = OTHER; note = 2'-O-methyl ribonucleotide
  modified_base 86: mod_base = OTHER; note = 2'-O-methyl ribonucleotide
  modified_base 87: mod_base = OTHER; note = 2'-O-methyl ribonucleotide
  modified_base 89: mod_base = OTHER; note = 2'-O-methyl ribonucleotide
  modified_base 92: mod_base = OTHER; note = 2'-O-methyl ribonucleotide
  modified_base 93: mod_base = OTHER; note = 2'-O-methyl ribonucleotide
  modified_base 94: mod_base = OTHER; note = 2'-O-methyl ribonucleotide
  modified_base 95: mod_base = OTHER; note = 2'-O-methyl ribonucleotide
  modified_base 96: mod_base = OTHER; note = 2'-O-methyl ribonucleotide
  modified_base 97: mod_base = OTHER; note = 2'-O-methyl ribonucleotide
  modified_base 98: mod_base = OTHER; note = 2'-O-methyl ribonucleotide
  modified_base 99: mod_base = OTHER; note = 2'-O-methyl ribonucleotide
  modified_base 100: mod_base = OTHER; note = 2'-O-methyl ribonucleotide
  modified_base 1..4: mod_base = OTHER; note = phosphorothioate linkage
  modified_base 25..26: mod_base = OTHER; note = phosphorothioate linkage
  modified_base 64..65: mod_base = OTHER; note = phosphorothioate linkage
  modified_base 97..100: mod_base = OTHER; note = phosphorothioate linkage

SEQ ID NO: 1717 - RNA, 103 nt, synthetic construct; identical to SEQ ID NO: 1699
  source 1..103: mol_type = other RNA
  modified_base 1: mod_base = OTHER; note = 2'-O-methyl ribonucleotide
  modified_base 2: mod_base = OTHER; note = 2'-O-methyl ribonucleotide
  modified_base 3: mod_base = OTHER; note = 2'-O-methyl ribonucleotide
  modified_base 21: mod_base = OTHER; note = 2'-O-methyl ribonucleotide
  modified_base 28: mod_base = OTHER; note = 2'-O-methyl ribonucleotide
  modified_base 29: mod_base = OTHER; note = 2'-O-methyl ribonucleotide
  modified_base 30: mod_base = OTHER; note = 2'-O-methyl ribonucleotide
  modified_base 31: mod_base = OTHER; note = 2'-O-methyl ribonucleotide
  modified_base 32: mod_base = OTHER; note = 2'-O-methyl ribonucleotide
  modified_base 34: mod_base = OTHER; note = 2'-O-methyl ribonucleotide
  modified_base 35: mod_base = OTHER; note = 2'-O-methyl ribonucleotide
  modified_base 36: mod_base = OTHER; note = 2'-O-methyl ribonucleotide
  modified_base 37: mod_base = OTHER; note = 2'-O-methyl ribonucleotide
  modified_base 38: mod_base = OTHER; note = 2'-O-methyl ribonucleotide
  modified_base 39: mod_base = OTHER; note = 2'-O-methyl ribonucleotide
  modified_base 40: mod_base = OTHER; note = 2'-O-methyl ribonucleotide
  modified_base 41: mod_base = OTHER; note = 2'-O-methyl ribonucleotide
  modified_base 42: mod_base = OTHER; note = 2'-O-methyl ribonucleotide
  modified_base 46: mod_base = OTHER; note = 2'-O-methyl ribonucleotide
  modified_base 48: mod_base = OTHER; note = 2'-O-methyl ribonucleotide
  modified_base 50: mod_base = OTHER; note = 2'-O-methyl ribonucleotide
  modified_base 52: mod_base = OTHER; note = 2'-O-methyl ribonucleotide
  modified_base 53: mod_base = OTHER; note = 2'-O-methyl ribonucleotide
  modified_base 54: mod_base = OTHER; note = 2'-O-methyl ribonucleotide
  modified_base 57: mod_base = OTHER; note = 2'-O-methyl ribonucleotide
  modified_base 61: mod_base = OTHER; note = 2'-O-methyl ribonucleotide
  modified_base 66: mod_base = OTHER; note = 2'-O-methyl ribonucleotide
  modified_base 67: mod_base = OTHER; note = 2'-O-methyl ribonucleotide
  modified_base 70: mod_base = OTHER; note = 2'-O-methyl ribonucleotide
  modified_base 71: mod_base = OTHER; note = 2'-O-methyl ribonucleotide
  modified_base 72: mod_base = OTHER; note = 2'-O-methyl ribonucleotide
  modified_base 74: mod_base = OTHER; note = 2'-O-methyl ribonucleotide
  modified_base 75: mod_base = OTHER; note = 2'-O-methyl ribonucleotide
  modified_base 76: mod_base = OTHER; note = 2'-O-methyl ribonucleotide
  modified_base 77: mod_base = OTHER; note = 2'-O-methyl ribonucleotide
  modified_base 78: mod_base = OTHER; note = 2'-O-methyl ribonucleotide
  modified_base 79: mod_base = OTHER; note = 2'-O-methyl ribonucleotide
  modified_base 80: mod_base = OTHER; note = 2'-O-methyl ribonucleotide
  modified_base 82: mod_base = OTHER; note = 2'-O-methyl ribonucleotide
  modified_base 83: mod_base = OTHER; note = 2'-O-methyl ribonucleotide
  modified_base 84: mod_base = OTHER; note = 2'-O-methyl ribonucleotide
  modified_base 85: mod_base = OTHER; note = 2'-O-methyl ribonucleotide
  modified_base 86: mod_base = OTHER; note = 2'-O-methyl ribonucleotide
  modified_base 87: mod_base = OTHER; note = 2'-O-methyl ribonucleotide
  modified_base 89: mod_base = OTHER; note = 2'-O-methyl ribonucleotide
  modified_base 92: mod_base = OTHER; note = 2'-O-methyl ribonucleotide
  modified_base 93: mod_base = OTHER; note = 2'-O-methyl ribonucleotide
  modified_base 94: mod_base = OTHER; note = 2'-O-methyl ribonucleotide
  modified_base 95: mod_base = OTHER; note = 2'-O-methyl ribonucleotide
  modified_base 96: mod_base = OTHER; note = 2'-O-methyl ribonucleotide
  modified_base 97: mod_base = OTHER; note = 2'-O-methyl ribonucleotide
  modified_base 98: mod_base = OTHER; note = 2'-O-methyl ribonucleotide
  modified_base 99: mod_base = OTHER; note = 2'-O-methyl ribonucleotide
  modified_base 100: mod_base = OTHER; note = 2'-O-methyl ribonucleotide
  modified_base 1..4: mod_base = OTHER; note = phosphorothioate linkage
  modified_base 25..26: mod_base = OTHER; note = phosphorothioate linkage
  modified_base 64..65: mod_base = OTHER; note = phosphorothioate linkage
  modified_base 97..100: mod_base = OTHER; note = phosphorothioate linkage

SEQ ID NO: 1718 - RNA, 103 nt, synthetic construct; identical to SEQ ID NO: 1700
  source 1..103: mol_type = other RNA
  modified_base 1: mod_base = OTHER; note = 2'-O-methyl ribonucleotide
  modified_base 2: mod_base = OTHER; note = 2'-O-methyl ribonucleotide
  modified_base 3: mod_base = OTHER; note = 2'-O-methyl ribonucleotide
  modified_base 21: mod_base = OTHER; note = 2'-O-methyl ribonucleotide
  modified_base 28: mod_base = OTHER; note = 2'-O-methyl ribonucleotide
  modified_base 29: mod_base = OTHER; note = 2'-O-methyl ribonucleotide
  modified_base 30: mod_base = OTHER; note = 2'-O-methyl ribonucleotide
  modified_base 31: mod_base = OTHER; note = 2'-O-methyl ribonucleotide
  modified_base 32: mod_base = OTHER; note = 2'-O-methyl ribonucleotide
  modified_base 34: mod_base = OTHER; note = 2'-O-methyl ribonucleotide
  modified_base 35: mod_base = OTHER; note = 2'-O-methyl ribonucleotide
  modified_base 36: mod_base = OTHER; note = 2'-O-methyl ribonucleotide
  modified_base 37: mod_base = OTHER; note = 2'-O-methyl ribonucleotide
  modified_base 38: mod_base = OTHER; note = 2'-O-methyl ribonucleotide
  modified_base 39: mod_base = OTHER; note = 2'-O-methyl ribonucleotide
  modified_base 40: mod_base = OTHER; note = 2'-O-methyl ribonucleotide
  modified_base 41: mod_base = OTHER; note = 2'-O-methyl ribonucleotide
  modified_base 42: mod_base = OTHER; note = 2'-O-methyl ribonucleotide
  modified_base 46: mod_base = OTHER; note = 2'-O-methyl ribonucleotide
  modified_base 48: mod_base = OTHER; note = 2'-O-methyl ribonucleotide
  modified_base 50: mod_base = OTHER; note = 2'-O-methyl ribonucleotide
  modified_base 52: mod_base = OTHER; note = 2'-O-methyl ribonucleotide
  modified_base 53: mod_base = OTHER; note = 2'-O-methyl ribonucleotide
  modified_base 54: mod_base = OTHER; note = 2'-O-methyl ribonucleotide
  modified_base 55: mod_base = OTHER; note = 2'-O-methyl ribonucleotide
  modified_base 56: mod_base = OTHER; note = 2'-O-methyl ribonucleotide
  modified_base 57: mod_base = OTHER; note = 2'-O-methyl ribonucleotide
  modified_base 60: mod_base = OTHER; note = 2'-O-methyl ribonucleotide
  modified_base 61: mod_base = OTHER; note = 2'-O-methyl ribonucleotide
  modified_base 66: mod_base = OTHER; note = 2'-O-methyl ribonucleotide
  modified_base 67: mod_base = OTHER; note = 2'-O-methyl ribonucleotide
  modified_base 70: mod_base = OTHER; note = 2'-O-methyl ribonucleotide
  modified_base 71: mod_base = OTHER; note = 2'-O-methyl ribonucleotide
  modified_base 72: mod_base = OTHER; note = 2'-O-methyl ribonucleotide
  modified_base 74: mod_base = OTHER; note = 2'-O-methyl ribonucleotide
  modified_base 75: mod_base = OTHER; note = 2'-O-methyl ribonucleotide
  modified_base 76: mod_base = OTHER; note = 2'-O-methyl ribonucleotide
  modified_base 77: mod_base = OTHER; note = 2'-O-methyl ribonucleotide
  modified_base 78: mod_base = OTHER; note = 2'-O-methyl ribonucleotide
  modified_base 79: mod_base = OTHER; note = 2'-O-methyl ribonucleotide
  modified_base 80: mod_base = OTHER; note = 2'-O-methyl ribonucleotide
  modified_base 81: mod_base = OTHER; note = 2'-O-methyl ribonucleotide
  modified_base 83: mod_base = OTHER; note = 2'-O-methyl ribonucleotide
  modified_base 84: mod_base = OTHER; note = 2'-O-methyl ribonucleotide
  modified_base 85: mod_base = OTHER; note = 2'-O-methyl ribonucleotide
  modified_base 86: mod_base = OTHER; note = 2'-O-methyl ribonucleotide
  modified_base 87: mod_base = OTHER; note = 2'-O-methyl ribonucleotide
  modified_base 88: mod_base = OTHER; note = 2'-O-methyl ribonucleotide
  modified_base 89: mod_base = OTHER; note = 2'-O-methyl ribonucleotide
  modified_base 90: mod_base = OTHER; note = 2'-O-methyl ribonucleotide
  modified_base 91: mod_base = OTHER; note = 2'-O-methyl ribonucleotide
  modified_base 92: mod_base = OTHER; note = 2'-O-methyl ribonucleotide
  modified_base 93: mod_base = OTHER; note = 2'-O-methyl ribonucleotide
  modified_base 94: mod_base = OTHER; note = 2'-O-methyl ribonucleotide
  modified_base 95: mod_base = OTHER; note = 2'-O-methyl ribonucleotide
  modified_base 96: mod_base = OTHER; note = 2'-O-methyl ribonucleotide
  modified_base 97: mod_base = OTHER; note = 2'-O-methyl ribonucleotide
  modified_base 98: mod_base = OTHER; note = 2'-O-methyl ribonucleotide
  modified_base 99: mod_base = OTHER; note = 2'-O-methyl ribonucleotide
  modified_base 100: mod_base = OTHER; note = 2'-O-methyl ribonucleotide
  modified_base 1..4: mod_base = OTHER; note = phosphorothioate linkage
  modified_base 25..26: mod_base = OTHER; note = phosphorothioate linkage
  modified_base 64..65: mod_base = OTHER; note = phosphorothioate linkage
  modified_base 97..100: mod_base = OTHER; note = phosphorothioate linkage

SEQ ID NO: 1719 - RNA, 103 nt, synthetic construct; identical to SEQ ID NO: 1643
  source 1..103: mol_type = other RNA
  modified_base 1: mod_base = OTHER; note = 2'-O-methyl ribonucleotide
  modified_base 2: mod_base = OTHER; note = 2'-O-methyl ribonucleotide
  modified_base 3: mod_base = OTHER; note = 2'-O-methyl ribonucleotide
  modified_base 21: mod_base = OTHER; note = 2'-O-methyl ribonucleotide
  modified_base 28: mod_base = OTHER; note = 2'-O-methyl ribonucleotide
  modified_base 29: mod_base = OTHER; note = 2'-O-methyl ribonucleotide
  modified_base 30: mod_base = OTHER; note = 2'-O-methyl ribonucleotide
  modified_base 31: mod_base = OTHER; note = 2'-O-methyl ribonucleotide
  modified_base 32: mod_base = OTHER; note = 2'-O-methyl ribonucleotide
  modified_base 34: mod_base = OTHER; note = 2'-O-methyl ribonucleotide
  modified_base 35: mod_base = OTHER; note = 2'-O-methyl ribonucleotide
  modified_base 36: mod_base = OTHER; note = 2'-O-methyl ribonucleotide
  modified_base 37: mod_base = OTHER; note = 2'-O-methyl ribonucleotide
  modified_base 38: mod_base = OTHER; note = 2'-O-methyl ribonucleotide
  modified_base 39: mod_base = OTHER; note = 2'-O-methyl ribonucleotide
  modified_base 40: mod_base = OTHER; note = 2'-O-methyl ribonucleotide
  modified_base 41: mod_base = OTHER; note = 2'-O-methyl ribonucleotide
  modified_base 42: mod_base = OTHER; note = 2'-O-methyl ribonucleotide
  modified_base 46: mod_base = OTHER; note = 2'-O-methyl ribonucleotide
  modified_base 48: mod_base = OTHER; note = 2'-O-methyl ribonucleotide
  modified_base 50: mod_base = OTHER; note = 2'-O-methyl ribonucleotide
  modified_base 52: mod_base = OTHER; note = 2'-O-methyl ribonucleotide
  modified_base 53: mod_base = OTHER; note = 2'-O-methyl ribonucleotide
  modified_base 54: mod_base = OTHER; note = 2'-O-methyl ribonucleotide
  modified_base 57: mod_base = OTHER; note = 2'-O-methyl ribonucleotide
  modified_base 61: mod_base = OTHER; note = 2'-O-methyl ribonucleotide
  modified_base 66: mod_base = OTHER; note = 2'-O-methyl ribonucleotide
  modified_base 67: mod_base = OTHER; note = 2'-O-methyl ribonucleotide
  modified_base 70: mod_base = OTHER; note = 2'-O-methyl ribonucleotide
  modified_base 71: mod_base = OTHER; note = 2'-O-methyl ribonucleotide
  modified_base 72: mod_base = OTHER; note = 2'-O-methyl ribonucleotide
  modified_base 74: mod_base = OTHER; note = 2'-O-methyl ribonucleotide
  modified_base 75: mod_base = OTHER; note = 2'-O-methyl ribonucleotide
  modified_base 76: mod_base = OTHER; note = 2'-O-methyl ribonucleotide
  modified_base 77: mod_base = OTHER; note = 2'-O-methyl ribonucleotide
  modified_base 78: mod_base = OTHER; note = 2'-O-methyl ribonucleotide
  modified_base 79: mod_base = OTHER; note = 2'-O-methyl ribonucleotide
  modified_base 80: mod_base = OTHER; note = 2'-O-methyl ribonucleotide
  modified_base 82: mod_base = OTHER; note = 2'-O-methyl ribonucleotide
  modified_base 83: mod_base = OTHER; note = 2'-O-methyl ribonucleotide
  modified_base 84: mod_base = OTHER; note = 2'-O-methyl ribonucleotide
  modified_base 85: mod_base = OTHER; note = 2'-O-methyl ribonucleotide
  modified_base 86: mod_base = OTHER; note = 2'-O-methyl ribonucleotide
  modified_base 87: mod_base = OTHER; note = 2'-O-methyl ribonucleotide
  modified_base 89: mod_base = OTHER; note = 2'-O-methyl ribonucleotide
  modified_base 92: mod_base = OTHER; note = 2'-O-methyl ribonucleotide
  modified_base 93: mod_base = OTHER; note = 2'-O-methyl ribonucleotide
  modified_base 94: mod_base = OTHER; note = 2'-O-methyl ribonucleotide
  modified_base 95: mod_base = OTHER; note = 2'-O-methyl ribonucleotide
  modified_base 96: mod_base = OTHER; note = 2'-O-methyl ribonucleotide
  modified_base 97: mod_base = OTHER; note = 2'-O-methyl ribonucleotide
  modified_base 98: mod_base = OTHER; note = 2'-O-methyl ribonucleotide
  modified_base 99: mod_base = OTHER; note = 2'-O-methyl ribonucleotide
  modified_base 100: mod_base = OTHER; note = 2'-O-methyl ribonucleotide
  modified_base 1..4: mod_base = OTHER; note = phosphorothioate linkage
  modified_base 25..26: mod_base = OTHER; note = phosphorothioate linkage
  modified_base 45..46: mod_base = OTHER; note = phosphorothioate linkage
  modified_base 64..65: mod_base = OTHER; note = phosphorothioate linkage
  modified_base 97..100: mod_base = OTHER; note = phosphorothioate linkage

SEQ ID NO: 1720 - RNA, 103 nt, synthetic construct; identical to SEQ ID NO: 1699
  source 1..103: mol_type = other RNA
  modified_base 1: mod_base = OTHER; note = 2'-O-methyl ribonucleotide
  modified_base 2: mod_base = OTHER; note = 2'-O-methyl ribonucleotide
  modified_base 3: mod_base = OTHER; note = 2'-O-methyl ribonucleotide
  modified_base 21: mod_base = OTHER; note = 2'-O-methyl ribonucleotide
  modified_base 28: mod_base = OTHER; note = 2'-O-methyl ribonucleotide
  modified_base 29: mod_base = OTHER; note = 2'-O-methyl ribonucleotide
  modified_base 30: mod_base = OTHER; note = 2'-O-methyl ribonucleotide
  modified_base 31: mod_base = OTHER; note = 2'-O-methyl ribonucleotide
  modified_base 32: mod_base = OTHER; note = 2'-O-methyl ribonucleotide
  modified_base 34: mod_base = OTHER; note = 2'-O-methyl ribonucleotide
  modified_base 35: mod_base = OTHER; note = 2'-O-methyl ribonucleotide
  modified_base 36: mod_base = OTHER; note = 2'-O-methyl ribonucleotide
  modified_base 37: mod_base = OTHER; note = 2'-O-methyl ribonucleotide
  modified_base 38: mod_base = OTHER; note = 2'-O-methyl ribonucleotide
  modified_base 39: mod_base = OTHER; note = 2'-O-methyl ribonucleotide
  modified_base 40: mod_base = OTHER; note = 2'-O-methyl ribonucleotide
  modified_base 41: mod_base = OTHER; note = 2'-O-methyl ribonucleotide
  modified_base 42: mod_base = OTHER; note = 2'-O-methyl ribonucleotide
  modified_base 46: mod_base = OTHER; note = 2'-O-methyl ribonucleotide
  modified_base 48: mod_base = OTHER; note = 2'-O-methyl ribonucleotide
  modified_base 50: mod_base = OTHER; note = 2'-O-methyl ribonucleotide
  modified_base 52: mod_base = OTHER; note = 2'-O-methyl ribonucleotide
  modified_base 53: mod_base = OTHER; note = 2'-O-methyl ribonucleotide
  modified_base 54: mod_base = OTHER; note = 2'-O-methyl ribonucleotide
  modified_base 57: mod_base = OTHER; note = 2'-O-methyl ribonucleotide
  modified_base 61: mod_base = OTHER; note = 2'-O-methyl ribonucleotide
  modified_base 66: mod_base = OTHER; note = 2'-O-methyl ribonucleotide
  modified_base 67: mod_base = OTHER; note = 2'-O-methyl ribonucleotide
  modified_base 70: mod_base = OTHER; note = 2'-O-methyl ribonucleotide
  modified_base 71: mod_base = OTHER; note = 2'-O-methyl ribonucleotide
  modified_base 72: mod_base = OTHER; note = 2'-O-methyl ribonucleotide
  modified_base 74: mod_base = OTHER; note = 2'-O-methyl ribonucleotide
  modified_base 75: mod_base = OTHER; note = 2'-O-methyl ribonucleotide
  modified_base 76: mod_base = OTHER; note = 2'-O-methyl ribonucleotide
  modified_base 77: mod_base = OTHER; note = 2'-O-methyl ribonucleotide
  modified_base 78: mod_base = OTHER; note = 2'-O-methyl ribonucleotide
  modified_base 79: mod_base = OTHER; note = 2'-O-methyl ribonucleotide
  modified_base 80: mod_base = OTHER; note = 2'-O-methyl ribonucleotide
  modified_base 82: mod_base = OTHER; note = 2'-O-methyl ribonucleotide
  modified_base 83: mod_base = OTHER; note = 2'-O-methyl ribonucleotide
  modified_base 84: mod_base = OTHER; note = 2'-O-methyl ribonucleotide
  modified_base 85: mod_base = OTHER; note = 2'-O-methyl ribonucleotide
  modified_base 86: mod_base = OTHER; note = 2'-O-methyl ribonucleotide
  modified_base 87: mod_base = OTHER; note = 2'-O-methyl ribonucleotide
  modified_base 89: mod_base = OTHER; note = 2'-O-methyl ribonucleotide
  modified_base 92: mod_base = OTHER; note = 2'-O-methyl ribonucleotide
  modified_base 93: mod_base = OTHER; note = 2'-O-methyl ribonucleotide
  modified_base 94: mod_base = OTHER; note = 2'-O-methyl ribonucleotide
  modified_base 95: mod_base = OTHER; note = 2'-O-methyl ribonucleotide
  modified_base 96: mod_base = OTHER; note = 2'-O-methyl ribonucleotide
  modified_base 97: mod_base = OTHER; note = 2'-O-methyl ribonucleotide
  modified_base 98: mod_base = OTHER; note = 2'-O-methyl ribonucleotide
  modified_base 99: mod_base = OTHER; note = 2'-O-methyl ribonucleotide
  modified_base 100: mod_base = OTHER; note = 2'-O-methyl ribonucleotide
  modified_base 1..4: mod_base = OTHER; note = phosphorothioate linkage
  modified_base 25..26: mod_base = OTHER; note = phosphorothioate linkage
  modified_base 45..46: mod_base = OTHER; note = phosphorothioate linkage
  modified_base 64..65: mod_base = OTHER; note = phosphorothioate linkage
  modified_base 97..100: mod_base = OTHER; note = phosphorothioate linkage

SEQ ID NO: 1721 - RNA, 103 nt, synthetic construct; identical to SEQ ID NO: 1700
  source 1..103: mol_type = other RNA
  modified_base 1: mod_base = OTHER; note = 2'-O-methyl ribonucleotide
  modified_base 2: mod_base = OTHER; note = 2'-O-methyl ribonucleotide
  modified_base 3: mod_base = OTHER; note = 2'-O-methyl ribonucleotide
  modified_base 21: mod_base = OTHER; note = 2'-O-methyl ribonucleotide
  modified_base 28: mod_base = OTHER; note = 2'-O-methyl ribonucleotide
  modified_base 29: mod_base = OTHER; note = 2'-O-methyl ribonucleotide
  modified_base 30: mod_base = OTHER; note = 2'-O-methyl ribonucleotide
  modified_base 31: mod_base = OTHER; note = 2'-O-methyl ribonucleotide
  modified_base 32: mod_base = OTHER; note = 2'-O-methyl ribonucleotide
  modified_base 34: mod_base = OTHER; note = 2'-O-methyl ribonucleotide
  modified_base 35: mod_base = OTHER; note = 2'-O-methyl ribonucleotide
  modified_base 36: mod_base = OTHER; note = 2'-O-methyl ribonucleotide
  modified_base 37: mod_base = OTHER; note = 2'-O-methyl ribonucleotide
  modified_base 38: mod_base = OTHER; note = 2'-O-methyl ribonucleotide
  modified_base 39: mod_base = OTHER; note = 2'-O-methyl ribonucleotide
  modified_base 40: mod_base = OTHER; note = 2'-O-methyl ribonucleotide
  modified_base 41: mod_base = OTHER; note = 2'-O-methyl ribonucleotide
  modified_base 42: mod_base = OTHER; note = 2'-O-methyl ribonucleotide
  modified_base 46: mod_base = OTHER; note = 2'-O-methyl ribonucleotide
  modified_base 48: mod_base = OTHER; note = 2'-O-methyl ribonucleotide
  modified_base 50: mod_base = OTHER; note = 2'-O-methyl ribonucleotide
  modified_base 52: mod_base = OTHER; note = 2'-O-methyl ribonucleotide
  modified_base 53: mod_base = OTHER; note = 2'-O-methyl ribonucleotide
  modified_base 54: mod_base = OTHER; note = 2'-O-methyl ribonucleotide
  modified_base 55: mod_base = OTHER; note = 2'-O-methyl ribonucleotide
  modified_base 56: mod_base = OTHER; note = 2'-O-methyl ribonucleotide
  modified_base 57: mod_base = OTHER; note = 2'-O-methyl ribonucleotide
  modified_base 60: mod_base = OTHER; note = 2'-O-methyl ribonucleotide
  modified_base 61: mod_base = OTHER; note = 2'-O-methyl ribonucleotide
  modified_base 66: mod_base = OTHER; note = 2'-O-methyl ribonucleotide
  modified_base 67: mod_base = OTHER; note = 2'-O-methyl ribonucleotide
  modified_base 70: mod_base = OTHER; note = 2'-O-methyl ribonucleotide
  modified_base 71: mod_base = OTHER; note = 2'-O-methyl ribonucleotide
  modified_base 72: mod_base = OTHER; note = 2'-O-methyl ribonucleotide
  modified_base 74: mod_base = OTHER; note = 2'-O-methyl ribonucleotide
  modified_base 75: mod_base = OTHER; note = 2'-O-methyl ribonucleotide
  modified_base 76: mod_base = OTHER; note = 2'-O-methyl ribonucleotide
  modified_base 77: mod_base = OTHER; note = 2'-O-methyl ribonucleotide
  modified_base 78: mod_base = OTHER; note = 2'-O-methyl ribonucleotide
  modified_base 79: mod_base = OTHER; note = 2'-O-methyl ribonucleotide
  modified_base 80: mod_base = OTHER; note = 2'-O-methyl ribonucleotide
  modified_base 81: mod_base = OTHER; note = 2'-O-methyl ribonucleotide
  modified_base 83: mod_base = OTHER; note = 2'-O-methyl ribonucleotide
  modified_base 84: mod_base = OTHER; note = 2'-O-methyl ribonucleotide
  modified_base 85: mod_base = OTHER; note = 2'-O-methyl ribonucleotide
  modified_base 86: mod_base = OTHER; note = 2'-O-methyl ribonucleotide
  modified_base 87: mod_base = OTHER; note = 2'-O-methyl ribonucleotide
  modified_base 88: mod_base = OTHER; note = 2'-O-methyl ribonucleotide
  modified_base 89: mod_base = OTHER; note = 2'-O-methyl ribonucleotide
  modified_base 90: mod_base = OTHER; note = 2'-O-methyl ribonucleotide
  modified_base 91: mod_base = OTHER; note = 2'-O-methyl ribonucleotide
  modified_base 92: mod_base = OTHER; note = 2'-O-methyl ribonucleotide
  modified_base 93: mod_base = OTHER; note = 2'-O-methyl ribonucleotide
  modified_base 94: mod_base = OTHER; note = 2'-O-methyl ribonucleotide
  modified_base 95: mod_base = OTHER; note = 2'-O-methyl ribonucleotide
  modified_base 96: mod_base = OTHER; note = 2'-O-methyl ribonucleotide
  modified_base 97: mod_base = OTHER; note = 2'-O-methyl ribonucleotide
  modified_base 98: mod_base = OTHER; note = 2'-O-methyl ribonucleotide
  modified_base 99: mod_base = OTHER; note = 2'-O-methyl ribonucleotide
  modified_base 100: mod_base = OTHER; note = 2'-O-methyl ribonucleotide
  modified_base 1..4: mod_base = OTHER; note = phosphorothioate linkage
  modified_base 25..26: mod_base = OTHER; note = phosphorothioate linkage
  modified_base 45..46: mod_base = OTHER; note = phosphorothioate linkage
  modified_base 64..65: mod_base = OTHER; note = phosphorothioate linkage
  modified_base 97..100: mod_base = OTHER; note = phosphorothioate linkage

SEQ ID NO: 1722 - RNA, 103 nt, synthetic construct; identical to SEQ ID NO: 1700
  source 1..103: mol_type = other RNA
  modified_base 1: mod_base = OTHER; note = 2'-O-methyl ribonucleotide
  modified_base 2: mod_base = OTHER; note = 2'-O-methyl ribonucleotide
  modified_base 3: mod_base = OTHER; note = 2'-O-methyl ribonucleotide
  modified_base 21: mod_base = OTHER; note = 2'-O-methyl ribonucleotide
  modified_base 28: mod_base = OTHER; note = 2'-O-methyl ribonucleotide
  modified_base 29: mod_base = OTHER; note = 2'-O-methyl ribonucleotide
  modified_base 30: mod_base = OTHER; note = 2'-O-methyl ribonucleotide
  modified_base 31: mod_base = OTHER; note = 2'-O-methyl ribonucleotide
  modified_base 32: mod_base = OTHER; note = 2'-O-methyl ribonucleotide
  modified_base 34: mod_base = OTHER; note = 2'-O-methyl ribonucleotide
  modified_base 35: mod_base = OTHER; note = 2'-O-methyl ribonucleotide
  modified_base 36: mod_base = OTHER; note = 2'-O-methyl ribonucleotide
  modified_base 37: mod_base = OTHER; note = 2'-O-methyl ribonucleotide
  modified_base 38: mod_base = OTHER; note = 2'-O-methyl ribonucleotide
  modified_base 39: mod_base = OTHER; note = 2'-O-methyl ribonucleotide
  modified_base 40: mod_base = OTHER; note = 2'-O-methyl ribonucleotide
  modified_base 41: mod_base = OTHER; note = 2'-O-methyl ribonucleotide
  modified_base 42: mod_base = OTHER; note = 2'-O-methyl ribonucleotide
  modified_base 46: mod_base = OTHER; note = 2'-O-methyl ribonucleotide
  modified_base 48: mod_base = OTHER; note = 2'-O-methyl ribonucleotide
  modified_base 50: mod_base = OTHER; note = 2'-O-methyl ribonucleotide
  modified_base 52: mod_base = OTHER; note = 2'-O-methyl ribonucleotide
  modified_base 53: mod_base = OTHER; note = 2'-O-methyl ribonucleotide
  modified_base 54: mod_base = OTHER; note = 2'-O-methyl ribonucleotide
  modified_base 57: mod_base = OTHER; note = 2'-O-methyl ribonucleotide
  modified_base 61: mod_base = OTHER; note = 2'-O-methyl ribonucleotide
  modified_base 66: mod_base = OTHER; note = 2'-O-methyl ribonucleotide
  modified_base 67: mod_base = OTHER; note = 2'-O-methyl ribonucleotide
  modified_base 70: mod_base = OTHER; note = 2'-O-methyl ribonucleotide
  modified_base 71: mod_base = OTHER; note = 2'-O-methyl ribonucleotide
  modified_base 72: mod_base = OTHER; note = 2'-O-methyl ribonucleotide
  modified_base 74: mod_base = OTHER; note = 2'-O-methyl ribonucleotide
  modified_base 75: mod_base = OTHER; note = 2'-O-methyl ribonucleotide
  modified_base 76: mod_base = OTHER; note = 2'-O-methyl ribonucleotide
  modified_base 77: mod_base = OTHER; note = 2'-O-methyl ribonucleotide
  modified_base 78: mod_base = OTHER; note = 2'-O-methyl ribonucleotide
  modified_base 79: mod_base = OTHER; note = 2'-O-methyl ribonucleotide
  modified_base 80: mod_base = OTHER; note = 2'-O-methyl ribonucleotide
  modified_base 82: mod_base = OTHER; note = 2'-O-methyl ribonucleotide
  modified_base 83: mod_base = OTHER; note = 2'-O-methyl ribonucleotide
  modified_base 84: mod_base = OTHER; note = 2'-O-methyl ribonucleotide
  modified_base 85: mod_base = OTHER; note = 2'-O-methyl ribonucleotide
  modified_base 86: mod_base = OTHER; note = 2'-O-methyl ribonucleotide
  modified_base 87: mod_base = OTHER; note = 2'-O-methyl ribonucleotide
  modified_base 89: mod_base = OTHER; note = 2'-O-methyl ribonucleotide
  modified_base 92: mod_base = OTHER; note = 2'-O-methyl ribonucleotide
  modified_base 93: mod_base = OTHER; note = 2'-O-methyl ribonucleotide
  modified_base 94: mod_base = OTHER; note = 2'-O-methyl ribonucleotide
  modified_base 95: mod_base = OTHER; note = 2'-O-methyl ribonucleotide
  modified_base 96: mod_base = OTHER; note = 2'-O-methyl ribonucleotide
  modified_base 97: mod_base = OTHER; note = 2'-O-methyl ribonucleotide
  modified_base 98: mod_base = OTHER; note = 2'-O-methyl ribonucleotide
  modified_base 99: mod_base = OTHER; note = 2'-O-methyl ribonucleotide
  modified_base 100: mod_base = OTHER; note = 2'-O-methyl ribonucleotide
  modified_base 1..3: mod_base = OTHER; note = phosphorothioate linkage
  modified_base 97..100: mod_base = OTHER; note = phosphorothioate linkage

SEQ ID NO: 1723 - RNA, 103 nt, synthetic construct; identical to SEQ ID NO: 1643
  source 1..103: mol_type = other RNA
  modified_base 1: mod_base = OTHER; note = 2'-O-methyl ribonucleotide
  modified_base 2: mod_base = OTHER; note = 2'-O-methyl ribonucleotide
  modified_base 3: mod_base = OTHER; note = 2'-O-methyl ribonucleotide
  modified_base 21: mod_base = OTHER; note = 2'-O-methyl ribonucleotide
  modified_base 28: mod_base = OTHER; note = 2'-O-methyl ribonucleotide
  modified_base 29: mod_base = OTHER; note = 2'-O-methyl ribonucleotide
  modified_base 30: mod_base = OTHER; note = 2'-O-methyl ribonucleotide
  modified_base 31: mod_base = OTHER; note = 2'-O-methyl ribonucleotide
  modified_base 32: mod_base = OTHER; note = 2'-O-methyl ribonucleotide
  modified_base 34: mod_base = OTHER; note = 2'-O-methyl ribonucleotide
  modified_base 35: mod_base = OTHER; note = 2'-O-methyl ribonucleotide
  modified_base 36: mod_base = OTHER; note = 2'-O-methyl ribonucleotide
  modified_base 37: mod_base = OTHER; note = 2'-O-methyl ribonucleotide
  modified_base 38: mod_base = OTHER; note = 2'-O-methyl ribonucleotide
  modified_base 39: mod_base = OTHER; note = 2'-O-methyl ribonucleotide
  modified_base 40: mod_base = OTHER; note = 2'-O-methyl ribonucleotide
  modified_base 41: mod_base = OTHER; note = 2'-O-methyl ribonucleotide
  modified_base 42: mod_base = OTHER; note = 2'-O-methyl ribonucleotide
  modified_base 46: mod_base = OTHER; note = 2'-O-methyl ribonucleotide
  modified_base 48: mod_base = OTHER; note = 2'-O-methyl ribonucleotide
  modified_base 50: mod_base = OTHER; note = 2'-O-methyl ribonucleotide
  modified_base 52: mod_base = OTHER; note = 2'-O-methyl ribonucleotide
  modified_base 53: mod_base = OTHER; note = 2'-O-methyl ribonucleotide
  modified_base 54: mod_base = OTHER; note = 2'-O-methyl ribonucleotide
  modified_base 57: mod_base = OTHER; note = 2'-O-methyl ribonucleotide
  modified_base 61: mod_base = OTHER; note = 2'-O-methyl ribonucleotide
  modified_base 66: mod_base = OTHER; note = 2'-O-methyl ribonucleotide
  modified_base 67: mod_base = OTHER; note = 2'-O-methyl ribonucleotide
  modified_base 70: mod_base = OTHER; note = 2'-O-methyl ribonucleotide
  modified_base 71: mod_base = OTHER; note = 2'-O-methyl ribonucleotide
  modified_base 72: mod_base = OTHER; note = 2'-O-methyl ribonucleotide
  modified_base 74: mod_base = OTHER; note = 2'-O-methyl ribonucleotide
  modified_base 75: mod_base = OTHER; note = 2'-O-methyl ribonucleotide
  modified_base 76: mod_base = OTHER; note = 2'-O-methyl ribonucleotide
  modified_base 77: mod_base = OTHER; note = 2'-O-methyl ribonucleotide
  modified_base 78: mod_base = OTHER; note = 2'-O-methyl ribonucleotide
  modified_base 79: mod_base = OTHER; note = 2'-O-methyl ribonucleotide
  modified_base 80: mod_base = OTHER; note = 2'-O-methyl ribonucleotide
  modified_base 82: mod_base = OTHER; note = 2'-O-methyl ribonucleotide
  modified_base 83: mod_base = OTHER; note = 2'-O-methyl ribonucleotide
  modified_base 84: mod_base = OTHER; note = 2'-O-methyl ribonucleotide
  modified_base 85: mod_base = OTHER; note = 2'-O-methyl ribonucleotide
  modified_base 86: mod_base = OTHER; note = 2'-O-methyl ribonucleotide
  modified_base 87: mod_base = OTHER; note = 2'-O-methyl ribonucleotide
  modified_base 89: mod_base = OTHER; note = 2'-O-methyl ribonucleotide
  modified_base 92: mod_base = OTHER; note = 2'-O-methyl ribonucleotide
  modified_base 93: mod_base = OTHER; note = 2'-O-methyl ribonucleotide
  modified_base 94: mod_base = OTHER; note = 2'-O-methyl ribonucleotide
  modified_base 95: mod_base = OTHER; note = 2'-O-methyl ribonucleotide
  modified_base 96: mod_base = OTHER; note = 2'-O-methyl ribonucleotide
  modified_base 97: mod_base = OTHER; note = 2'-O-methyl ribonucleotide
  modified_base 98: mod_base = OTHER; note = 2'-O-methyl ribonucleotide
  modified_base 99: mod_base = OTHER; note = 2'-O-methyl ribonucleotide
  modified_base 100: mod_base = OTHER; note = 2'-O-methyl ribonucleotide
  modified_base 1..3: mod_base = OTHER; note = phosphorothioate linkage
  modified_base 97..100: mod_base = OTHER; note = phosphorothioate linkage

SEQ ID NO: 1724 - RNA, 103 nt, synthetic construct; identical to SEQ ID NO: 1699
  source 1..103: mol_type = other RNA
  modified_base 1: mod_base = OTHER; note = 2'-O-methyl ribonucleotide
  modified_base 2: mod_base = OTHER; note = 2'-O-methyl ribonucleotide
  modified_base 3: mod_base = OTHER; note = 2'-O-methyl ribonucleotide
  modified_base 21: mod_base = OTHER; note = 2'-O-methyl ribonucleotide
  modified_base 28: mod_base = OTHER; note = 2'-O-methyl ribonucleotide
  modified_base 29: mod_base = OTHER; note = 2'-O-methyl ribonucleotide
  modified_base 30: mod_base = OTHER; note = 2'-O-methyl ribonucleotide
  modified_base 31: mod_base = OTHER; note = 2'-O-methyl ribonucleotide
  modified_base 32: mod_base = OTHER; note = 2'-O-methyl ribonucleotide
  modified_base 34: mod_base = OTHER; note = 2'-O-methyl ribonucleotide
  modified_base 35: mod_base = OTHER; note = 2'-O-methyl ribonucleotide
  modified_base 36: mod_base = OTHER; note = 2'-O-methyl ribonucleotide
  modified_base 37: mod_base = OTHER; note = 2'-O-methyl ribonucleotide
  modified_base 38: mod_base = OTHER; note = 2'-O-methyl ribonucleotide
  modified_base 39: mod_base = OTHER; note = 2'-O-methyl ribonucleotide
  modified_base 40: mod_base = OTHER; note = 2'-O-methyl ribonucleotide
  modified_base 41: mod_base = OTHER; note = 2'-O-methyl ribonucleotide
  modified_base 42: mod_base = OTHER; note = 2'-O-methyl ribonucleotide
  modified_base 46: mod_base = OTHER; note = 2'-O-methyl ribonucleotide
  modified_base 48: mod_base = OTHER; note = 2'-O-methyl ribonucleotide
  modified_base 50: mod_base = OTHER; note = 2'-O-methyl ribonucleotide
  modified_base 52: mod_base = OTHER; note = 2'-O-methyl ribonucleotide
  modified_base 53: mod_base = OTHER; note = 2'-O-methyl ribonucleotide
  modified_base 54: mod_base = OTHER; note = 2'-O-methyl ribonucleotide
  modified_base 57: mod_base = OTHER; note = 2'-O-methyl ribonucleotide
  modified_base 61: mod_base = OTHER; note = 2'-O-methyl ribonucleotide
  modified_base 66: mod_base = OTHER; note = 2'-O-methyl ribonucleotide
  modified_base 67: mod_base = OTHER; note = 2'-O-methyl ribonucleotide
  modified_base 70: mod_base = OTHER; note = 2'-O-methyl ribonucleotide
  modified_base 71: mod_base = OTHER; note = 2'-O-methyl ribonucleotide
  modified_base 72: mod_base = OTHER; note = 2'-O-methyl ribonucleotide
  modified_base 74: mod_base = OTHER; note = 2'-O-methyl ribonucleotide
  modified_base 75: mod_base = OTHER; note = 2'-O-methyl ribonucleotide
  modified_base 76: mod_base = OTHER; note = 2'-O-methyl ribonucleotide
  modified_base 77: mod_base = OTHER; note = 2'-O-methyl ribonucleotide
  modified_base 78: mod_base = OTHER; note = 2'-O-methyl ribonucleotide
  modified_base 79: mod_base = OTHER; note = 2'-O-methyl ribonucleotide
  modified_base 80: mod_base = OTHER; note = 2'-O-methyl ribonucleotide
  modified_base 82: mod_base = OTHER; note = 2'-O-methyl ribonucleotide
  modified_base 83: mod_base = OTHER; note = 2'-O-methyl ribonucleotide
  modified_base 84: mod_base = OTHER; note = 2'-O-methyl ribonucleotide
  modified_base 85: mod_base = OTHER; note = 2'-O-methyl ribonucleotide
  modified_base 86: mod_base = OTHER; note = 2'-O-methyl ribonucleotide
  modified_base 87: mod_base = OTHER; note = 2'-O-methyl ribonucleotide
  modified_base 89: mod_base = OTHER; note = 2'-O-methyl ribonucleotide
  modified_base 92: mod_base = OTHER; note = 2'-O-methyl ribonucleotide
  modified_base 93: mod_base = OTHER; note = 2'-O-methyl ribonucleotide
  modified_base 94: mod_base = OTHER; note = 2'-O-methyl ribonucleotide
  modified_base 95: mod_base = OTHER; note = 2'-O-methyl ribonucleotide
  modified_base 96: mod_base = OTHER; note = 2'-O-methyl ribonucleotide
  modified_base 97: mod_base = OTHER; note = 2'-O-methyl ribonucleotide
  modified_base 98: mod_base = OTHER; note = 2'-O-methyl ribonucleotide
  modified_base 99: mod_base = OTHER; note = 2'-O-methyl ribonucleotide
  modified_base 100: mod_base = OTHER; note = 2'-O-methyl ribonucleotide
  modified_base 1..3: mod_base = OTHER; note = phosphorothioate linkage
  modified_base 97..100: mod_base = OTHER; note = phosphorothioate linkage

SEQ ID NO: 1725 - RNA, 103 nt, synthetic construct; identical to SEQ ID NO: 1700
  source 1..103: mol_type = other RNA
  modified_base 1: mod_base = OTHER; note = 2'-O-methyl ribonucleotide
  modified_base 2: mod_base = OTHER; note = 2'-O-methyl ribonucleotide
  modified_base 3: mod_base = OTHER; note = 2'-O-methyl ribonucleotide
  modified_base 21: mod_base = OTHER; note = 2'-O-methyl ribonucleotide
  modified_base 28: mod_base = OTHER; note = 2'-O-methyl ribonucleotide
  modified_base 29: mod_base = OTHER; note = 2'-O-methyl ribonucleotide
  modified_base 30: mod_base = OTHER; note = 2'-O-methyl ribonucleotide
  modified_base 31: mod_base = OTHER; note = 2'-O-methyl ribonucleotide
  modified_base 32: mod_base = OTHER; note = 2'-O-methyl ribonucleotide
  modified_base 33: mod_base = OTHER; note = 2'-O-methyl ribonucleotide
  modified_base 34: mod_base = OTHER; note = 2'-O-methyl ribonucleotide
  modified_base 35: mod_base = OTHER; note = 2'-O-methyl ribonucleotide
  modified_base 36: mod_base = OTHER; note = 2'-O-methyl ribonucleotide
  modified_base 37: mod_base = OTHER; note = 2'-O-methyl ribonucleotide
  modified_base 38: mod_base = OTHER; note = 2'-O-methyl ribonucleotide
  modified_base 39: mod_base = OTHER; note = 2'-O-methyl ribonucleotide
  modified_base 40: mod_base = OTHER; note = 2'-O-methyl ribonucleotide
  modified_base 41: mod_base = OTHER; note = 2'-O-methyl ribonucleotide
  modified_base 42: mod_base = OTHER; note = 2'-O-methyl ribonucleotide
  modified_base 46: mod_base = OTHER; note = 2'-O-methyl ribonucleotide
  modified_base 48: mod_base = OTHER; note = 2'-O-methyl ribonucleotide
  modified_base 50: mod_base = OTHER; note = 2'-O-methyl ribonucleotide
  modified_base 52: mod_base = OTHER; note = 2'-O-methyl ribonucleotide
  modified_base 53: mod_base = OTHER; note = 2'-O-methyl ribonucleotide
  modified_base 54: mod_base = OTHER; note = 2'-O-methyl ribonucleotide
  modified_base 57: mod_base = OTHER; note = 2'-O-methyl ribonucleotide
  modified_base 61: mod_base = OTHER; note = 2'-O-methyl ribonucleotide
  modified_base 66: mod_base = OTHER; note = 2'-O-methyl ribonucleotide
  modified_base 67: mod_base = OTHER; note = 2'-O-methyl ribonucleotide
  modified_base 70: mod_base = OTHER; note = 2'-O-methyl ribonucleotide
  modified_base 71: mod_base = OTHER; note = 2'-O-methyl ribonucleotide
  modified_base 72: mod_base = OTHER; note = 2'-O-methyl ribonucleotide
  modified_base 73: mod_base = OTHER; note = 2'-O-methyl ribonucleotide
  modified_base 74: mod_base = OTHER; note = 2'-O-methyl ribonucleotide
  modified_base 75: mod_base = OTHER; note = 2'-O-methyl ribonucleotide
  modified_base 76: mod_base = OTHER; note = 2'-O-methyl ribonucleotide
  modified_base 77: mod_base = OTHER; note = 2'-O-methyl ribonucleotide
  modified_base 78: mod_base = OTHER; note = 2'-O-methyl ribonucleotide
  modified_base 79: mod_base = OTHER; note = 2'-O-methyl ribonucleotide
  modified_base 80: mod_base = OTHER; note = 2'-O-methyl ribonucleotide
  modified_base 82: mod_base = OTHER; note = 2'-O-methyl ribonucleotide
  modified_base 83: mod_base = OTHER; note = 2'-O-methyl ribonucleotide
  modified_base 84: mod_base = OTHER; note = 2'-O-methyl ribonucleotide
  modified_base 85: mod_base = OTHER; note = 2'-O-methyl ribonucleotide
  modified_base 86: mod_base = OTHER; note = 2'-O-methyl ribonucleotide
  modified_base 87: mod_base = OTHER; note = 2'-O-methyl ribonucleotide
  modified_base 89: mod_base = OTHER; note = 2'-O-methyl ribonucleotide
  modified_base 91: mod_base = OTHER; note = 2'-O-methyl ribonucleotide
  modified_base 92: mod_base = OTHER; note = 2'-O-methyl ribonucleotide
  modified_base 93: mod_base = OTHER; note = 2'-O-methyl ribonucleotide
  modified_base 94: mod_base = OTHER; note = 2'-O-methyl ribonucleotide
  modified_base 95: mod_base = OTHER; note = 2'-O-methyl ribonucleotide
  modified_base 96: mod_base = OTHER; note = 2'-O-methyl ribonucleotide
  modified_base 97: mod_base = OTHER; note = 2'-O-methyl ribonucleotide
  modified_base 98: mod_base = OTHER; note = 2'-O-methyl ribonucleotide
  modified_base 99: mod_base = OTHER; note = 2'-O-methyl ribonucleotide
  modified_base 100: mod_base = OTHER; note = 2'-O-methyl ribonucleotide
  modified_base 1..3: mod_base = OTHER; note = phosphorothioate linkage
  modified_base 97..100: mod_base = OTHER; note = phosphorothioate linkage

SEQ ID NO: 1726 - RNA, 103 nt, synthetic construct; identical to SEQ ID NO: 1643
  source 1..103: mol_type = other RNA
  modified_base 1: mod_base = OTHER; note = 2'-O-methyl ribonucleotide
  modified_base 2: mod_base = OTHER; note = 2'-O-methyl ribonucleotide
  modified_base 3: mod_base = OTHER; note = 2'-O-methyl ribonucleotide
  modified_base 21: mod_base = OTHER; note = 2'-O-methyl ribonucleotide
  modified_base 28: mod_base = OTHER; note = 2'-O-methyl ribonucleotide
  modified_base 29: mod_base = OTHER; note = 2'-O-methyl ribonucleotide
  modified_base 30: mod_base = OTHER; note = 2'-O-methyl ribonucleotide
  modified_base 31: mod_base = OTHER; note = 2'-O-methyl ribonucleotide
  modified_base 32: mod_base = OTHER; note = 2'-O-methyl ribonucleotide
  modified_base 34: mod_base = OTHER; note = 2'-O-methyl ribonucleotide
  modified_base 35: mod_base = OTHER; note = 2'-O-methyl ribonucleotide
  modified_base 36: mod_base = OTHER; note = 2'-O-methyl ribonucleotide
  modified_base 37: mod_base = OTHER; note = 2'-O-methyl ribonucleotide
  modified_base 38: mod_base = OTHER; note = 2'-O-methyl ribonucleotide
  modified_base 39: mod_base = OTHER; note = 2'-O-methyl ribonucleotide
  modified_base 40: mod_base = OTHER; note = 2'-O-methyl ribonucleotide
  modified_base 41: mod_base = OTHER; note = 2'-O-methyl ribonucleotide
  modified_base 42: mod_base = OTHER; note = 2'-O-methyl ribonucleotide
  modified_base 46: mod_base = OTHER; note = 2'-O-methyl ribonucleotide
  modified_base 48: mod_base = OTHER; note = 2'-O-methyl ribonucleotide
  modified_base 50: mod_base = OTHER; note = 2'-O-methyl ribonucleotide
  modified_base 52: mod_base = OTHER; note = 2'-O-methyl ribonucleotide
  modified_base 53: mod_base = OTHER; note = 2'-O-methyl ribonucleotide
  modified_base 54: mod_base = OTHER; note = 2'-O-methyl ribonucleotide
  modified_base 57: mod_base = OTHER; note = 2'-O-methyl ribonucleotide
  modified_base 61: mod_base = OTHER; note = 2'-O-methyl ribonucleotide
  modified_base 66: mod_base = OTHER; note = 2'-O-methyl ribonucleotide
  modified_base 67: mod_base = OTHER; note = 2'-O-methyl ribonucleotide
  modified_base 70: mod_base = OTHER; note = 2'-O-methyl ribonucleotide
  modified_base 71: mod_base = OTHER; note = 2'-O-methyl ribonucleotide
  modified_base 72: mod_base = OTHER; note = 2'-O-methyl ribonucleotide
  modified_base 74: mod_base = OTHER; note = 2'-O-methyl ribonucleotide
  modified_base 75: mod_base = OTHER; note = 2'-O-methyl ribonucleotide
  modified_base 76: mod_base = OTHER; note = 2'-O-methyl ribonucleotide
  modified_base 77: mod_base = OTHER; note = 2'-O-methyl ribonucleotide
  modified_base 78: mod_base = OTHER; note = 2'-O-methyl ribonucleotide
  modified_base 79: mod_base = OTHER; note = 2'-O-methyl ribonucleotide
  modified_base 80: mod_base = OTHER; note = 2'-O-methyl ribonucleotide
  modified_base 82: mod_base = OTHER; note = 2'-O-methyl ribonucleotide
  modified_base 83: mod_base = OTHER; note = 2'-O-methyl ribonucleotide
  modified_base 84: mod_base = OTHER; note = 2'-O-methyl ribonucleotide
  modified_base 85: mod_base = OTHER; note = 2'-O-methyl ribonucleotide
  modified_base 86: mod_base = OTHER; note = 2'-O-methyl ribonucleotide
  modified_base 87: mod_base = OTHER; note = 2'-O-methyl ribonucleotide
  modified_base 89: mod_base = OTHER; note = 2'-O-methyl ribonucleotide
  modified_base 92: mod_base = OTHER; note = 2'-O-methyl ribonucleotide
  modified_base 93: mod_base = OTHER; note = 2'-O-methyl ribonucleotide
  modified_base 94: mod_base = OTHER; note = 2'-O-methyl ribonucleotide
  modified_base 95: mod_base = OTHER; note = 2'-O-methyl ribonucleotide
  modified_base 96: mod_base = OTHER; note = 2'-O-methyl ribonucleotide
  modified_base 97: mod_base = OTHER; note = 2'-O-methyl ribonucleotide
  modified_base 98: mod_base = OTHER; note = 2'-O-methyl ribonucleotide
  modified_base 99: mod_base = OTHER; note = 2'-O-methyl ribonucleotide
  modified_base 100: mod_base = OTHER; note = 2'-O-methyl ribonucleotide
  modified_base 1..3: mod_base = OTHER; note = phosphorothioate linkage
  modified_base 64..65: mod_base = OTHER; note = phosphorothioate linkage
  modified_base 97..100: mod_base = OTHER; note = phosphorothioate linkage

SEQ ID NO: 1727 - RNA, 103 nt, synthetic construct; identical to SEQ ID NO: 1699
  source 1..103: mol_type = other RNA
  modified_base 1: mod_base = OTHER; note = 2'-O-methyl ribonucleotide
  modified_base 2: mod_base = OTHER; note = 2'-O-methyl ribonucleotide
  modified_base 3: mod_base = OTHER; note = 2'-O-methyl ribonucleotide
  modified_base 21: mod_base = OTHER; note = 2'-O-methyl ribonucleotide
  modified_base 28: mod_base = OTHER; note = 2'-O-methyl ribonucleotide
  modified_base 29: mod_base = OTHER; note = 2'-O-methyl ribonucleotide
  modified_base 30: mod_base = OTHER; note = 2'-O-methyl ribonucleotide
  modified_base 31: mod_base = OTHER; note = 2'-O-methyl ribonucleotide
  modified_base 32: mod_base = OTHER; note = 2'-O-methyl ribonucleotide
  modified_base 34: mod_base = OTHER; note = 2'-O-methyl ribonucleotide
  modified_base 35: mod_base = OTHER; note = 2'-O-methyl ribonucleotide
  modified_base 36: mod_base = OTHER; note = 2'-O-methyl ribonucleotide
  modified_base 37: mod_base = OTHER; note = 2'-O-methyl ribonucleotide
  modified_base 38: mod_base = OTHER; note = 2'-O-methyl ribonucleotide
  modified_base 39: mod_base = OTHER; note = 2'-O-methyl ribonucleotide
  modified_base 40: mod_base = OTHER; note = 2'-O-methyl ribonucleotide
  modified_base 41: mod_base = OTHER; note = 2'-O-methyl ribonucleotide
  modified_base 42: mod_base = OTHER; note = 2'-O-methyl ribonucleotide
  modified_base 46: mod_base = OTHER; note = 2'-O-methyl ribonucleotide
  modified_base 48: mod_base = OTHER; note = 2'-O-methyl ribonucleotide
  modified_base 50: mod_base = OTHER; note = 2'-O-methyl ribonucleotide
  modified_base 52: mod_base = OTHER; note = 2'-O-methyl ribonucleotide
  modified_base 53: mod_base = OTHER; note = 2'-O-methyl ribonucleotide
  modified_base 54: mod_base = OTHER; note = 2'-O-methyl ribonucleotide
  modified_base 57: mod_base = OTHER; note = 2'-O-methyl ribonucleotide
  modified_base 61: mod_base = OTHER; note = 2'-O-methyl ribonucleotide
  modified_base 66: mod_base = OTHER; note = 2'-O-methyl ribonucleotide
  modified_base 67: mod_base = OTHER; note = 2'-O-methyl ribonucleotide
  modified_base 70: mod_base = OTHER; note = 2'-O-methyl ribonucleotide
  modified_base 71: mod_base = OTHER; note = 2'-O-methyl ribonucleotide
  modified_base 72: mod_base = OTHER; note = 2'-O-methyl ribonucleotide
  modified_base 74: mod_base = OTHER; note = 2'-O-methyl ribonucleotide
  modified_base 75: mod_base = OTHER; note = 2'-O-methyl ribonucleotide
  modified_base 76: mod_base = OTHER; note = 2'-O-methyl ribonucleotide
  modified_base 77: mod_base = OTHER; note = 2'-O-methyl ribonucleotide
  modified_base 78: mod_base = OTHER; note = 2'-O-methyl ribonucleotide
  modified_base 79: mod_base = OTHER; note = 2'-O-methyl ribonucleotide
  modified_base 80: mod_base = OTHER; note = 2'-O-methyl ribonucleotide
  modified_base 82: mod_base = OTHER; note = 2'-O-methyl ribonucleotide
  modified_base 83: mod_base = OTHER; note = 2'-O-methyl ribonucleotide
  modified_base 84: mod_base = OTHER; note = 2'-O-methyl ribonucleotide
  modified_base 85: mod_base = OTHER; note = 2'-O-methyl ribonucleotide
  modified_base 86: mod_base = OTHER; note = 2'-O-methyl ribonucleotide
  modified_base 87: mod_base = OTHER; note = 2'-O-methyl ribonucleotide
  modified_base 89: mod_base = OTHER; note = 2'-O-methyl ribonucleotide
  modified_base 92: mod_base = OTHER; note = 2'-O-methyl ribonucleotide
  modified_base 93: mod_base = OTHER; note = 2'-O-methyl ribonucleotide
  modified_base 94: mod_base = OTHER; note = 2'-O-methyl ribonucleotide
  modified_base 95: mod_base = OTHER; note = 2'-O-methyl ribonucleotide
  modified_base 96: mod_base = OTHER; note = 2'-O-methyl ribonucleotide
  modified_base 97: mod_base = OTHER; note = 2'-O-methyl ribonucleotide
  modified_base 98: mod_base = OTHER; note = 2'-O-methyl ribonucleotide
  modified_base 99: mod_base = OTHER; note = 2'-O-methyl ribonucleotide
  modified_base 100: mod_base = OTHER; note = 2'-O-methyl ribonucleotide
  modified_base 1..3: mod_base = OTHER; note = phosphorothioate linkage
  modified_base 64..65: mod_base = OTHER; note = phosphorothioate linkage
  modified_base 97..100: mod_base = OTHER; note = phosphorothioate linkage

SEQ ID NO: 1728 - RNA, 103 nt, synthetic construct; identical to SEQ ID NO: 1700
  source 1..103: mol_type = other RNA
  modified_base 1: mod_base = OTHER; note = 2'-O-methyl ribonucleotide
  modified_base 2: mod_base = OTHER; note = 2'-O-methyl ribonucleotide
  modified_base 3: mod_base = OTHER; note = 2'-O-methyl ribonucleotide
  modified_base 21: mod_base = OTHER; note = 2'-O-methyl ribonucleotide
  modified_base 28: mod_base = OTHER; note = 2'-O-methyl ribonucleotide
  modified_base 29: mod_base = OTHER; note = 2'-O-methyl ribonucleotide
  modified_base 30: mod_base = OTHER; note = 2'-O-methyl ribonucleotide
  modified_base 31: mod_base = OTHER; note = 2'-O-methyl ribonucleotide
  modified_base 32: mod_base = OTHER; note = 2'-O-methyl ribonucleotide
  modified_base 34: mod_base = OTHER; note = 2'-O-methyl ribonucleotide
  modified_base 35: mod_base = OTHER; note = 2'-O-methyl ribonucleotide
  modified_base 36: mod_base = OTHER; note = 2'-O-methyl ribonucleotide
  modified_base 37: mod_base = OTHER; note = 2'-O-methyl ribonucleotide
  modified_base 38: mod_base = OTHER; note = 2'-O-methyl ribonucleotide
  modified_base 39: mod_base = OTHER; note = 2'-O-methyl ribonucleotide
  modified_base 40: mod_base = OTHER; note = 2'-O-methyl ribonucleotide
  modified_base 41: mod_base = OTHER; note = 2'-O-methyl ribonucleotide
  modified_base 42: mod_base = OTHER; note = 2'-O-methyl ribonucleotide
  modified_base 46: mod_base = OTHER; note = 2'-O-methyl ribonucleotide
  modified_base 48: mod_base = OTHER; note = 2'-O-methyl ribonucleotide
  modified_base 50: mod_base = OTHER; note = 2'-O-methyl ribonucleotide
  modified_base 52: mod_base = OTHER; note = 2'-O-methyl ribonucleotide
  modified_base 53: mod_base = OTHER; note = 2'-O-methyl ribonucleotide
  modified_base 54: mod_base = OTHER; note = 2'-O-methyl ribonucleotide
  modified_base 55: mod_base = OTHER; note = 2'-O-methyl ribonucleotide
  modified_base 56: mod_base = OTHER; note = 2'-O-methyl ribonucleotide
  modified_base 57: mod_base = OTHER; note = 2'-O-methyl ribonucleotide
  modified_base 60: mod_base = OTHER; note = 2'-O-methyl ribonucleotide
  modified_base 61: mod_base = OTHER; note = 2'-O-methyl ribonucleotide
  modified_base 66: mod_base = OTHER; note = 2'-O-methyl ribonucleotide
  modified_base 67: mod_base = OTHER; note = 2'-O-methyl ribonucleotide
  modified_base 70: mod_base = OTHER; note = 2'-O-methyl ribonucleotide
  modified_base 71: mod_base = OTHER; note = 2'-O-methyl ribonucleotide
  modified_base 72: mod_base = OTHER; note = 2'-O-methyl ribonucleotide
  modified_base 74: mod_base = OTHER; note = 2'-O-methyl ribonucleotide
  modified_base 75: mod_base = OTHER; note = 2'-O-methyl ribonucleotide
  modified_base 76: mod_base = OTHER; note = 2'-O-methyl ribonucleotide
  modified_base 77: mod_base = OTHER; note = 2'-O-methyl ribonucleotide
  modified_base 78: mod_base = OTHER; note = 2'-O-methyl ribonucleotide
  modified_base 79: mod_base = OTHER; note = 2'-O-methyl ribonucleotide
  modified_base 80: mod_base = OTHER; note = 2'-O-methyl ribonucleotide
  modified_base 81: mod_base = OTHER; note = 2'-O-methyl ribonucleotide
  modified_base 83: mod_base = OTHER; note = 2'-O-methyl ribonucleotide
  modified_base 84: mod_base = OTHER; note = 2'-O-methyl ribonucleotide
  modified_base 85: mod_base = OTHER; note = 2'-O-methyl ribonucleotide
  modified_base 86: mod_base = OTHER; note = 2'-O-methyl ribonucleotide
  modified_base 87: mod_base = OTHER; note = 2'-O-methyl ribonucleotide
  modified_base 88: mod_base = OTHER; note = 2'-O-methyl ribonucleotide
  modified_base 89: mod_base = OTHER; note = 2'-O-methyl ribonucleotide
  modified_base 90: mod_base = OTHER; note = 2'-O-methyl ribonucleotide
  modified_base 91: mod_base = OTHER; note = 2'-O-methyl ribonucleotide
  modified_base 92: mod_base = OTHER; note = 2'-O-methyl ribonucleotide
  modified_base 93: mod_base = OTHER; note = 2'-O-methyl ribonucleotide
  modified_base 94: mod_base = OTHER; note = 2'-O-methyl ribonucleotide
  modified_base 95: mod_base = OTHER; note = 2'-O-methyl ribonucleotide
  modified_base 96: mod_base = OTHER; note = 2'-O-methyl ribonucleotide
  modified_base 97: mod_base = OTHER; note = 2'-O-methyl ribonucleotide
  modified_base 98: mod_base = OTHER; note = 2'-O-methyl ribonucleotide
  modified_base 99: mod_base = OTHER; note = 2'-O-methyl ribonucleotide
  modified_base 100: mod_base = OTHER; note = 2'-O-methyl ribonucleotide
  modified_base 1..3: mod_base = OTHER; note = phosphorothioate linkage
  modified_base 64..65: mod_base = OTHER; note = phosphorothioate linkage
  modified_base 97..100: mod_base = OTHER; note = phosphorothioate linkage

SEQ ID NO: 1729 - RNA, 103 nt, synthetic construct; identical to SEQ ID NO: 1643
  source 1..103: mol_type = other RNA
  modified_base 1: mod_base = OTHER; note = 2'-O-methyl ribonucleotide
  modified_base 2: mod_base = OTHER; note = 2'-O-methyl ribonucleotide
  modified_base 3: mod_base = OTHER; note = 2'-O-methyl ribonucleotide
  modified_base 21: mod_base = OTHER; note = 2'-O-methyl ribonucleotide
  modified_base 28: mod_base = OTHER; note = 2'-O-methyl ribonucleotide
  modified_base 29: mod_base = OTHER; note = 2'-O-methyl ribonucleotide
  modified_base 30: mod_base = OTHER; note = 2'-O-methyl ribonucleotide
  modified_base 31: mod_base = OTHER; note = 2'-O-methyl ribonucleotide
  modified_base 32: mod_base = OTHER; note = 2'-O-methyl ribonucleotide
  modified_base 34: mod_base = OTHER; note = 2'-O-methyl ribonucleotide
  modified_base 35: mod_base = OTHER; note = 2'-O-methyl ribonucleotide
  modified_base 36: mod_base = OTHER; note = 2'-O-methyl ribonucleotide
  modified_base 37: mod_base = OTHER; note = 2'-O-methyl ribonucleotide
  modified_base 38: mod_base = OTHER; note = 2'-O-methyl ribonucleotide
  modified_base 39: mod_base = OTHER; note = 2'-O-methyl ribonucleotide
  modified_base 40: mod_base = OTHER; note = 2'-O-methyl ribonucleotide
  modified_base 41: mod_base = OTHER; note = 2'-O-methyl ribonucleotide
  modified_base 42: mod_base = OTHER; note = 2'-O-methyl ribonucleotide
  modified_base 46: mod_base = OTHER; note = 2'-O-methyl ribonucleotide
  modified_base 48: mod_base = OTHER; note = 2'-O-methyl ribonucleotide
  modified_base 50: mod_base = OTHER; note = 2'-O-methyl ribonucleotide
  modified_base 52: mod_base = OTHER; note = 2'-O-methyl ribonucleotide
  modified_base 53: mod_base = OTHER; note = 2'-O-methyl ribonucleotide
  modified_base 54: mod_base = OTHER; note = 2'-O-methyl ribonucleotide
  modified_base 57: mod_base = OTHER; note = 2'-O-methyl ribonucleotide
  modified_base 61: mod_base = OTHER; note = 2'-O-methyl ribonucleotide
  modified_base 66: mod_base = OTHER; note = 2'-O-methyl ribonucleotide
  modified_base 67: mod_base = OTHER; note = 2'-O-methyl ribonucleotide
  modified_base 70: mod_base = OTHER; note = 2'-O-methyl ribonucleotide
  modified_base 71: mod_base = OTHER; note = 2'-O-methyl ribonucleotide
  modified_base 72: mod_base = OTHER; note = 2'-O-methyl ribonucleotide
  modified_base 74: mod_base = OTHER; note = 2'-O-methyl ribonucleotide
  modified_base 75: mod_base = OTHER; note = 2'-O-methyl ribonucleotide
  modified_base 76: mod_base = OTHER; note = 2'-O-methyl ribonucleotide
  modified_base 77: mod_base = OTHER; note = 2'-O-methyl ribonucleotide
  modified_base 78: mod_base = OTHER; note = 2'-O-methyl ribonucleotide
  modified_base 79: mod_base = OTHER; note = 2'-O-methyl ribonucleotide
  modified_base 80: mod_base = OTHER; note = 2'-O-methyl ribonucleotide
  modified_base 82: mod_base = OTHER; note = 2'-O-methyl ribonucleotide
  modified_base 83: mod_base = OTHER; note = 2'-O-methyl ribonucleotide
  modified_base 84: mod_base = OTHER; note = 2'-O-methyl ribonucleotide
  modified_base 85: mod_base = OTHER; note = 2'-O-methyl ribonucleotide
  modified_base 86: mod_base = OTHER; note = 2'-O-methyl ribonucleotide
  modified_base 87: mod_base = OTHER; note = 2'-O-methyl ribonucleotide
  modified_base 89: mod_base = OTHER; note = 2'-O-methyl ribonucleotide
  modified_base 92: mod_base = OTHER; note = 2'-O-methyl ribonucleotide
  modified_base 93: mod_base = OTHER; note = 2'-O-methyl ribonucleotide
  modified_base 94: mod_base = OTHER; note = 2'-O-methyl ribonucleotide
  modified_base 95: mod_base = OTHER; note = 2'-O-methyl ribonucleotide
  modified_base 96: mod_base = OTHER; note = 2'-O-methyl ribonucleotide
  modified_base 97: mod_base = OTHER; note = 2'-O-methyl ribonucleotide
  modified_base 98: mod_base = OTHER; note = 2'-O-methyl ribonucleotide
  modified_base 99: mod_base = OTHER; note = 2'-O-methyl ribonucleotide
  modified_base 100: mod_base = OTHER; note = 2'-O-methyl ribonucleotide
  modified_base 1..3: mod_base = OTHER; note = phosphorothioate linkage
  modified_base 45..46: mod_base = OTHER; note = phosphorothioate linkage
  modified_base 97..100: mod_base = OTHER; note = phosphorothioate linkage

SEQ ID NO: 1730 - RNA, 103 nt, synthetic construct; identical to SEQ ID NO: 1699
  source 1..103: mol_type = other RNA
  modified_base 1: mod_base = OTHER; note = 2'-O-methyl ribonucleotide
  modified_base 2: mod_base = OTHER; note = 2'-O-methyl ribonucleotide
  modified_base 3: mod_base = OTHER; note = 2'-O-methyl ribonucleotide
  modified_base 21: mod_base = OTHER; note = 2'-O-methyl ribonucleotide
  modified_base 28: mod_base = OTHER; note = 2'-O-methyl ribonucleotide
  modified_base 29: mod_base = OTHER; note = 2'-O-methyl ribonucleotide
  modified_base 30: mod_base = OTHER; note = 2'-O-methyl ribonucleotide
  modified_base 31: mod_base = OTHER; note = 2'-O-methyl ribonucleotide
  modified_base 32: mod_base = OTHER; note = 2'-O-methyl ribonucleotide
  modified_base 34: mod_base = OTHER; note = 2'-O-methyl ribonucleotide
  modified_base 35: mod_base = OTHER; note = 2'-O-methyl ribonucleotide
  modified_base 36: mod_base = OTHER; note = 2'-O-methyl ribonucleotide
  modified_base 37: mod_base = OTHER; note = 2'-O-methyl ribonucleotide
  modified_base 38: mod_base = OTHER; note = 2'-O-methyl ribonucleotide
  modified_base 39: mod_base = OTHER; note = 2'-O-methyl ribonucleotide
  modified_base 40: mod_base = OTHER; note = 2'-O-methyl ribonucleotide
  modified_base 41: mod_base = OTHER; note = 2'-O-methyl ribonucleotide
  modified_base 42: mod_base = OTHER; note = 2'-O-methyl ribonucleotide
  modified_base 46: mod_base = OTHER; note = 2'-O-methyl ribonucleotide
  modified_base 48: mod_base = OTHER; note = 2'-O-methyl ribonucleotide
  modified_base 50: mod_base = OTHER; note = 2'-O-methyl ribonucleotide
  modified_base 52: mod_base = OTHER; note = 2'-O-methyl ribonucleotide
  modified_base 53: mod_base = OTHER; note = 2'-O-methyl ribonucleotide
  modified_base 54: mod_base = OTHER; note = 2'-O-methyl ribonucleotide
  modified_base 57: mod_base = OTHER; note = 2'-O-methyl ribonucleotide
  modified_base 61: mod_base = OTHER; note = 2'-O-methyl ribonucleotide
  modified_base 66: mod_base = OTHER; note = 2'-O-methyl ribonucleotide
  modified_base 67: mod_base = OTHER; note = 2'-O-methyl ribonucleotide
  modified_base 70: mod_base = OTHER; note = 2'-O-methyl ribonucleotide
  modified_base 71: mod_base = OTHER; note = 2'-O-methyl ribonucleotide
  modified_base 72: mod_base = OTHER; note = 2'-O-methyl ribonucleotide
  modified_base 74: mod_base = OTHER; note = 2'-O-methyl ribonucleotide
  modified_base 75: mod_base = OTHER; note = 2'-O-methyl ribonucleotide
  modified_base 76: mod_base = OTHER; note = 2'-O-methyl ribonucleotide
  modified_base 77: mod_base = OTHER; note = 2'-O-methyl ribonucleotide
  modified_base 78: mod_base = OTHER; note = 2'-O-methyl ribonucleotide
  modified_base 79: mod_base = OTHER; note = 2'-O-methyl ribonucleotide
  modified_base 80: mod_base = OTHER; note = 2'-O-methyl ribonucleotide
  modified_base 82: mod_base = OTHER; note = 2'-O-methyl ribonucleotide
  modified_base 83: mod_base = OTHER; note = 2'-O-methyl ribonucleotide
  modified_base 84: mod_base = OTHER; note = 2'-O-methyl ribonucleotide
  modified_base 85: mod_base = OTHER; note = 2'-O-methyl ribonucleotide
  modified_base 86: mod_base = OTHER; note = 2'-O-methyl ribonucleotide
  modified_base 87: mod_base = OTHER; note = 2'-O-methyl ribonucleotide
  modified_base 89: mod_base = OTHER; note = 2'-O-methyl ribonucleotide
  modified_base 92: mod_base = OTHER; note = 2'-O-methyl ribonucleotide
  modified_base 93: mod_base = OTHER; note = 2'-O-methyl ribonucleotide
  modified_base 94: mod_base = OTHER; note = 2'-O-methyl ribonucleotide
  modified_base 95: mod_base = OTHER; note = 2'-O-methyl ribonucleotide
  modified_base 96: mod_base = OTHER; note = 2'-O-methyl ribonucleotide
  modified_base 97: mod_base = OTHER; note = 2'-O-methyl ribonucleotide
  modified_base 98: mod_base = OTHER; note = 2'-O-methyl ribonucleotide
  modified_base 99: mod_base = OTHER; note = 2'-O-methyl ribonucleotide
  modified_base 100: mod_base = OTHER; note = 2'-O-methyl ribonucleotide
  modified_base 1..3: mod_base = OTHER; note = phosphorothioate linkage
  modified_base 45..46: mod_base = OTHER; note = phosphorothioate linkage
  modified_base 97..100: mod_base = OTHER; note = phosphorothioate linkage

SEQ ID NO: 1731 - RNA, 103 nt, synthetic construct; identical to SEQ ID NO: 1700
  source 1..103: mol_type = other RNA
  modified_base 1: mod_base = OTHER; note = 2'-O-methyl ribonucleotide
  modified_base 2: mod_base = OTHER; note = 2'-O-methyl ribonucleotide
  modified_base 3: mod_base = OTHER; note = 2'-O-methyl ribonucleotide
  modified_base 21: mod_base = OTHER; note = 2'-O-methyl ribonucleotide
  modified_base 28: mod_base = OTHER; note = 2'-O-methyl ribonucleotide
  modified_base 29: mod_base = OTHER; note = 2'-O-methyl ribonucleotide
  modified_base 30: mod_base = OTHER; note = 2'-O-methyl ribonucleotide
  modified_base 31: mod_base = OTHER; note = 2'-O-methyl ribonucleotide
  modified_base 32: mod_base = OTHER; note = 2'-O-methyl ribonucleotide
  modified_base 34: mod_base = OTHER; note = 2'-O-methyl ribonucleotide
  modified_base 35: mod_base = OTHER; note = 2'-O-methyl ribonucleotide
  modified_base 36: mod_base = OTHER; note = 2'-O-methyl ribonucleotide
  modified_base 37: mod_base = OTHER; note = 2'-O-methyl ribonucleotide
  modified_base 38: mod_base = OTHER; note = 2'-O-methyl ribonucleotide
  modified_base 39: mod_base = OTHER; note = 2'-O-methyl ribonucleotide
  modified_base 40: mod_base = OTHER; note = 2'-O-methyl ribonucleotide
  modified_base 41: mod_base = OTHER; note = 2'-O-methyl ribonucleotide
  modified_base 42: mod_base = OTHER; note = 2'-O-methyl ribonucleotide
  modified_base 46: mod_base = OTHER; note = 2'-O-methyl ribonucleotide
  modified_base 48: mod_base = OTHER; note = 2'-O-methyl ribonucleotide
  modified_base 50: mod_base = OTHER; note = 2'-O-methyl ribonucleotide
  modified_base 52: mod_base = OTHER; note = 2'-O-methyl ribonucleotide
  modified_base 53: mod_base = OTHER; note = 2'-O-methyl ribonucleotide
  modified_base 54: mod_base = OTHER; note = 2'-O-methyl ribonucleotide
  modified_base 55: mod_base = OTHER; note = 2'-O-methyl ribonucleotide
  modified_base 56: mod_base = OTHER; note = 2'-O-methyl ribonucleotide
  modified_base 57: mod_base = OTHER; note = 2'-O-methyl ribonucleotide
  modified_base 60: mod_base = OTHER; note = 2'-O-methyl ribonucleotide
  modified_base 61: mod_base = OTHER; note = 2'-O-methyl ribonucleotide
  modified_base 66: mod_base = OTHER; note = 2'-O-methyl ribonucleotide
  modified_base 67: mod_base = OTHER; note = 2'-O-methyl ribonucleotide
  modified_base 70: mod_base = OTHER; note = 2'-O-methyl ribonucleotide
  modified_base 71: mod_base = OTHER; note = 2'-O-methyl ribonucleotide
  modified_base 72: mod_base = OTHER; note = 2'-O-methyl ribonucleotide
  modified_base 74: mod_base = OTHER; note = 2'-O-methyl ribonucleotide
  modified_base 75: mod_base = OTHER; note = 2'-O-methyl ribonucleotide
  modified_base 76: mod_base = OTHER; note = 2'-O-methyl ribonucleotide
  modified_base 77: mod_base = OTHER; note = 2'-O-methyl ribonucleotide
  modified_base 78: mod_base = OTHER; note = 2'-O-methyl ribonucleotide
  modified_base 79: mod_base = OTHER; note = 2'-O-methyl ribonucleotide
  modified_base 80: mod_base = OTHER; note = 2'-O-methyl ribonucleotide
  modified_base 81: mod_base = OTHER; note = 2'-O-methyl ribonucleotide
  modified_base 83: mod_base = OTHER; note = 2'-O-methyl ribonucleotide
  modified_base 84: mod_base = OTHER; note = 2'-O-methyl ribonucleotide
  modified_base 85: mod_base = OTHER; note = 2'-O-methyl ribonucleotide
  modified_base 86: mod_base = OTHER; note = 2'-O-methyl ribonucleotide
  modified_base 87: mod_base = OTHER; note = 2'-O-methyl ribonucleotide
  modified_base 88: mod_base = OTHER; note = 2'-O-methyl ribonucleotide
  modified_base 89: mod_base = OTHER; note = 2'-O-methyl ribonucleotide
  modified_base 90: mod_base = OTHER; note = 2'-O-methyl ribonucleotide
  modified_base 91: mod_base = OTHER; note = 2'-O-methyl ribonucleotide
  modified_base 92: mod_base = OTHER; note = 2'-O-methyl ribonucleotide
  modified_base 93: mod_base = OTHER; note = 2'-O-methyl ribonucleotide
  modified_base 94: mod_base = OTHER; note = 2'-O-methyl ribonucleotide
  modified_base 95: mod_base = OTHER; note = 2'-O-methyl ribonucleotide
  modified_base 96: mod_base = OTHER; note = 2'-O-methyl ribonucleotide
  modified_base 97: mod_base = OTHER; note = 2'-O-methyl ribonucleotide
  modified_base 98: mod_base = OTHER; note = 2'-O-methyl ribonucleotide
  modified_base 99: mod_base = OTHER; note = 2'-O-methyl ribonucleotide
  modified_base 100: mod_base = OTHER; note = 2'-O-methyl ribonucleotide
  modified_base 1..3: mod_base = OTHER; note = phosphorothioate linkage
  modified_base 45..46: mod_base = OTHER; note = phosphorothioate linkage
  modified_base 97..100: mod_base = OTHER; note = phosphorothioate linkage

SEQ ID NO: 1732 - RNA, 103 nt, synthetic construct; identical to SEQ ID NO: 1643
  source 1..103: mol_type = other RNA
  modified_base 1: mod_base = OTHER; note = 2'-O-methyl ribonucleotide
  modified_base 2: mod_base = OTHER; note = 2'-O-methyl ribonucleotide
  modified_base 3: mod_base = OTHER; note = 2'-O-methyl ribonucleotide
  modified_base 21: mod_base = OTHER; note = 2'-O-methyl ribonucleotide
  modified_base 28: mod_base = OTHER; note = 2'-O-methyl ribonucleotide
  modified_base 29: mod_base = OTHER; note = 2'-O-methyl ribonucleotide
  modified_base 30: mod_base = OTHER; note = 2'-O-methyl ribonucleotide
  modified_base 31: mod_base = OTHER; note = 2'-O-methyl ribonucleotide
  modified_base 32: mod_base = OTHER; note = 2'-O-methyl ribonucleotide
  modified_base 34: mod_base = OTHER; note = 2'-O-methyl ribonucleotide
  modified_base 35: mod_base = OTHER; note = 2'-O-methyl ribonucleotide
  modified_base 36: mod_base = OTHER; note = 2'-O-methyl ribonucleotide
  modified_base 37: mod_base = OTHER; note = 2'-O-methyl ribonucleotide
  modified_base 38: mod_base = OTHER; note = 2'-O-methyl ribonucleotide
  modified_base 39: mod_base = OTHER; note = 2'-O-methyl ribonucleotide
  modified_base 40: mod_base = OTHER; note = 2'-O-methyl ribonucleotide
  modified_base 41: mod_base = OTHER; note = 2'-O-methyl ribonucleotide
  modified_base 42: mod_base = OTHER; note = 2'-O-methyl ribonucleotide
  modified_base 46: mod_base = OTHER; note = 2'-O-methyl ribonucleotide
  modified_base 48: mod_base = OTHER; note = 2'-O-methyl ribonucleotide
  modified_base 50: mod_base = OTHER; note = 2'-O-methyl ribonucleotide
  modified_base 52: mod_base = OTHER; note = 2'-O-methyl ribonucleotide
  modified_base 53: mod_base = OTHER; note = 2'-O-methyl ribonucleotide
  modified_base 54: mod_base = OTHER; note = 2'-O-methyl ribonucleotide
  modified_base 57: mod_base = OTHER; note = 2'-O-methyl ribonucleotide
  modified_base 61: mod_base = OTHER; note = 2'-O-methyl ribonucleotide
  modified_base 66: mod_base = OTHER; note = 2'-O-methyl ribonucleotide
  modified_base 67: mod_base = OTHER; note = 2'-O-methyl ribonucleotide
  modified_base 70: mod_base = OTHER; note = 2'-O-methyl ribonucleotide
  modified_base 71: mod_base = OTHER; note = 2'-O-methyl ribonucleotide
  modified_base 72: mod_base = OTHER; note = 2'-O-methyl ribonucleotide
  modified_base 74: mod_base = OTHER; note = 2'-O-methyl ribonucleotide
  modified_base 75: mod_base = OTHER; note = 2'-O-methyl ribonucleotide
  modified_base 76: mod_base = OTHER; note = 2'-O-methyl ribonucleotide
  modified_base 77: mod_base = OTHER; note = 2'-O-methyl ribonucleotide
  modified_base 78: mod_base = OTHER; note = 2'-O-methyl ribonucleotide
  modified_base 79: mod_base = OTHER; note = 2'-O-methyl ribonucleotide
  modified_base 80: mod_base = OTHER; note = 2'-O-methyl ribonucleotide
  modified_base 82: mod_base = OTHER; note = 2'-O-methyl ribonucleotide
  modified_base 83: mod_base = OTHER; note = 2'-O-methyl ribonucleotide
  modified_base 84: mod_base = OTHER; note = 2'-O-methyl ribonucleotide
  modified_base 85: mod_base = OTHER; note = 2'-O-methyl ribonucleotide
  modified_base 86: mod_base = OTHER; note = 2'-O-methyl ribonucleotide
  modified_base 87: mod_base = OTHER; note = 2'-O-methyl ribonucleotide
  modified_base 89: mod_base = OTHER; note = 2'-O-methyl ribonucleotide
  modified_base 92: mod_base = OTHER; note = 2'-O-methyl ribonucleotide
  modified_base 93: mod_base = OTHER; note = 2'-O-methyl ribonucleotide
  modified_base 94: mod_base = OTHER; note = 2'-O-methyl ribonucleotide
  modified_base 95: mod_base = OTHER; note = 2'-O-methyl ribonucleotide
  modified_base 96: mod_base = OTHER; note = 2'-O-methyl ribonucleotide
  modified_base 97: mod_base = OTHER; note = 2'-O-methyl ribonucleotide
  modified_base 98: mod_base = OTHER; note = 2'-O-methyl ribonucleotide
  modified_base 99: mod_base = OTHER; note = 2'-O-methyl ribonucleotide
  modified_base 100: mod_base = OTHER; note = 2'-O-methyl ribonucleotide
  modified_base 1..3: mod_base = OTHER; note = phosphorothioate linkage
  modified_base 25..26: mod_base = OTHER; note = phosphorothioate linkage
  modified_base 97..100: mod_base = OTHER; note = phosphorothioate linkage

SEQ ID NO: 1733 - RNA, 103 nt, synthetic construct; identical to SEQ ID NO: 1699
  source 1..103: mol_type = other RNA
  modified_base 1: mod_base = OTHER; note = 2'-O-methyl ribonucleotide
  modified_base 2: mod_base = OTHER; note = 2'-O-methyl ribonucleotide
  modified_base 3: mod_base = OTHER; note = 2'-O-methyl ribonucleotide
  modified_base 21: mod_base = OTHER; note = 2'-O-methyl ribonucleotide
  modified_base 28: mod_base = OTHER; note = 2'-O-methyl ribonucleotide
  modified_base 29: mod_base = OTHER; note = 2'-O-methyl ribonucleotide
  modified_base 30: mod_base = OTHER; note = 2'-O-methyl ribonucleotide
  modified_base 31: mod_base = OTHER; note = 2'-O-methyl ribonucleotide
  modified_base 32: mod_base = OTHER; note = 2'-O-methyl ribonucleotide
  modified_base 34: mod_base = OTHER; note = 2'-O-methyl ribonucleotide
  modified_base 35: mod_base = OTHER; note = 2'-O-methyl ribonucleotide
  modified_base 36: mod_base = OTHER; note = 2'-O-methyl ribonucleotide
  modified_base 37: mod_base = OTHER; note = 2'-O-methyl ribonucleotide
  modified_base 38: mod_base = OTHER; note = 2'-O-methyl ribonucleotide
  modified_base 39: mod_base = OTHER; note = 2'-O-methyl ribonucleotide
  modified_base 40: mod_base = OTHER; note = 2'-O-methyl ribonucleotide
  modified_base 41: mod_base = OTHER; note = 2'-O-methyl ribonucleotide
  modified_base 42: mod_base = OTHER; note = 2'-O-methyl ribonucleotide
  modified_base 46: mod_base = OTHER; note = 2'-O-methyl ribonucleotide
  modified_base 48: mod_base = OTHER; note = 2'-O-methyl ribonucleotide
  modified_base 50: mod_base = OTHER; note = 2'-O-methyl ribonucleotide
  modified_base 52: mod_base = OTHER; note = 2'-O-methyl ribonucleotide
  modified_base 53: mod_base = OTHER; note = 2'-O-methyl ribonucleotide
  modified_base 54: mod_base = OTHER; note = 2'-O-methyl ribonucleotide
  modified_base 57: mod_base = OTHER; note = 2'-O-methyl ribonucleotide
  modified_base 61: mod_base = OTHER; note = 2'-O-methyl ribonucleotide
  modified_base 66: mod_base = OTHER; note = 2'-O-methyl ribonucleotide
  modified_base 67: mod_base = OTHER; note = 2'-O-methyl ribonucleotide
  modified_base 70: mod_base = OTHER; note = 2'-O-methyl ribonucleotide
  modified_base 71: mod_base = OTHER; note = 2'-O-methyl ribonucleotide
  modified_base 72: mod_base = OTHER; note = 2'-O-methyl ribonucleotide
  modified_base 74: mod_base = OTHER; note = 2'-O-methyl ribonucleotide
  modified_base 75: mod_base = OTHER; note = 2'-O-methyl ribonucleotide
  modified_base 76: mod_base = OTHER; note = 2'-O-methyl ribonucleotide
  modified_base 77: mod_base = OTHER; note = 2'-O-methyl ribonucleotide
  modified_base 78: mod_base = OTHER; note = 2'-O-methyl ribonucleotide
  modified_base 79: mod_base = OTHER; note = 2'-O-methyl ribonucleotide
  modified_base 80: mod_base = OTHER; note = 2'-O-methyl ribonucleotide
  modified_base 82: mod_base = OTHER; note = 2'-O-methyl ribonucleotide
  modified_base 83: mod_base = OTHER; note = 2'-O-methyl ribonucleotide
  modified_base 84: mod_base = OTHER; note = 2'-O-methyl ribonucleotide
  modified_base 85: mod_base = OTHER; note = 2'-O-methyl ribonucleotide
  modified_base 86: mod_base = OTHER; note = 2'-O-methyl ribonucleotide
  modified_base 87: mod_base = OTHER; note = 2'-O-methyl ribonucleotide
  modified_base 89: mod_base = OTHER; note = 2'-O-methyl ribonucleotide
  modified_base 92: mod_base = OTHER; note = 2'-O-methyl ribonucleotide
  modified_base 93: mod_base = OTHER; note = 2'-O-methyl ribonucleotide
  modified_base 94: mod_base = OTHER; note = 2'-O-methyl ribonucleotide
  modified_base 95: mod_base = OTHER; note = 2'-O-methyl ribonucleotide
  modified_base 96: mod_base = OTHER; note = 2'-O-methyl ribonucleotide
  modified_base 97: mod_base = OTHER; note = 2'-O-methyl ribonucleotide
  modified_base 98: mod_base = OTHER; note = 2'-O-methyl ribonucleotide
  modified_base 99: mod_base = OTHER; note = 2'-O-methyl ribonucleotide
  modified_base 100: mod_base = OTHER; note = 2'-O-methyl ribonucleotide
  modified_base 1..3: mod_base = OTHER; note = phosphorothioate linkage
  modified_base 25..26: mod_base = OTHER; note = phosphorothioate linkage
  modified_base 97..100: mod_base = OTHER; note = phosphorothioate linkage

SEQ ID NO: 1734 - RNA, 103 nt, synthetic construct; identical to SEQ ID NO: 1700
  source 1..103: mol_type = other RNA
  modified_base 1: mod_base = OTHER; note = 2'-O-methyl ribonucleotide
  modified_base 2: mod_base = OTHER; note = 2'-O-methyl ribonucleotide
  modified_base 3: mod_base = OTHER; note = 2'-O-methyl ribonucleotide
  modified_base 21: mod_base = OTHER; note = 2'-O-methyl ribonucleotide
  modified_base 28: mod_base = OTHER; note = 2'-O-methyl ribonucleotide
  modified_base 29: mod_base = OTHER; note = 2'-O-methyl ribonucleotide
  modified_base 30: mod_base = OTHER; note = 2'-O-methyl ribonucleotide
  modified_base 31: mod_base = OTHER; note = 2'-O-methyl ribonucleotide
  modified_base 32: mod_base = OTHER; note = 2'-O-methyl ribonucleotide
  modified_base 34: mod_base = OTHER; note = 2'-O-methyl ribonucleotide
  modified_base 35: mod_base = OTHER; note = 2'-O-methyl ribonucleotide
  modified_base 36: mod_base = OTHER; note = 2'-O-methyl ribonucleotide
  modified_base 37: mod_base = OTHER; note = 2'-O-methyl ribonucleotide
  modified_base 38: mod_base = OTHER; note = 2'-O-methyl ribonucleotide
  modified_base 39: mod_base = OTHER; note = 2'-O-methyl ribonucleotide
  modified_base 40: mod_base = OTHER; note = 2'-O-methyl ribonucleotide
  modified_base 41: mod_base = OTHER; note = 2'-O-methyl ribonucleotide
  modified_base 42: mod_base = OTHER; note = 2'-O-methyl ribonucleotide
  modified_base 46: mod_base = OTHER; note = 2'-O-methyl ribonucleotide
  modified_base 48: mod_base = OTHER; note = 2'-O-methyl ribonucleotide
  modified_base 50: mod_base = OTHER; note = 2'-O-methyl ribonucleotide
  modified_base 52: mod_base = OTHER; note = 2'-O-methyl ribonucleotide
  modified_base 53: mod_base = OTHER; note = 2'-O-methyl ribonucleotide
  modified_base 54: mod_base = OTHER; note = 2'-O-methyl ribonucleotide
  modified_base 55: mod_base = OTHER; note = 2'-O-methyl ribonucleotide
  modified_base 56: mod_base = OTHER; note = 2'-O-methyl ribonucleotide
  modified_base 57: mod_base = OTHER; note = 2'-O-methyl ribonucleotide
  modified_base 60: mod_base = OTHER; note = 2'-O-methyl ribonucleotide
  modified_base 61: mod_base = OTHER; note = 2'-O-methyl ribonucleotide
  modified_base 66: mod_base = OTHER; note = 2'-O-methyl ribonucleotide
  modified_base 67: mod_base = OTHER; note = 2'-O-methyl ribonucleotide
  modified_base 70: mod_base = OTHER; note = 2'-O-methyl ribonucleotide
  modified_base 71: mod_base = OTHER; note = 2'-O-methyl ribonucleotide
  modified_base 72: mod_base = OTHER; note = 2'-O-methyl ribonucleotide
  modified_base 74: mod_base = OTHER; note = 2'-O-methyl ribonucleotide
  modified_base 75: mod_base = OTHER; note = 2'-O-methyl ribonucleotide
  modified_base 76: mod_base = OTHER; note = 2'-O-methyl ribonucleotide
  modified_base 77: mod_base = OTHER; note = 2'-O-methyl ribonucleotide
  modified_base 78: mod_base = OTHER; note = 2'-O-methyl ribonucleotide
  modified_base 79: mod_base = OTHER; note = 2'-O-methyl ribonucleotide
  modified_base 80: mod_base = OTHER; note = 2'-O-methyl ribonucleotide
  modified_base 81: mod_base = OTHER; note = 2'-O-methyl ribonucleotide
  modified_base 83: mod_base = OTHER; note = 2'-O-methyl ribonucleotide
  modified_base 84: mod_base = OTHER; note = 2'-O-methyl ribonucleotide
  modified_base 85: mod_base = OTHER; note = 2'-O-methyl ribonucleotide
  modified_base 86: mod_base = OTHER; note = 2'-O-methyl ribonucleotide
  modified_base 87: mod_base = OTHER; note = 2'-O-methyl ribonucleotide
  modified_base 88: mod_base = OTHER; note = 2'-O-methyl ribonucleotide
  modified_base 89: mod_base = OTHER; note = 2'-O-methyl ribonucleotide
  modified_base 90: mod_base = OTHER; note = 2'-O-methyl ribonucleotide
  modified_base 91: mod_base = OTHER; note = 2'-O-methyl ribonucleotide
  modified_base 92: mod_base = OTHER; note = 2'-O-methyl ribonucleotide
  modified_base 93: mod_base = OTHER; note = 2'-O-methyl ribonucleotide
  modified_base 94: mod_base = OTHER; note = 2'-O-methyl ribonucleotide
  modified_base 95: mod_base = OTHER; note = 2'-O-methyl ribonucleotide
  modified_base 96: mod_base = OTHER; note = 2'-O-methyl ribonucleotide
  modified_base 97: mod_base = OTHER; note = 2'-O-methyl ribonucleotide
  modified_base 98: mod_base = OTHER; note = 2'-O-methyl ribonucleotide
  modified_base 99: mod_base = OTHER; note = 2'-O-methyl ribonucleotide
  modified_base 100: mod_base = OTHER; note = 2'-O-methyl ribonucleotide
  modified_base 1..3: mod_base = OTHER; note = phosphorothioate linkage
  modified_base 25..26: mod_base = OTHER; note = phosphorothioate linkage
  modified_base 97..100: mod_base = OTHER; note = phosphorothioate linkage

SEQ ID NO: 1735 - RNA, 103 nt, synthetic construct; identical to SEQ ID NO: 1643
  source 1..103: mol_type = other RNA
  modified_base 1: mod_base = OTHER; note = 2'-O-methyl ribonucleotide
  modified_base 2: mod_base = OTHER; note = 2'-O-methyl ribonucleotide
  modified_base 3: mod_base = OTHER; note = 2'-O-methyl ribonucleotide
  modified_base 21: mod_base = OTHER; note = 2'-O-methyl ribonucleotide
  modified_base 28: mod_base = OTHER; note = 2'-O-methyl ribonucleotide
  modified_base 29: mod_base = OTHER; note = 2'-O-methyl ribonucleotide
  modified_base 30: mod_base = OTHER; note = 2'-O-methyl ribonucleotide
  modified_base 31: mod_base = OTHER; note = 2'-O-methyl ribonucleotide
  modified_base 32: mod_base = OTHER; note = 2'-O-methyl ribonucleotide
  modified_base 34: mod_base = OTHER; note = 2'-O-methyl ribonucleotide
  modified_base 35: mod_base = OTHER; note = 2'-O-methyl ribonucleotide
  modified_base 36: mod_base = OTHER; note = 2'-O-methyl ribonucleotide
  modified_base 37: mod_base = OTHER; note = 2'-O-methyl ribonucleotide
  modified_base 38: mod_base = OTHER; note = 2'-O-methyl ribonucleotide
  modified_base 39: mod_base = OTHER; note = 2'-O-methyl ribonucleotide
  modified_base 40: mod_base = OTHER; note = 2'-O-methyl ribonucleotide
  modified_base 41: mod_base = OTHER; note = 2'-O-methyl ribonucleotide
  modified_base 42: mod_base = OTHER; note = 2'-O-methyl ribonucleotide
  modified_base 46: mod_base = OTHER; note = 2'-O-methyl ribonucleotide
  modified_base 48: mod_base = OTHER; note = 2'-O-methyl ribonucleotide
  modified_base 50: mod_base = OTHER; note = 2'-O-methyl ribonucleotide
  modified_base 52: mod_base = OTHER; note = 2'-O-methyl ribonucleotide
  modified_base 53: mod_base = OTHER; note = 2'-O-methyl ribonucleotide
  modified_base 54: mod_base = OTHER; note = 2'-O-methyl ribonucleotide
  modified_base 57: mod_base = OTHER; note = 2'-O-methyl ribonucleotide
  modified_base 61: mod_base = OTHER; note = 2'-O-methyl ribonucleotide
  modified_base 66: mod_base = OTHER; note = 2'-O-methyl ribonucleotide
  modified_base 67: mod_base = OTHER; note = 2'-O-methyl ribonucleotide
  modified_base 70: mod_base = OTHER; note = 2'-O-methyl ribonucleotide
  modified_base 71: mod_base = OTHER; note = 2'-O-methyl ribonucleotide
  modified_base 72: mod_base = OTHER; note = 2'-O-methyl ribonucleotide
  modified_base 74: mod_base = OTHER; note = 2'-O-methyl ribonucleotide
  modified_base 75: mod_base = OTHER; note = 2'-O-methyl ribonucleotide
  modified_base 76: mod_base = OTHER; note = 2'-O-methyl ribonucleotide
  modified_base 77: mod_base = OTHER; note = 2'-O-methyl ribonucleotide
  modified_base 78: mod_base = OTHER; note = 2'-O-methyl ribonucleotide
  modified_base 79: mod_base = OTHER; note = 2'-O-methyl ribonucleotide
  modified_base 80: mod_base = OTHER; note = 2'-O-methyl ribonucleotide
  modified_base 82: mod_base = OTHER; note = 2'-O-methyl ribonucleotide
  modified_base 83: mod_base = OTHER; note = 2'-O-methyl ribonucleotide
  modified_base 84: mod_base = OTHER; note = 2'-O-methyl ribonucleotide
  modified_base 85: mod_base = OTHER; note = 2'-O-methyl ribonucleotide
  modified_base 86: mod_base = OTHER; note = 2'-O-methyl ribonucleotide
  modified_base 87: mod_base = OTHER; note = 2'-O-methyl ribonucleotide
  modified_base 89: mod_base = OTHER; note = 2'-O-methyl ribonucleotide
  modified_base 92: mod_base = OTHER; note = 2'-O-methyl ribonucleotide
  modified_base 93: mod_base = OTHER; note = 2'-O-methyl ribonucleotide
  modified_base 94: mod_base = OTHER; note = 2'-O-methyl ribonucleotide
  modified_base 95: mod_base = OTHER; note = 2'-O-methyl ribonucleotide
  modified_base 96: mod_base = OTHER; note = 2'-O-methyl ribonucleotide
  modified_base 97: mod_base = OTHER; note = 2'-O-methyl ribonucleotide
  modified_base 98: mod_base = OTHER; note = 2'-O-methyl ribonucleotide
  modified_base 99: mod_base = OTHER; note = 2'-O-methyl ribonucleotide
  modified_base 100: mod_base = OTHER; note = 2'-O-methyl ribonucleotide
  modified_base 1..3: mod_base = OTHER; note = phosphorothioate linkage
  modified_base 45..46: mod_base = OTHER; note = phosphorothioate linkage
  modified_base 64..65: mod_base = OTHER; note = phosphorothioate linkage
  modified_base 97..100: mod_base = OTHER; note = phosphorothioate linkage

SEQ ID NO: 1736 - RNA, 103 nt, synthetic construct; identical to SEQ ID NO: 1699
  source 1..103: mol_type = other RNA
  modified_base 1: mod_base = OTHER; note = 2'-O-methyl ribonucleotide
  modified_base 2: mod_base = OTHER; note = 2'-O-methyl ribonucleotide
  modified_base 3: mod_base = OTHER; note = 2'-O-methyl ribonucleotide
  modified_base 21: mod_base = OTHER; note = 2'-O-methyl ribonucleotide
  modified_base 28: mod_base = OTHER; note = 2'-O-methyl ribonucleotide
  modified_base 29: mod_base = OTHER; note = 2'-O-methyl ribonucleotide
  modified_base 30: mod_base = OTHER; note = 2'-O-methyl ribonucleotide
  modified_base 31: mod_base = OTHER; note = 2'-O-methyl ribonucleotide
  modified_base 32: mod_base = OTHER; note = 2'-O-methyl ribonucleotide
  modified_base 34: mod_base = OTHER; note = 2'-O-methyl ribonucleotide
  modified_base 35: mod_base = OTHER; note = 2'-O-methyl ribonucleotide
  modified_base 36: mod_base = OTHER; note = 2'-O-methyl ribonucleotide
  modified_base 37: mod_base = OTHER; note = 2'-O-methyl ribonucleotide
  modified_base 38: mod_base = OTHER; note = 2'-O-methyl ribonucleotide
  modified_base 39: mod_base = OTHER; note = 2'-O-methyl ribonucleotide
  modified_base 40: mod_base = OTHER; note = 2'-O-methyl ribonucleotide
  modified_base 41: mod_base = OTHER; note = 2'-O-methyl ribonucleotide
  modified_base 42: mod_base = OTHER; note = 2'-O-methyl ribonucleotide
  modified_base 46: mod_base = OTHER; note = 2'-O-methyl ribonucleotide
  modified_base 48: mod_base = OTHER; note = 2'-O-methyl ribonucleotide
  modified_base 50: mod_base = OTHER; note = 2'-O-methyl ribonucleotide
  modified_base 52: mod_base = OTHER; note = 2'-O-methyl ribonucleotide
  modified_base 53: mod_base = OTHER; note = 2'-O-methyl ribonucleotide
  modified_base 54: mod_base = OTHER; note = 2'-O-methyl ribonucleotide
  modified_base 57: mod_base = OTHER; note = 2'-O-methyl ribonucleotide
  modified_base 61: mod_base = OTHER; note = 2'-O-methyl ribonucleotide
  modified_base 66: mod_base = OTHER; note = 2'-O-methyl ribonucleotide
  modified_base 67: mod_base = OTHER; note = 2'-O-methyl ribonucleotide
  modified_base 70: mod_base = OTHER; note = 2'-O-methyl ribonucleotide
  modified_base 71: mod_base = OTHER; note = 2'-O-methyl ribonucleotide
  modified_base 72: mod_base = OTHER; note = 2'-O-methyl ribonucleotide
  modified_base 74: mod_base = OTHER; note = 2'-O-methyl ribonucleotide
  modified_base 75: mod_base = OTHER; note = 2'-O-methyl ribonucleotide
  modified_base 76: mod_base = OTHER; note = 2'-O-methyl ribonucleotide
  modified_base 77: mod_base = OTHER; note = 2'-O-methyl ribonucleotide
  modified_base 78: mod_base = OTHER; note = 2'-O-methyl ribonucleotide
  modified_base 79: mod_base = OTHER; note = 2'-O-methyl ribonucleotide
  modified_base 80: mod_base = OTHER; note = 2'-O-methyl ribonucleotide
  modified_base 82: mod_base = OTHER; note = 2'-O-methyl ribonucleotide
  modified_base 83: mod_base = OTHER; note = 2'-O-methyl ribonucleotide
  modified_base 84: mod_base = OTHER; note = 2'-O-methyl ribonucleotide
  modified_base 85: mod_base = OTHER; note = 2'-O-methyl ribonucleotide
  modified_base 86: mod_base = OTHER; note = 2'-O-methyl ribonucleotide
  modified_base 87: mod_base = OTHER; note = 2'-O-methyl ribonucleotide
  modified_base 89: mod_base = OTHER; note = 2'-O-methyl ribonucleotide
  modified_base 92: mod_base = OTHER; note = 2'-O-methyl ribonucleotide
  modified_base 93: mod_base = OTHER; note = 2'-O-methyl ribonucleotide
  modified_base 94: mod_base = OTHER; note = 2'-O-methyl ribonucleotide
  modified_base 95: mod_base = OTHER; note = 2'-O-methyl ribonucleotide
  modified_base 96: mod_base = OTHER; note = 2'-O-methyl ribonucleotide
  modified_base 97: mod_base = OTHER; note = 2'-O-methyl ribonucleotide
  modified_base 98: mod_base = OTHER; note = 2'-O-methyl ribonucleotide
  modified_base 99: mod_base = OTHER; note = 2'-O-methyl ribonucleotide
  modified_base 100: mod_base = OTHER; note = 2'-O-methyl ribonucleotide
  modified_base 1..3: mod_base = OTHER; note = phosphorothioate linkage
  modified_base 45..46: mod_base = OTHER; note = phosphorothioate linkage
  modified_base 64..65: mod_base = OTHER; note = phosphorothioate linkage
  modified_base 97..100: mod_base = OTHER; note = phosphorothioate linkage

SEQ ID NO: 1737 - RNA, 103 nt, synthetic construct; identical to SEQ ID NO: 1700
  source 1..103: mol_type = other RNA
  modified_base 1: mod_base = OTHER; note = 2'-O-methyl ribonucleotide
  modified_base 2: mod_base = OTHER; note = 2'-O-methyl ribonucleotide
  modified_base 3: mod_base = OTHER; note = 2'-O-methyl ribonucleotide
  modified_base 21: mod_base = OTHER; note = 2'-O-methyl ribonucleotide
  modified_base 28: mod_base = OTHER; note = 2'-O-methyl ribonucleotide
  modified_base 29: mod_base = OTHER; note = 2'-O-methyl ribonucleotide
  modified_base 30: mod_base = OTHER; note = 2'-O-methyl ribonucleotide
  modified_base 31: mod_base = OTHER; note = 2'-O-methyl ribonucleotide
  modified_base 32: mod_base = OTHER; note = 2'-O-methyl ribonucleotide
  modified_base 34: mod_base = OTHER; note = 2'-O-methyl ribonucleotide
  modified_base 35: mod_base = OTHER; note = 2'-O-methyl ribonucleotide
  modified_base 36: mod_base = OTHER; note = 2'-O-methyl ribonucleotide
  modified_base 37: mod_base = OTHER; note = 2'-O-methyl ribonucleotide
  modified_base 38: mod_base = OTHER; note = 2'-O-methyl ribonucleotide
  modified_base 39: mod_base = OTHER; note = 2'-O-methyl ribonucleotide
  modified_base 40: mod_base = OTHER; note = 2'-O-methyl ribonucleotide
  modified_base 41: mod_base = OTHER; note = 2'-O-methyl ribonucleotide
  modified_base 42: mod_base = OTHER; note = 2'-O-methyl ribonucleotide
  modified_base 46: mod_base = OTHER; note = 2'-O-methyl ribonucleotide
  modified_base 48: mod_base = OTHER; note = 2'-O-methyl ribonucleotide
  modified_base 50: mod_base = OTHER; note = 2'-O-methyl ribonucleotide
  modified_base 52: mod_base = OTHER; note = 2'-O-methyl ribonucleotide
  modified_base 53: mod_base = OTHER; note = 2'-O-methyl ribonucleotide
  modified_base 54: mod_base = OTHER; note = 2'-O-methyl ribonucleotide
  modified_base 55: mod_base = OTHER; note = 2'-O-methyl ribonucleotide
  modified_base 56: mod_base = OTHER; note = 2'-O-methyl ribonucleotide
  modified_base 57: mod_base = OTHER; note = 2'-O-methyl ribonucleotide
  modified_base 60: mod_base = OTHER; note = 2'-O-methyl ribonucleotide
  modified_base 61: mod_base = OTHER; note = 2'-O-methyl ribonucleotide
  modified_base 66: mod_base = OTHER; note = 2'-O-methyl ribonucleotide
  modified_base 67: mod_base = OTHER; note = 2'-O-methyl ribonucleotide
  modified_base 70: mod_base = OTHER; note = 2'-O-methyl ribonucleotide
  modified_base 71: mod_base = OTHER; note = 2'-O-methyl ribonucleotide
  modified_base 72: mod_base = OTHER; note = 2'-O-methyl ribonucleotide
  modified_base 74: mod_base = OTHER; note = 2'-O-methyl ribonucleotide
  modified_base 75: mod_base = OTHER; note = 2'-O-methyl ribonucleotide
  modified_base 76: mod_base = OTHER; note = 2'-O-methyl ribonucleotide
  modified_base 77: mod_base = OTHER; note = 2'-O-methyl ribonucleotide
  modified_base 78: mod_base = OTHER; note = 2'-O-methyl ribonucleotide
  modified_base 79: mod_base = OTHER; note = 2'-O-methyl ribonucleotide
  modified_base 80: mod_base = OTHER; note = 2'-O-methyl ribonucleotide
  modified_base 81: mod_base = OTHER; note = 2'-O-methyl ribonucleotide
  modified_base 83: mod_base = OTHER; note = 2'-O-methyl ribonucleotide
  modified_base 84: mod_base = OTHER; note = 2'-O-methyl ribonucleotide
  modified_base 85: mod_base = OTHER; note = 2'-O-methyl ribonucleotide
  modified_base 86: mod_base = OTHER; note = 2'-O-methyl ribonucleotide
  modified_base 87: mod_base = OTHER; note = 2'-O-methyl ribonucleotide
  modified_base 88: mod_base = OTHER; note = 2'-O-methyl ribonucleotide
  modified_base 89: mod_base = OTHER; note = 2'-O-methyl ribonucleotide
  modified_base 90: mod_base = OTHER; note = 2'-O-methyl ribonucleotide
  modified_base 91: mod_base = OTHER; note = 2'-O-methyl ribonucleotide
  modified_base 92: mod_base = OTHER; note = 2'-O-methyl ribonucleotide
  modified_base 93: mod_base = OTHER; note = 2'-O-methyl ribonucleotide
  modified_base 94: mod_base = OTHER; note = 2'-O-methyl ribonucleotide
  modified_base 95: mod_base = OTHER; note = 2'-O-methyl ribonucleotide
  modified_base 96: mod_base = OTHER; note = 2'-O-methyl ribonucleotide
  modified_base 97: mod_base = OTHER; note = 2'-O-methyl ribonucleotide
  modified_base 98: mod_base = OTHER; note = 2'-O-methyl ribonucleotide
  modified_base 99: mod_base = OTHER; note = 2'-O-methyl ribonucleotide
  modified_base 100: mod_base = OTHER; note = 2'-O-methyl ribonucleotide
  modified_base 1..3: mod_base = OTHER; note = phosphorothioate linkage
  modified_base 45..46: mod_base = OTHER; note = phosphorothioate linkage
  modified_base 64..65: mod_base = OTHER; note = phosphorothioate linkage
  modified_base 97..100: mod_base = OTHER; note = phosphorothioate linkage

SEQ ID NO: 1738 - RNA, 103 nt, synthetic construct; identical to SEQ ID NO: 1643
  source 1..103: mol_type = other RNA
  modified_base 1: mod_base = OTHER; note = 2'-O-methyl ribonucleotide
  modified_base 2: mod_base = OTHER; note = 2'-O-methyl ribonucleotide
  modified_base 3: mod_base = OTHER; note = 2'-O-methyl ribonucleotide
  modified_base 21: mod_base = OTHER; note = 2'-O-methyl ribonucleotide
  modified_base 28: mod_base = OTHER; note = 2'-O-methyl ribonucleotide
  modified_base 29: mod_base = OTHER; note = 2'-O-methyl ribonucleotide
  modified_base 30: mod_base = OTHER; note = 2'-O-methyl ribonucleotide
  modified_base 31: mod_base = OTHER; note = 2'-O-methyl ribonucleotide
  modified_base 32: mod_base = OTHER; note = 2'-O-methyl ribonucleotide
  modified_base 34: mod_base = OTHER; note = 2'-O-methyl ribonucleotide
  modified_base 35: mod_base = OTHER; note = 2'-O-methyl ribonucleotide
  modified_base 36: mod_base = OTHER; note = 2'-O-methyl ribonucleotide
  modified_base 37: mod_base = OTHER; note = 2'-O-methyl ribonucleotide
  modified_base 38: mod_base = OTHER; note = 2'-O-methyl ribonucleotide
  modified_base 39: mod_base = OTHER; note = 2'-O-methyl ribonucleotide
  modified_base 40: mod_base = OTHER; note = 2'-O-methyl ribonucleotide
  modified_base 41: mod_base = OTHER; note = 2'-O-methyl ribonucleotide
  modified_base 42: mod_base = OTHER; note = 2'-O-methyl ribonucleotide
  modified_base 46: mod_base = OTHER; note = 2'-O-methyl ribonucleotide
  modified_base 48: mod_base = OTHER; note = 2'-O-methyl ribonucleotide
  modified_base 50: mod_base = OTHER; note = 2'-O-methyl ribonucleotide
  modified_base 52: mod_base = OTHER; note = 2'-O-methyl ribonucleotide
  modified_base 53: mod_base = OTHER; note = 2'-O-methyl ribonucleotide
  modified_base 54: mod_base = OTHER; note = 2'-O-methyl ribonucleotide
  modified_base 57: mod_base = OTHER; note = 2'-O-methyl ribonucleotide
  modified_base 61: mod_base = OTHER; note = 2'-O-methyl ribonucleotide
  modified_base 66: mod_base = OTHER; note = 2'-O-methyl ribonucleotide
  modified_base 67: mod_base = OTHER; note = 2'-O-methyl ribonucleotide
  modified_base 70: mod_base = OTHER; note = 2'-O-methyl ribonucleotide
  modified_base 71: mod_base = OTHER; note = 2'-O-methyl ribonucleotide
  modified_base 72: mod_base = OTHER; note = 2'-O-methyl ribonucleotide
  modified_base 74: mod_base = OTHER; note = 2'-O-methyl ribonucleotide
  modified_base 75: mod_base = OTHER; note = 2'-O-methyl ribonucleotide
  modified_base 76: mod_base = OTHER; note = 2'-O-methyl ribonucleotide
  modified_base 77: mod_base = OTHER; note = 2'-O-methyl ribonucleotide
  modified_base 78: mod_base = OTHER; note = 2'-O-methyl ribonucleotide
  modified_base 79: mod_base = OTHER; note = 2'-O-methyl ribonucleotide
  modified_base 80: mod_base = OTHER; note = 2'-O-methyl ribonucleotide
  modified_base 82: mod_base = OTHER; note = 2'-O-methyl ribonucleotide
  modified_base 83: mod_base = OTHER; note = 2'-O-methyl ribonucleotide
  modified_base 84: mod_base = OTHER; note = 2'-O-methyl ribonucleotide
  modified_base 85: mod_base = OTHER; note = 2'-O-methyl ribonucleotide
  modified_base 86: mod_base = OTHER; note = 2'-O-methyl ribonucleotide
  modified_base 87: mod_base = OTHER; note = 2'-O-methyl ribonucleotide
  modified_base 89: mod_base = OTHER; note = 2'-O-methyl ribonucleotide
  modified_base 92: mod_base = OTHER; note = 2'-O-methyl ribonucleotide
  modified_base 93: mod_base = OTHER; note = 2'-O-methyl ribonucleotide
  modified_base 94: mod_base = OTHER; note = 2'-O-methyl ribonucleotide
  modified_base 95: mod_base = OTHER; note = 2'-O-methyl ribonucleotide
  modified_base 96: mod_base = OTHER; note = 2'-O-methyl ribonucleotide
  modified_base 97: mod_base = OTHER; note = 2'-O-methyl ribonucleotide
  modified_base 98: mod_base = OTHER; note = 2'-O-methyl ribonucleotide
  modified_base 99: mod_base = OTHER; note = 2'-O-methyl ribonucleotide
  modified_base 100: mod_base = OTHER; note = 2'-O-methyl ribonucleotide
  modified_base 1..3: mod_base = OTHER; note = phosphorothioate linkage
  modified_base 25..26: mod_base = OTHER; note = phosphorothioate linkage
  modified_base 45..46: mod_base = OTHER; note = phosphorothioate linkage
  modified_base 97..100: mod_base = OTHER; note = phosphorothioate linkage

SEQ ID NO: 1739 - RNA, 103 nt, synthetic construct; identical to SEQ ID NO: 1699
  source 1..103: mol_type = other RNA
  modified_base 1: mod_base = OTHER; note = 2'-O-methyl ribonucleotide
  modified_base 2: mod_base = OTHER; note = 2'-O-methyl ribonucleotide
  modified_base 3: mod_base = OTHER; note = 2'-O-methyl ribonucleotide
  modified_base 21: mod_base = OTHER; note = 2'-O-methyl ribonucleotide
  modified_base 28: mod_base = OTHER; note = 2'-O-methyl ribonucleotide
  modified_base 29: mod_base = OTHER; note = 2'-O-methyl ribonucleotide
  modified_base 30: mod_base = OTHER; note = 2'-O-methyl ribonucleotide
  modified_base 31: mod_base = OTHER; note = 2'-O-methyl ribonucleotide
  modified_base 32: mod_base = OTHER; note = 2'-O-methyl ribonucleotide
  modified_base 34: mod_base = OTHER; note = 2'-O-methyl ribonucleotide
  modified_base 35: mod_base = OTHER; note = 2'-O-methyl ribonucleotide
  modified_base 36: mod_base = OTHER; note = 2'-O-methyl ribonucleotide
  modified_base 37: mod_base = OTHER; note = 2'-O-methyl ribonucleotide
  modified_base 38: mod_base = OTHER; note = 2'-O-methyl ribonucleotide
  modified_base 39: mod_base = OTHER; note = 2'-O-methyl ribonucleotide
  modified_base 40: mod_base = OTHER; note = 2'-O-methyl ribonucleotide
  modified_base 41: mod_base = OTHER; note = 2'-O-methyl ribonucleotide
  modified_base 42: mod_base = OTHER; note = 2'-O-methyl ribonucleotide
  modified_base 46: mod_base = OTHER; note = 2'-O-methyl ribonucleotide
  modified_base 48: mod_base = OTHER; note = 2'-O-methyl ribonucleotide
  modified_base 50: mod_base = OTHER; note = 2'-O-methyl ribonucleotide
  modified_base 52: mod_base = OTHER; note = 2'-O-methyl ribonucleotide
  modified_base 53: mod_base = OTHER; note = 2'-O-methyl ribonucleotide
  modified_base 54: mod_base = OTHER; note = 2'-O-methyl ribonucleotide
  modified_base 57: mod_base = OTHER; note = 2'-O-methyl ribonucleotide
  modified_base 61: mod_base = OTHER; note = 2'-O-methyl ribonucleotide
  modified_base 66: mod_base = OTHER; note = 2'-O-methyl ribonucleotide
  modified_base 67: mod_base = OTHER; note = 2'-O-methyl ribonucleotide
  modified_base 70: mod_base = OTHER; note = 2'-O-methyl ribonucleotide
  modified_base 71: mod_base = OTHER; note = 2'-O-methyl ribonucleotide
  modified_base 72: mod_base = OTHER; note = 2'-O-methyl ribonucleotide
  modified_base 74: mod_base = OTHER; note = 2'-O-methyl ribonucleotide
  modified_base 75: mod_base = OTHER; note = 2'-O-methyl ribonucleotide
  modified_base 76: mod_base = OTHER; note = 2'-O-methyl ribonucleotide
  modified_base 77: mod_base = OTHER; note = 2'-O-methyl ribonucleotide
  modified_base 78: mod_base = OTHER; note = 2'-O-methyl ribonucleotide
  modified_base 79: mod_base = OTHER; note = 2'-O-methyl ribonucleotide
  modified_base 80: mod_base = OTHER; note = 2'-O-methyl ribonucleotide
  modified_base 82: mod_base = OTHER; note = 2'-O-methyl ribonucleotide
  modified_base 83: mod_base = OTHER; note = 2'-O-methyl ribonucleotide
  modified_base 84: mod_base = OTHER; note = 2'-O-methyl ribonucleotide
  modified_base 85: mod_base = OTHER; note = 2'-O-methyl ribonucleotide
  modified_base 86: mod_base = OTHER; note = 2'-O-methyl ribonucleotide
  modified_base 87: mod_base = OTHER; note = 2'-O-methyl ribonucleotide
  modified_base 89: mod_base = OTHER; note = 2'-O-methyl ribonucleotide
  modified_base 92: mod_base = OTHER; note = 2'-O-methyl ribonucleotide
  modified_base 93: mod_base = OTHER; note = 2'-O-methyl ribonucleotide
  modified_base 94: mod_base = OTHER; note = 2'-O-methyl ribonucleotide
  modified_base 95: mod_base = OTHER; note = 2'-O-methyl ribonucleotide
  modified_base 96: mod_base = OTHER; note = 2'-O-methyl ribonucleotide
  modified_base 97: mod_base = OTHER; note = 2'-O-methyl ribonucleotide
  modified_base 98: mod_base = OTHER; note = 2'-O-methyl ribonucleotide
  modified_base 99: mod_base = OTHER; note = 2'-O-methyl ribonucleotide
  modified_base 100: mod_base = OTHER; note = 2'-O-methyl ribonucleotide
  modified_base 1..3: mod_base = OTHER; note = phosphorothioate linkage
  modified_base 25..26: mod_base = OTHER; note = phosphorothioate linkage
  modified_base 45..46: mod_base = OTHER; note = phosphorothioate linkage
  modified_base 97..100: mod_base = OTHER; note = phosphorothioate linkage

SEQ ID NO: 1740 - RNA, 103 nt, synthetic construct; identical to SEQ ID NO: 1700
  source 1..103: mol_type = other RNA
  modified_base 1: mod_base = OTHER; note = 2'-O-methyl ribonucleotide
  modified_base 2: mod_base = OTHER; note = 2'-O-methyl ribonucleotide
  modified_base 3: mod_base = OTHER; note = 2'-O-methyl ribonucleotide
  modified_base 21: mod_base = OTHER; note = 2'-O-methyl ribonucleotide
  modified_base 28: mod_base = OTHER; note = 2'-O-methyl ribonucleotide
  modified_base 29: mod_base = OTHER; note = 2'-O-methyl ribonucleotide
  modified_base 30: mod_base = OTHER; note = 2'-O-methyl ribonucleotide
  modified_base 31: mod_base = OTHER; note = 2'-O-methyl ribonucleotide
  modified_base 32: mod_base = OTHER; note = 2'-O-methyl ribonucleotide
  modified_base 34: mod_base = OTHER; note = 2'-O-methyl ribonucleotide
  modified_base 35: mod_base = OTHER; note = 2'-O-methyl ribonucleotide
  modified_base 36: mod_base = OTHER; note = 2'-O-methyl ribonucleotide
  modified_base 37: mod_base = OTHER; note = 2'-O-methyl ribonucleotide
  modified_base 38: mod_base = OTHER; note = 2'-O-methyl ribonucleotide
  modified_base 39: mod_base = OTHER; note = 2'-O-methyl ribonucleotide
  modified_base 40: mod_base = OTHER; note = 2'-O-methyl ribonucleotide
  modified_base 41: mod_base = OTHER; note = 2'-O-methyl ribonucleotide
  modified_base 42: mod_base = OTHER; note = 2'-O-methyl ribonucleotide
  modified_base 46: mod_base = OTHER; note = 2'-O-methyl ribonucleotide
  modified_base 48: mod_base = OTHER; note = 2'-O-methyl ribonucleotide
  modified_base 50: mod_base = OTHER; note = 2'-O-methyl ribonucleotide
  modified_base 52: mod_base = OTHER; note = 2'-O-methyl ribonucleotide
  modified_base 53: mod_base = OTHER; note = 2'-O-methyl ribonucleotide
  modified_base 54: mod_base = OTHER; note = 2'-O-methyl ribonucleotide
  modified_base 55: mod_base = OTHER; note = 2'-O-methyl ribonucleotide
  modified_base 56: mod_base = OTHER; note = 2'-O-methyl ribonucleotide
  modified_base 57: mod_base = OTHER; note = 2'-O-methyl ribonucleotide
  modified_base 60: mod_base = OTHER; note = 2'-O-methyl ribonucleotide
  modified_base 61: mod_base = OTHER; note = 2'-O-methyl ribonucleotide
  modified_base 66: mod_base = OTHER; note = 2'-O-methyl ribonucleotide
  modified_base 67: mod_base = OTHER; note = 2'-O-methyl ribonucleotide
  modified_base 70: mod_base = OTHER; note = 2'-O-methyl ribonucleotide
  modified_base 71: mod_base = OTHER; note = 2'-O-methyl ribonucleotide
  modified_base 72: mod_base = OTHER; note = 2'-O-methyl ribonucleotide
  modified_base 74: mod_base = OTHER; note = 2'-O-methyl ribonucleotide
  modified_base 75: mod_base = OTHER; note = 2'-O-methyl ribonucleotide
  modified_base 76: mod_base = OTHER; note = 2'-O-methyl ribonucleotide
  modified_base 77: mod_base = OTHER; note = 2'-O-methyl ribonucleotide
  modified_base 78: mod_base = OTHER; note = 2'-O-methyl ribonucleotide
  modified_base 79: mod_base = OTHER; note = 2'-O-methyl ribonucleotide
  modified_base 80: mod_base = OTHER; note = 2'-O-methyl ribonucleotide
  modified_base 81: mod_base = OTHER; note = 2'-O-methyl ribonucleotide
  modified_base 83: mod_base = OTHER; note = 2'-O-methyl ribonucleotide
  modified_base 84: mod_base = OTHER; note = 2'-O-methyl ribonucleotide
  modified_base 85: mod_base = OTHER; note = 2'-O-methyl ribonucleotide
  modified_base 86: mod_base = OTHER; note = 2'-O-methyl ribonucleotide
  modified_base 87: mod_base = OTHER; note = 2'-O-methyl ribonucleotide
  modified_base 88: mod_base = OTHER; note = 2'-O-methyl ribonucleotide
  modified_base 89: mod_base = OTHER; note = 2'-O-methyl ribonucleotide
  modified_base 90: mod_base = OTHER; note = 2'-O-methyl ribonucleotide
  modified_base 91: mod_base = OTHER; note = 2'-O-methyl ribonucleotide
  modified_base 92: mod_base = OTHER; note = 2'-O-methyl ribonucleotide
  modified_base 93: mod_base = OTHER; note = 2'-O-methyl ribonucleotide
  modified_base 94: mod_base = OTHER; note = 2'-O-methyl ribonucleotide
  modified_base 95: mod_base = OTHER; note = 2'-O-methyl ribonucleotide
  modified_base 96: mod_base = OTHER; note = 2'-O-methyl ribonucleotide
  modified_base 97: mod_base = OTHER; note = 2'-O-methyl ribonucleotide
  modified_base 98: mod_base = OTHER; note = 2'-O-methyl ribonucleotide
  modified_base 99: mod_base = OTHER; note = 2'-O-methyl ribonucleotide
  modified_base 100: mod_base = OTHER; note = 2'-O-methyl ribonucleotide
  modified_base 1..3: mod_base = OTHER; note = phosphorothioate linkage
  modified_base 25..26: mod_base = OTHER; note = phosphorothioate linkage
  modified_base 45..46: mod_base = OTHER; note = phosphorothioate linkage
  modified_base 97..100: mod_base = OTHER; note = phosphorothioate linkage

SEQ ID NO: 1741 - RNA, 103 nt, synthetic construct; identical to SEQ ID NO: 1643
  source 1..103: mol_type = other RNA
  modified_base 1: mod_base = OTHER; note = 2'-O-methyl ribonucleotide
  modified_base 2: mod_base = OTHER; note = 2'-O-methyl ribonucleotide
  modified_base 3: mod_base = OTHER; note = 2'-O-methyl ribonucleotide
  modified_base 21: mod_base = OTHER; note = 2'-O-methyl ribonucleotide
  modified_base 28: mod_base = OTHER; note = 2'-O-methyl ribonucleotide
  modified_base 29: mod_base = OTHER; note = 2'-O-methyl ribonucleotide
  modified_base 30: mod_base = OTHER; note = 2'-O-methyl ribonucleotide
  modified_base 31: mod_base = OTHER; note = 2'-O-methyl ribonucleotide
  modified_base 32: mod_base = OTHER; note = 2'-O-methyl ribonucleotide
  modified_base 34: mod_base = OTHER; note = 2'-O-methyl ribonucleotide
  modified_base 35: mod_base = OTHER; note = 2'-O-methyl ribonucleotide
  modified_base 36: mod_base = OTHER; note = 2'-O-methyl ribonucleotide
  modified_base 37: mod_base = OTHER; note = 2'-O-methyl ribonucleotide
  modified_base 38: mod_base = OTHER; note = 2'-O-methyl ribonucleotide
  modified_base 39: mod_base = OTHER; note = 2'-O-methyl ribonucleotide
  modified_base 40: mod_base = OTHER; note = 2'-O-methyl ribonucleotide
  modified_base 41: mod_base = OTHER; note = 2'-O-methyl ribonucleotide
  modified_base 42: mod_base = OTHER; note = 2'-O-methyl ribonucleotide
  modified_base 46: mod_base = OTHER; note = 2'-O-methyl ribonucleotide
  modified_base 48: mod_base = OTHER; note = 2'-O-methyl ribonucleotide
  modified_base 50: mod_base = OTHER; note = 2'-O-methyl ribonucleotide
  modified_base 52: mod_base = OTHER; note = 2'-O-methyl ribonucleotide
  modified_base 53: mod_base = OTHER; note = 2'-O-methyl ribonucleotide
  modified_base 54: mod_base = OTHER; note = 2'-O-methyl ribonucleotide
  modified_base 57: mod_base = OTHER; note = 2'-O-methyl ribonucleotide
  modified_base 61: mod_base = OTHER; note = 2'-O-methyl ribonucleotide
  modified_base 66: mod_base = OTHER; note = 2'-O-methyl ribonucleotide
  modified_base 67: mod_base = OTHER; note = 2'-O-methyl ribonucleotide
  modified_base 70: mod_base = OTHER; note = 2'-O-methyl ribonucleotide
  modified_base 71: mod_base = OTHER; note = 2'-O-methyl ribonucleotide
  modified_base 72: mod_base = OTHER; note = 2'-O-methyl ribonucleotide
  modified_base 74: mod_base = OTHER; note = 2'-O-methyl ribonucleotide
  modified_base 75: mod_base = OTHER; note = 2'-O-methyl ribonucleotide
  modified_base 76: mod_base = OTHER; note = 2'-O-methyl ribonucleotide
  modified_base 77: mod_base = OTHER; note = 2'-O-methyl ribonucleotide
  modified_base 78: mod_base = OTHER; note = 2'-O-methyl ribonucleotide
  modified_base 79: mod_base = OTHER; note = 2'-O-methyl ribonucleotide
  modified_base 80: mod_base = OTHER; note = 2'-O-methyl ribonucleotide
  modified_base 82: mod_base = OTHER; note = 2'-O-methyl ribonucleotide
  modified_base 83: mod_base = OTHER; note = 2'-O-methyl ribonucleotide
  modified_base 84: mod_base = OTHER; note = 2'-O-methyl ribonucleotide
  modified_base 85: mod_base = OTHER; note = 2'-O-methyl ribonucleotide
  modified_base 86: mod_base = OTHER; note = 2'-O-methyl ribonucleotide
  modified_base 87: mod_base = OTHER; note = 2'-O-methyl ribonucleotide
  modified_base 89: mod_base = OTHER; note = 2'-O-methyl ribonucleotide
  modified_base 92: mod_base = OTHER; note = 2'-O-methyl ribonucleotide
  modified_base 93: mod_base = OTHER; note = 2'-O-methyl ribonucleotide
  modified_base 94: mod_base = OTHER; note = 2'-O-methyl ribonucleotide
  modified_base 95: mod_base = OTHER; note = 2'-O-methyl ribonucleotide
  modified_base 96: mod_base = OTHER; note = 2'-O-methyl ribonucleotide
  modified_base 97: mod_base = OTHER; note = 2'-O-methyl ribonucleotide
  modified_base 98: mod_base = OTHER; note = 2'-O-methyl ribonucleotide
  modified_base 99: mod_base = OTHER; note = 2'-O-methyl ribonucleotide
  modified_base 100: mod_base = OTHER; note = 2'-O-methyl ribonucleotide
  modified_base 1..3: mod_base = OTHER; note = phosphorothioate linkage
  modified_base 25..26: mod_base = OTHER; note = phosphorothioate linkage
  modified_base 64..65: mod_base = OTHER; note = phosphorothioate linkage
  modified_base 97..100: mod_base = OTHER; note = phosphorothioate linkage

SEQ ID NO: 1742 - RNA, 103 nt, synthetic construct; identical to SEQ ID NO: 1699
  source 1..103: mol_type = other RNA
  modified_base 1: mod_base = OTHER; note = 2'-O-methyl ribonucleotide
  modified_base 2: mod_base = OTHER; note = 2'-O-methyl ribonucleotide
  modified_base 3: mod_base = OTHER; note = 2'-O-methyl ribonucleotide
  modified_base 21: mod_base = OTHER; note = 2'-O-methyl ribonucleotide
  modified_base 28: mod_base = OTHER; note = 2'-O-methyl ribonucleotide
  modified_base 29: mod_base = OTHER; note = 2'-O-methyl ribonucleotide
  modified_base 30: mod_base = OTHER; note = 2'-O-methyl ribonucleotide
  modified_base 31: mod_base = OTHER; note = 2'-O-methyl ribonucleotide
  modified_base 32: mod_base = OTHER; note = 2'-O-methyl ribonucleotide
  modified_base 34: mod_base = OTHER; note = 2'-O-methyl ribonucleotide
  modified_base 35: mod_base = OTHER; note = 2'-O-methyl ribonucleotide
  modified_base 36: mod_base = OTHER; note = 2'-O-methyl ribonucleotide
  modified_base 37: mod_base = OTHER; note = 2'-O-methyl ribonucleotide
  modified_base 38: mod_base = OTHER; note = 2'-O-methyl ribonucleotide
  modified_base 39: mod_base = OTHER; note = 2'-O-methyl ribonucleotide
  modified_base 40: mod_base = OTHER; note = 2'-O-methyl ribonucleotide
  modified_base 41: mod_base = OTHER; note = 2'-O-methyl ribonucleotide
  modified_base 42: mod_base = OTHER; note = 2'-O-methyl ribonucleotide
  modified_base 46: mod_base = OTHER; note = 2'-O-methyl ribonucleotide
  modified_base 48: mod_base = OTHER; note = 2'-O-methyl ribonucleotide
  modified_base 50: mod_base = OTHER; note = 2'-O-methyl ribonucleotide
  modified_base 52: mod_base = OTHER; note = 2'-O-methyl ribonucleotide
  modified_base 53: mod_base = OTHER; note = 2'-O-methyl ribonucleotide
  modified_base 54: mod_base = OTHER; note = 2'-O-methyl ribonucleotide
  modified_base 57: mod_base = OTHER; note = 2'-O-methyl ribonucleotide
  modified_base 61: mod_base = OTHER; note = 2'-O-methyl ribonucleotide
  modified_base 66: mod_base = OTHER; note = 2'-O-methyl ribonucleotide
  modified_base 67: mod_base = OTHER; note = 2'-O-methyl ribonucleotide
  modified_base 70: mod_base = OTHER; note = 2'-O-methyl ribonucleotide
  modified_base 71: mod_base = OTHER; note = 2'-O-methyl ribonucleotide
  modified_base 72: mod_base = OTHER; note = 2'-O-methyl ribonucleotide
  modified_base 74: mod_base = OTHER; note = 2'-O-methyl ribonucleotide
  modified_base 75: mod_base = OTHER; note = 2'-O-methyl ribonucleotide
  modified_base 76: mod_base = OTHER; note = 2'-O-methyl ribonucleotide
  modified_base 77: mod_base = OTHER; note = 2'-O-methyl ribonucleotide
  modified_base 78: mod_base = OTHER; note = 2'-O-methyl ribonucleotide
  modified_base 79: mod_base = OTHER; note = 2'-O-methyl ribonucleotide
  modified_base 80: mod_base = OTHER; note = 2'-O-methyl ribonucleotide
  modified_base 82: mod_base = OTHER; note = 2'-O-methyl ribonucleotide
  modified_base 83: mod_base = OTHER; note = 2'-O-methyl ribonucleotide
  modified_base 84: mod_base = OTHER; note = 2'-O-methyl ribonucleotide
  modified_base 85: mod_base = OTHER; note = 2'-O-methyl ribonucleotide
  modified_base 86: mod_base = OTHER; note = 2'-O-methyl ribonucleotide
  modified_base 87: mod_base = OTHER; note = 2'-O-methyl ribonucleotide
  modified_base 89: mod_base = OTHER; note = 2'-O-methyl ribonucleotide
  modified_base 92: mod_base = OTHER; note = 2'-O-methyl ribonucleotide
  modified_base 93: mod_base = OTHER; note = 2'-O-methyl ribonucleotide
  modified_base 94: mod_base = OTHER; note = 2'-O-methyl ribonucleotide
  modified_base 95: mod_base = OTHER; note = 2'-O-methyl ribonucleotide
  modified_base 96: mod_base = OTHER; note = 2'-O-methyl ribonucleotide
  modified_base 97: mod_base = OTHER; note = 2'-O-methyl ribonucleotide
  modified_base 98: mod_base = OTHER; note = 2'-O-methyl ribonucleotide
  modified_base 99: mod_base = OTHER; note = 2'-O-methyl ribonucleotide
  modified_base 100: mod_base = OTHER; note = 2'-O-methyl ribonucleotide
  modified_base 1..3: mod_base = OTHER; note = phosphorothioate linkage
  modified_base 25..26: mod_base = OTHER; note = phosphorothioate linkage
  modified_base 64..65: mod_base = OTHER; note = phosphorothioate linkage
  modified_base 97..100: mod_base = OTHER; note = phosphorothioate linkage

SEQ ID NO: 1743 - RNA, 103 nt, synthetic construct; identical to SEQ ID NO: 1700
  source 1..103: mol_type = other RNA
  modified_base 1: mod_base = OTHER; note = 2'-O-methyl ribonucleotide
  modified_base 2: mod_base = OTHER; note = 2'-O-methyl ribonucleotide
  modified_base 3: mod_base = OTHER; note = 2'-O-methyl ribonucleotide
  modified_base 21: mod_base = OTHER; note = 2'-O-methyl ribonucleotide
  modified_base 28: mod_base = OTHER; note = 2'-O-methyl ribonucleotide
  modified_base 29: mod_base = OTHER; note = 2'-O-methyl ribonucleotide
  modified_base 30: mod_base = OTHER; note = 2'-O-methyl ribonucleotide
  modified_base 31: mod_base = OTHER; note = 2'-O-methyl ribonucleotide
  modified_base 32: mod_base = OTHER; note = 2'-O-methyl ribonucleotide
  modified_base 34: mod_base = OTHER; note = 2'-O-methyl ribonucleotide
  modified_base 35: mod_base = OTHER; note = 2'-O-methyl ribonucleotide
  modified_base 36: mod_base = OTHER; note = 2'-O-methyl ribonucleotide
  modified_base 37: mod_base = OTHER; note = 2'-O-methyl ribonucleotide
  modified_base 38: mod_base = OTHER; note = 2'-O-methyl ribonucleotide
  modified_base 39: mod_base = OTHER; note = 2'-O-methyl ribonucleotide
  modified_base 40: mod_base = OTHER; note = 2'-O-methyl ribonucleotide
  modified_base 41: mod_base = OTHER; note = 2'-O-methyl ribonucleotide
  modified_base 42: mod_base = OTHER; note = 2'-O-methyl ribonucleotide
  modified_base 46: mod_base = OTHER; note = 2'-O-methyl ribonucleotide
  modified_base 48: mod_base = OTHER; note = 2'-O-methyl ribonucleotide
  modified_base 50: mod_base = OTHER; note = 2'-O-methyl ribonucleotide
  modified_base 52: mod_base = OTHER; note = 2'-O-methyl ribonucleotide
  modified_base 53: mod_base = OTHER; note = 2'-O-methyl ribonucleotide
  modified_base 54: mod_base = OTHER; note = 2'-O-methyl ribonucleotide
  modified_base 55: mod_base = OTHER; note = 2'-O-methyl ribonucleotide
  modified_base 56: mod_base = OTHER; note = 2'-O-methyl ribonucleotide
  modified_base 57: mod_base = OTHER; note = 2'-O-methyl ribonucleotide
  modified_base 60: mod_base = OTHER; note = 2'-O-methyl ribonucleotide
  modified_base 61: mod_base = OTHER; note = 2'-O-methyl ribonucleotide
  modified_base 66: mod_base = OTHER; note = 2'-O-methyl ribonucleotide
  modified_base 67: mod_base = OTHER; note = 2'-O-methyl ribonucleotide
  modified_base 70: mod_base = OTHER; note = 2'-O-methyl ribonucleotide
  modified_base 71: mod_base = OTHER; note = 2'-O-methyl ribonucleotide
  modified_base 72: mod_base = OTHER; note = 2'-O-methyl ribonucleotide
  modified_base 74: mod_base = OTHER; note = 2'-O-methyl ribonucleotide
  modified_base 75: mod_base = OTHER; note = 2'-O-methyl ribonucleotide
  modified_base 76: mod_base = OTHER; note = 2'-O-methyl ribonucleotide
  modified_base 77: mod_base = OTHER; note = 2'-O-methyl ribonucleotide
  modified_base 78: mod_base = OTHER; note = 2'-O-methyl ribonucleotide
  modified_base 79: mod_base = OTHER; note = 2'-O-methyl ribonucleotide
  modified_base 80: mod_base = OTHER; note = 2'-O-methyl ribonucleotide
  modified_base 81: mod_base = OTHER; note = 2'-O-methyl ribonucleotide
  modified_base 83: mod_base = OTHER; note = 2'-O-methyl ribonucleotide
  modified_base 84: mod_base = OTHER; note = 2'-O-methyl ribonucleotide
  modified_base 85: mod_base = OTHER; note = 2'-O-methyl ribonucleotide
  modified_base 86: mod_base = OTHER; note = 2'-O-methyl ribonucleotide
  modified_base 87: mod_base = OTHER; note = 2'-O-methyl ribonucleotide
  modified_base 88: mod_base = OTHER; note = 2'-O-methyl ribonucleotide
  modified_base 89: mod_base = OTHER; note = 2'-O-methyl ribonucleotide
  modified_base 90: mod_base = OTHER; note = 2'-O-methyl ribonucleotide
  modified_base 91: mod_base = OTHER; note = 2'-O-methyl ribonucleotide
  modified_base 92: mod_base = OTHER; note = 2'-O-methyl ribonucleotide
  modified_base 93: mod_base = OTHER; note = 2'-O-methyl ribonucleotide
  modified_base 94: mod_base = OTHER; note = 2'-O-methyl ribonucleotide
  modified_base 95: mod_base = OTHER; note = 2'-O-methyl ribonucleotide
  modified_base 96: mod_base = OTHER; note = 2'-O-methyl ribonucleotide
  modified_base 97: mod_base = OTHER; note = 2'-O-methyl ribonucleotide
  modified_base 98: mod_base = OTHER; note = 2'-O-methyl ribonucleotide
  modified_base 99: mod_base = OTHER; note = 2'-O-methyl ribonucleotide
  modified_base 100: mod_base = OTHER; note = 2'-O-methyl ribonucleotide
  modified_base 1..3: mod_base = OTHER; note = phosphorothioate linkage
  modified_base 25..26: mod_base = OTHER; note = phosphorothioate linkage
  modified_base 64..65: mod_base = OTHER; note = phosphorothioate linkage
  modified_base 97..100: mod_base = OTHER; note = phosphorothioate linkage

SEQ ID NO: 1744 - RNA, 103 nt, synthetic construct; identical to SEQ ID NO: 1643
  source 1..103: mol_type = other RNA
  modified_base 1: mod_base = OTHER; note = 2'-O-methyl ribonucleotide
  modified_base 2: mod_base = OTHER; note = 2'-O-methyl ribonucleotide
  modified_base 3: mod_base = OTHER; note = 2'-O-methyl ribonucleotide
  modified_base 21: mod_base = OTHER; note = 2'-O-methyl ribonucleotide
  modified_base 28: mod_base = OTHER; note = 2'-O-methyl ribonucleotide
  modified_base 29: mod_base = OTHER; note = 2'-O-methyl ribonucleotide
  modified_base 30: mod_base = OTHER; note = 2'-O-methyl ribonucleotide
  modified_base 31: mod_base = OTHER; note = 2'-O-methyl ribonucleotide
  modified_base 32: mod_base = OTHER; note = 2'-O-methyl ribonucleotide
  modified_base 34: mod_base = OTHER; note = 2'-O-methyl ribonucleotide
  modified_base 35: mod_base = OTHER; note = 2'-O-methyl ribonucleotide
  modified_base 36: mod_base = OTHER; note = 2'-O-methyl ribonucleotide
  modified_base 37: mod_base = OTHER; note = 2'-O-methyl ribonucleotide
  modified_base 38: mod_base = OTHER; note = 2'-O-methyl ribonucleotide
  modified_base 39: mod_base = OTHER; note = 2'-O-methyl ribonucleotide
  modified_base 40: mod_base = OTHER; note = 2'-O-methyl ribonucleotide
  modified_base 41: mod_base = OTHER; note = 2'-O-methyl ribonucleotide
  modified_base 42: mod_base = OTHER; note = 2'-O-methyl ribonucleotide
  modified_base 46: mod_base = OTHER; note = 2'-O-methyl ribonucleotide
  modified_base 48: mod_base = OTHER; note = 2'-O-methyl ribonucleotide
  modified_base 50: mod_base = OTHER; note = 2'-O-methyl ribonucleotide
  modified_base 52: mod_base = OTHER; note = 2'-O-methyl ribonucleotide
  modified_base 53: mod_base = OTHER; note = 2'-O-methyl ribonucleotide
  modified_base 54: mod_base = OTHER; note = 2'-O-methyl ribonucleotide
  modified_base 57: mod_base = OTHER; note = 2'-O-methyl ribonucleotide
  modified_base 61: mod_base = OTHER; note = 2'-O-methyl ribonucleotide
  modified_base 66: mod_base = OTHER; note = 2'-O-methyl ribonucleotide
  modified_base 67: mod_base = OTHER; note = 2'-O-methyl ribonucleotide
  modified_base 70: mod_base = OTHER; note = 2'-O-methyl ribonucleotide
  modified_base 71: mod_base = OTHER; note = 2'-O-methyl ribonucleotide
  modified_base 72: mod_base = OTHER; note = 2'-O-methyl ribonucleotide
  modified_base 74: mod_base = OTHER; note = 2'-O-methyl ribonucleotide
  modified_base 75: mod_base = OTHER; note = 2'-O-methyl ribonucleotide
  modified_base 76: mod_base = OTHER; note = 2'-O-methyl ribonucleotide
  modified_base 77: mod_base = OTHER; note = 2'-O-methyl ribonucleotide
  modified_base 78: mod_base = OTHER; note = 2'-O-methyl ribonucleotide
  modified_base 79: mod_base = OTHER; note = 2'-O-methyl ribonucleotide
  modified_base 80: mod_base = OTHER; note = 2'-O-methyl ribonucleotide
  modified_base 82: mod_base = OTHER; note = 2'-O-methyl ribonucleotide
  modified_base 83: mod_base = OTHER; note = 2'-O-methyl ribonucleotide
  modified_base 84: mod_base = OTHER; note = 2'-O-methyl ribonucleotide
  modified_base 85: mod_base = OTHER; note = 2'-O-methyl ribonucleotide
  modified_base 86: mod_base = OTHER; note = 2'-O-methyl ribonucleotide
  modified_base 87: mod_base = OTHER; note = 2'-O-methyl ribonucleotide
  modified_base 89: mod_base = OTHER; note = 2'-O-methyl ribonucleotide
  modified_base 92: mod_base = OTHER; note = 2'-O-methyl ribonucleotide
  modified_base 93: mod_base = OTHER; note = 2'-O-methyl ribonucleotide
  modified_base 94: mod_base = OTHER; note = 2'-O-methyl ribonucleotide
  modified_base 95: mod_base = OTHER; note = 2'-O-methyl ribonucleotide
  modified_base 96: mod_base = OTHER; note = 2'-O-methyl ribonucleotide
  modified_base 97: mod_base = OTHER; note = 2'-O-methyl ribonucleotide
  modified_base 98: mod_base = OTHER; note = 2'-O-methyl ribonucleotide
  modified_base 99: mod_base = OTHER; note = 2'-O-methyl ribonucleotide
  modified_base 100: mod_base = OTHER; note = 2'-O-methyl ribonucleotide
  modified_base 1..3: mod_base = OTHER; note = phosphorothioate linkage
  modified_base 25..26: mod_base = OTHER; note = phosphorothioate linkage
  modified_base 45..46: mod_base = OTHER; note = phosphorothioate linkage
  modified_base 64..65: mod_base = OTHER; note = phosphorothioate linkage
  modified_base 97..100: mod_base = OTHER; note = phosphorothioate linkage

SEQ ID NO: 1745 - RNA, 103 nt, synthetic construct; identical to SEQ ID NO: 1699
  source 1..103: mol_type = other RNA
  modified_base 1: mod_base = OTHER; note = 2'-O-methyl ribonucleotide
  modified_base 2: mod_base = OTHER; note = 2'-O-methyl ribonucleotide
  modified_base 3: mod_base = OTHER; note = 2'-O-methyl ribonucleotide
  modified_base 21: mod_base = OTHER; note = 2'-O-methyl ribonucleotide
  modified_base 28: mod_base = OTHER; note = 2'-O-methyl ribonucleotide
  modified_base 29: mod_base = OTHER; note = 2'-O-methyl ribonucleotide
  modified_base 30: mod_base = OTHER; note = 2'-O-methyl ribonucleotide
  modified_base 31: mod_base = OTHER; note = 2'-O-methyl ribonucleotide
  modified_base 32: mod_base = OTHER; note = 2'-O-methyl ribonucleotide
  modified_base 34: mod_base = OTHER; note = 2'-O-methyl ribonucleotide
  modified_base 35: mod_base = OTHER; note = 2'-O-methyl ribonucleotide
  modified_base 36: mod_base = OTHER; note = 2'-O-methyl ribonucleotide
  modified_base 37: mod_base = OTHER; note = 2'-O-methyl ribonucleotide
  modified_base 38: mod_base = OTHER; note = 2'-O-methyl ribonucleotide
  modified_base 39: mod_base = OTHER; note = 2'-O-methyl ribonucleotide
  modified_base 40: mod_base = OTHER; note = 2'-O-methyl ribonucleotide
  modified_base 41: mod_base = OTHER; note = 2'-O-methyl ribonucleotide
  modified_base 42: mod_base = OTHER; note = 2'-O-methyl ribonucleotide
  modified_base 46: mod_base = OTHER; note = 2'-O-methyl ribonucleotide
  modified_base 48: mod_base = OTHER; note = 2'-O-methyl ribonucleotide
  modified_base 50: mod_base = OTHER; note = 2'-O-methyl ribonucleotide
  modified_base 52: mod_base = OTHER; note = 2'-O-methyl ribonucleotide
  modified_base 53: mod_base = OTHER; note = 2'-O-methyl ribonucleotide
  modified_base 54: mod_base = OTHER; note = 2'-O-methyl ribonucleotide
  modified_base 57: mod_base = OTHER; note = 2'-O-methyl ribonucleotide
  modified_base 61: mod_base = OTHER; note = 2'-O-methyl ribonucleotide
  modified_base 66: mod_base = OTHER; note = 2'-O-methyl ribonucleotide
  modified_base 67: mod_base = OTHER; note = 2'-O-methyl ribonucleotide
  modified_base 70: mod_base = OTHER; note = 2'-O-methyl ribonucleotide
  modified_base 71: mod_base = OTHER; note = 2'-O-methyl ribonucleotide
  modified_base 72: mod_base = OTHER; note = 2'-O-methyl ribonucleotide
  modified_base 74: mod_base = OTHER; note = 2'-O-methyl ribonucleotide
  modified_base 75: mod_base = OTHER; note = 2'-O-methyl ribonucleotide
  modified_base 76: mod_base = OTHER; note = 2'-O-methyl ribonucleotide
  modified_base 77: mod_base = OTHER; note = 2'-O-methyl ribonucleotide
  modified_base 78: mod_base = OTHER; note = 2'-O-methyl ribonucleotide
  modified_base 79: mod_base = OTHER; note = 2'-O-methyl ribonucleotide
  modified_base 80: mod_base = OTHER; note = 2'-O-methyl ribonucleotide
  modified_base 82: mod_base = OTHER; note = 2'-O-methyl ribonucleotide
  modified_base 83: mod_base = OTHER; note = 2'-O-methyl ribonucleotide
  modified_base 84: mod_base = OTHER; note = 2'-O-methyl ribonucleotide
  modified_base 85: mod_base = OTHER; note = 2'-O-methyl ribonucleotide
  modified_base 86: mod_base = OTHER; note = 2'-O-methyl ribonucleotide
  modified_base 87: mod_base = OTHER; note = 2'-O-methyl ribonucleotide
  modified_base 89: mod_base = OTHER; note = 2'-O-methyl ribonucleotide
  modified_base 92: mod_base = OTHER; note = 2'-O-methyl ribonucleotide
  modified_base 93: mod_base = OTHER; note = 2'-O-methyl ribonucleotide
  modified_base 94: mod_base = OTHER; note = 2'-O-methyl ribonucleotide
  modified_base 95: mod_base = OTHER; note = 2'-O-methyl ribonucleotide
  modified_base 96: mod_base = OTHER; note = 2'-O-methyl ribonucleotide
  modified_base 97: mod_base = OTHER; note = 2'-O-methyl ribonucleotide
  modified_base 98: mod_base = OTHER; note = 2'-O-methyl ribonucleotide
  modified_base 99: mod_base = OTHER; note = 2'-O-methyl ribonucleotide
  modified_base 100: mod_base = OTHER; note = 2'-O-methyl ribonucleotide
  modified_base 1..3: mod_base = OTHER; note = phosphorothioate linkage
  modified_base 25..26: mod_base = OTHER; note = phosphorothioate linkage
  modified_base 45..46: mod_base = OTHER; note = phosphorothioate linkage
  modified_base 64..65: mod_base = OTHER; note = phosphorothioate linkage
  modified_base 97..100: mod_base = OTHER; note = phosphorothioate linkage

SEQ ID NO: 1746 - RNA, 102 nt, synthetic construct
  source 1..102: mol_type = other RNA
  modified_base 1: mod_base = OTHER; note = 2'-O-methyl ribonucleotide
  modified_base 2: mod_base = OTHER; note = 2'-O-methyl ribonucleotide
  modified_base 20: mod_base = OTHER; note = 2'-O-methyl ribonucleotide
  modified_base 27: mod_base = OTHER; note = 2'-O-methyl ribonucleotide
  modified_base 28: mod_base = OTHER; note = 2'-O-methyl ribonucleotide
  modified_base 29: mod_base = OTHER; note = 2'-O-methyl ribonucleotide
  modified_base 30: mod_base = OTHER; note = 2'-O-methyl ribonucleotide
  modified_base 31: mod_base = OTHER; note = 2'-O-methyl ribonucleotide
  modified_base 32: mod_base = OTHER; note = 2'-O-methyl ribonucleotide
  modified_base 33: mod_base = OTHER; note = 2'-O-methyl ribonucleotide
  modified_base 34: mod_base = OTHER; note = 2'-O-methyl ribonucleotide
  modified_base 35: mod_base = OTHER; note = 2'-O-methyl ribonucleotide
  modified_base 36: mod_base = OTHER; note = 2'-O-methyl ribonucleotide
  modified_base 37: mod_base = OTHER; note = 2'-O-methyl ribonucleotide
  modified_base 38: mod_base = OTHER; note = 2'-O-methyl ribonucleotide
  modified_base 39: mod_base = OTHER; note = 2'-O-methyl ribonucleotide
  modified_base 40: mod_base = OTHER; note = 2'-O-methyl ribonucleotide
  modified_base 41: mod_base = OTHER; note = 2'-O-methyl ribonucleotide
  modified_base 45: mod_base = OTHER; note = 2'-O-methyl ribonucleotide
  modified_base 47: mod_base = OTHER; note = 2'-O-methyl ribonucleotide
  modified_base 49: mod_base = OTHER; note = 2'-O-methyl ribonucleotide
  modified_base 51: mod_base = OTHER; note = 2'-O-methyl ribonucleotide
  modified_base 52: mod_base = OTHER; note = 2'-O-methyl ribonucleotide
  modified_base 53: mod_base = OTHER; note = 2'-O-methyl ribonucleotide
  modified_base 54: mod_base = OTHER; note = 2'-O-methyl ribonucleotide
  modified_base 55: mod_base = OTHER; note = 2'-O-methyl ribonucleotide
  modified_base 56: mod_base = OTHER; note = 2'-O-methyl ribonucleotide
  modified_base 59: mod_base = OTHER; note = 2'-O-methyl ribonucleotide
  modified_base 60: mod_base = OTHER; note = 2'-O-methyl ribonucleotide
  modified_base 65: mod_base = OTHER; note = 2'-O-methyl ribonucleotide
  modified_base 66: mod_base = OTHER; note = 2'-O-methyl ribonucleotide
  modified_base 69: mod_base = OTHER; note = 2'-O-methyl ribonucleotide
  modified_base 70: mod_base = OTHER; note = 2'-O-methyl ribonucleotide
  modified_base 71: mod_base = OTHER; note = 2'-O-methyl ribonucleotide
  modified_base 72: mod_base = OTHER; note = 2'-O-methyl ribonucleotide
  modified_base 73: mod_base = OTHER; note = 2'-O-methyl ribonucleotide
  modified_base 74: mod_base = OTHER; note = 2'-O-methyl ribonucleotide
  modified_base 75: mod_base = OTHER; note = 2'-O-methyl ribonucleotide
  modified_base 76: mod_base = OTHER; note = 2'-O-methyl ribonucleotide
  modified_base 77: mod_base = OTHER; note = 2'-O-methyl ribonucleotide
  modified_base 78: mod_base = OTHER; note = 2'-O-methyl ribonucleotide
  modified_base 79: mod_base = OTHER; note = 2'-O-methyl ribonucleotide
  modified_base 80: mod_base = OTHER; note = 2'-O-methyl ribonucleotide
  modified_base 82: mod_base = OTHER; note = 2'-O-methyl ribonucleotide
  modified_base 83: mod_base = OTHER; note = 2'-O-methyl ribonucleotide
  modified_base 84: mod_base = OTHER; note = 2'-O-methyl ribonucleotide
  modified_base 85: mod_base = OTHER; note = 2'-O-methyl ribonucleotide
  modified_base 86: mod_base = OTHER; note = 2'-O-methyl ribonucleotide
  modified_base 87: mod_base = OTHER; note = 2'-O-methyl ribonucleotide
  modified_base 88: mod_base = OTHER; note = 2'-O-methyl ribonucleotide
  modified_base 89: mod_base = OTHER; note = 2'-O-methyl ribonucleotide
  modified_base 90: mod_base = OTHER; note = 2'-O-methyl ribonucleotide
  modified_base 91: mod_base = OTHER; note = 2'-O-methyl ribonucleotide
  modified_base 92: mod_base = OTHER; note = 2'-O-methyl ribonucleotide
  modified_base 93: mod_base = OTHER; note = 2'-O-methyl ribonucleotide
  modified_base 94: mod_base = OTHER; note = 2'-O-methyl ribonucleotide
  modified_base 95: mod_base = OTHER; note = 2'-O-methyl ribonucleotide
  modified_base 96: mod_base = OTHER; note = 2'-O-methyl ribonucleotide
  modified_base 97: mod_base = OTHER; note = 2'-O-methyl ribonucleotide
  modified_base 98: mod_base = OTHER; note = 2'-O-methyl ribonucleotide
  modified_base 99: mod_base = OTHER; note = 2'-O-methyl ribonucleotide
  modified_base 1..3: mod_base = OTHER; note = phosphorothioate linkage
  modified_base 24..25: mod_base = OTHER; note = phosphorothioate linkage
  modified_base 44..45: mod_base = OTHER; note = phosphorothioate linkage
  modified_base 63..64: mod_base = OTHER; note = phosphorothioate linkage
  modified_base 96..99: mod_base = OTHER; note = phosphorothioate linkage
gaatacctgagtaactttcgttttagagctagaaatagcaagttaaaataaggctagtccgttatcaacttgaaaaagtggcaccgagtcggtgcttttttt

SEQ ID NO: 1747 - RNA, 103 nt, synthetic construct; identical to SEQ ID NO: 1700
  source 1..103: mol_type = other RNA
  modified_base 1: mod_base = OTHER; note = 2'-O-methyl ribonucleotide
  modified_base 2: mod_base = OTHER; note = 2'-O-methyl ribonucleotide
  modified_base 3: mod_base = OTHER; note = 2'-O-methyl ribonucleotide
  modified_base 21: mod_base = OTHER; note = 2'-O-methyl ribonucleotide
  modified_base 28: mod_base = OTHER; note = 2'-O-methyl ribonucleotide
  modified_base 29: mod_base = OTHER; note = 2'-O-methyl ribonucleotide
  modified_base 30: mod_base = OTHER; note = 2'-O-methyl ribonucleotide
  modified_base 31: mod_base = OTHER; note = 2'-O-methyl ribonucleotide
  modified_base 32: mod_base = OTHER; note = 2'-O-methyl ribonucleotide
  modified_base 34: mod_base = OTHER; note = 2'-O-methyl ribonucleotide
  modified_base 35: mod_base = OTHER; note = 2'-O-methyl ribonucleotide
  modified_base 36: mod_base = OTHER; note = 2'-O-methyl ribonucleotide
  modified_base 37: mod_base = OTHER; note = 2'-O-methyl ribonucleotide
  modified_base 38: mod_base = OTHER; note = 2'-O-methyl ribonucleotide
  modified_base 39: mod_base = OTHER; note = 2'-O-methyl ribonucleotide
  modified_base 40: mod_base = OTHER; note = 2'-O-methyl ribonucleotide
  modified_base 41: mod_base = OTHER; note = 2'-O-methyl ribonucleotide
  modified_base 42: mod_base = OTHER; note = 2'-O-methyl ribonucleotide
  modified_base 46: mod_base = OTHER; note = 2'-O-methyl ribonucleotide
  modified_base 48: mod_base = OTHER; note = 2'-O-methyl ribonucleotide
  modified_base 50: mod_base = OTHER; note = 2'-O-methyl ribonucleotide
  modified_base 52: mod_base = OTHER; note = 2'-O-methyl ribonucleotide
  modified_base 53: mod_base = OTHER; note = 2'-O-methyl ribonucleotide
  modified_base 54: mod_base = OTHER; note = 2'-O-methyl ribonucleotide
  modified_base 55: mod_base = OTHER; note = 2'-O-methyl ribonucleotide
  modified_base 56: mod_base = OTHER; note = 2'-O-methyl ribonucleotide
  modified_base 57: mod_base = OTHER; note = 2'-O-methyl ribonucleotide
  modified_base 60: mod_base = OTHER; note = 2'-O-methyl ribonucleotide
  modified_base 61: mod_base = OTHER; note = 2'-O-methyl ribonucleotide
  modified_base 66: mod_base = OTHER; note = 2'-O-methyl ribonucleotide
  modified_base 67: mod_base = OTHER; note = 2'-O-methyl ribonucleotide
  modified_base 70: mod_base = OTHER; note = 2'-O-methyl ribonucleotide
  modified_base 71: mod_base = OTHER; note = 2'-O-methyl ribonucleotide
  modified_base 72: mod_base = OTHER; note = 2'-O-methyl ribonucleotide
  modified_base 74: mod_base = OTHER; note = 2'-O-methyl ribonucleotide
  modified_base 75: mod_base = OTHER; note = 2'-O-methyl ribonucleotide
  modified_base 76: mod_base = OTHER; note = 2'-O-methyl ribonucleotide
  modified_base 77: mod_base = OTHER; note = 2'-O-methyl ribonucleotide
  modified_base 78: mod_base = OTHER; note = 2'-O-methyl ribonucleotide
  modified_base 79: mod_base = OTHER; note = 2'-O-methyl ribonucleotide
  modified_base 80: mod_base = OTHER; note = 2'-O-methyl ribonucleotide
  modified_base 81: mod_base = OTHER; note = 2'-O-methyl ribonucleotide
  modified_base 83: mod_base = OTHER; note = 2'-O-methyl ribonucleotide
  modified_base 84: mod_base = OTHER; note = 2'-O-methyl ribonucleotide
  modified_base 85: mod_base = OTHER; note = 2'-O-methyl ribonucleotide
  modified_base 86: mod_base = OTHER; note = 2'-O-methyl ribonucleotide
  modified_base 87: mod_base = OTHER; note = 2'-O-methyl ribonucleotide
  modified_base 88: mod_base = OTHER; note = 2'-O-methyl ribonucleotide
  modified_base 89: mod_base = OTHER; note = 2'-O-methyl ribonucleotide
  modified_base 90: mod_base = OTHER; note = 2'-O-methyl ribonucleotide
  modified_base 91: mod_base = OTHER; note = 2'-O-methyl ribonucleotide
  modified_base 92: mod_base = OTHER; note = 2'-O-methyl ribonucleotide
  modified_base 93: mod_base = OTHER; note = 2'-O-methyl ribonucleotide
  modified_base 94: mod_base = OTHER; note = 2'-O-methyl ribonucleotide
  modified_base 95: mod_base = OTHER; note = 2'-O-methyl ribonucleotide
  modified_base 96: mod_base = OTHER; note = 2'-O-methyl ribonucleotide
  modified_base 97: mod_base = OTHER; note = 2'-O-methyl ribonucleotide
  modified_base 98: mod_base = OTHER; note = 2'-O-methyl ribonucleotide
  modified_base 99: mod_base = OTHER; note = 2'-O-methyl ribonucleotide
  modified_base 100: mod_base = OTHER; note = 2'-O-methyl ribonucleotide
  modified_base 1..3: mod_base = OTHER; note = phosphorothioate linkage
  modified_base 25..26: mod_base = OTHER; note = phosphorothioate linkage
  modified_base 45..46: mod_base = OTHER; note = phosphorothioate linkage
  modified_base 64..65: mod_base = OTHER; note = phosphorothioate linkage
  modified_base 97..100: mod_base = OTHER; note = phosphorothioate linkage

SEQ ID NO: 1748 - RNA, 103 nt, synthetic construct; identical to SEQ ID NO: 1700
  source 1..103: mol_type = other RNA
  modified_base 1: mod_base = OTHER; note = 2'-O-methyl ribonucleotide
  modified_base 2: mod_base = OTHER; note = 2'-O-methyl ribonucleotide
  modified_base 3: mod_base = OTHER; note = 2'-O-methyl ribonucleotide
  modified_base 21: mod_base = OTHER; note = 2'-O-methyl ribonucleotide
  modified_base 28: mod_base = OTHER; note = 2'-O-methyl ribonucleotide
  modified_base 29: mod_base = OTHER; note = 2'-O-methyl ribonucleotide
  modified_base 30: mod_base = OTHER; note = 2'-O-methyl ribonucleotide
  modified_base 31: mod_base = OTHER; note = 2'-O-methyl ribonucleotide
  modified_base 32: mod_base = OTHER; note = 2'-O-methyl ribonucleotide
  modified_base 34: mod_base = OTHER; note = 2'-O-methyl ribonucleotide
  modified_base 35: mod_base = OTHER; note = 2'-O-methyl ribonucleotide
  modified_base 36: mod_base = OTHER; note = 2'-O-methyl ribonucleotide
  modified_base 37: mod_base = OTHER; note = 2'-O-methyl ribonucleotide
  modified_base 38: mod_base = OTHER; note = 2'-O-methyl ribonucleotide
  modified_base 39: mod_base = OTHER; note = 2'-O-methyl ribonucleotide
  modified_base 40: mod_base = OTHER; note = 2'-O-methyl ribonucleotide
  modified_base 41: mod_base = OTHER; note = 2'-O-methyl ribonucleotide
  modified_base 42: mod_base = OTHER; note = 2'-O-methyl ribonucleotide
  modified_base 46: mod_base = OTHER; note = 2'-O-methyl ribonucleotide
  modified_base 48: mod_base = OTHER; note = 2'-O-methyl ribonucleotide
  modified_base 50: mod_base = OTHER; note = 2'-O-methyl ribonucleotide
  modified_base 52: mod_base = OTHER; note = 2'-O-methyl ribonucleotide
  modified_base 53: mod_base = OTHER; note = 2'-O-methyl ribonucleotide
  modified_base 54: mod_base = OTHER; note = 2'-O-methyl ribonucleotide
  modified_base 57: mod_base = OTHER; note = 2'-O-methyl ribonucleotide
  modified_base 61: mod_base = OTHER; note = 2'-O-methyl ribonucleotide
  modified_base 66: mod_base = OTHER; note = 2'-O-methyl ribonucleotide
  modified_base 67: mod_base = OTHER; note = 2'-O-methyl ribonucleotide
  modified_base 70: mod_base = OTHER; note = 2'-O-methyl ribonucleotide
  modified_base 71: mod_base = OTHER; note = 2'-O-methyl ribonucleotide
  modified_base 72: mod_base = OTHER; note = 2'-O-methyl ribonucleotide
  modified_base 74: mod_base = OTHER; note = 2'-O-methyl ribonucleotide
  modified_base 75: mod_base = OTHER; note = 2'-O-methyl ribonucleotide
  modified_base 76: mod_base = OTHER; note = 2'-O-methyl ribonucleotide
  modified_base 77: mod_base = OTHER; note = 2'-O-methyl ribonucleotide
  modified_base 78: mod_base = OTHER; note = 2'-O-methyl ribonucleotide
  modified_base 79: mod_base = OTHER; note = 2'-O-methyl ribonucleotide
  modified_base 80: mod_base = OTHER; note = 2'-O-methyl ribonucleotide
  modified_base 82: mod_base = OTHER; note = 2'-O-methyl ribonucleotide
  modified_base 83: mod_base = OTHER; note = 2'-O-methyl ribonucleotide
  modified_base 84: mod_base = OTHER; note = 2'-O-methyl ribonucleotide
  modified_base 85: mod_base = OTHER; note = 2'-O-methyl ribonucleotide
  modified_base 86: mod_base = OTHER; note = 2'-O-methyl ribonucleotide
  modified_base 87: mod_base = OTHER; note = 2'-O-methyl ribonucleotide
  modified_base 89: mod_base = OTHER; note = 2'-O-methyl ribonucleotide
  modified_base 92: mod_base = OTHER; note = 2'-O-methyl ribonucleotide
  modified_base 93: mod_base = OTHER; note = 2'-O-methyl ribonucleotide
  modified_base 94: mod_base = OTHER; note = 2'-O-methyl ribonucleotide
  modified_base 95: mod_base = OTHER; note = 2'-O-methyl ribonucleotide
  modified_base 96: mod_base = OTHER; note = 2'-O-methyl ribonucleotide
  modified_base 97: mod_base = OTHER; note = 2'-O-methyl ribonucleotide
  modified_base 98: mod_base = OTHER; note = 2'-O-methyl ribonucleotide
  modified_base 99: mod_base = OTHER; note = 2'-O-methyl ribonucleotide
  modified_base 100: mod_base = OTHER; note = 2'-O-methyl ribonucleotide
  modified_base 1..4: mod_base = OTHER; note = phosphorothioate linkage
  modified_base 98..100: mod_base = OTHER; note = phosphorothioate linkage

SEQ ID NO: 1749 - RNA, 103 nt, synthetic construct; identical to SEQ ID NO: 1700
  source 1..103: mol_type = other RNA
  modified_base 1: mod_base = OTHER; note = 2'-O-methyl ribonucleotide
  modified_base 2: mod_base = OTHER; note = 2'-O-methyl ribonucleotide
  modified_base 3: mod_base = OTHER; note = 2'-O-methyl ribonucleotide
  modified_base 21: mod_base = OTHER; note = 2'-O-methyl ribonucleotide
  modified_base 28: mod_base = OTHER; note = 2'-O-methyl ribonucleotide
  modified_base 29: mod_base = OTHER; note = 2'-O-methyl ribonucleotide
  modified_base 30: mod_base = OTHER; note = 2'-O-methyl ribonucleotide
  modified_base 31: mod_base = OTHER; note = 2'-O-methyl ribonucleotide
  modified_base 32: mod_base = OTHER; note = 2'-O-methyl ribonucleotide
  modified_base 33: mod_base = OTHER; note = 2'-O-methyl ribonucleotide
  modified_base 34: mod_base = OTHER; note = 2'-O-methyl ribonucleotide
  modified_base 35: mod_base = OTHER; note = 2'-O-methyl ribonucleotide
  modified_base 36: mod_base = OTHER; note = 2'-O-methyl ribonucleotide
  modified_base 37: mod_base = OTHER; note = 2'-O-methyl ribonucleotide
  modified_base 38: mod_base = OTHER; note = 2'-O-methyl ribonucleotide
  modified_base 39: mod_base = OTHER; note = 2'-O-methyl ribonucleotide
  modified_base 40: mod_base = OTHER; note = 2'-O-methyl ribonucleotide
  modified_base 41: mod_base = OTHER; note = 2'-O-methyl ribonucleotide
  modified_base 42: mod_base = OTHER; note = 2'-O-methyl ribonucleotide
  modified_base 46: mod_base = OTHER; note = 2'-O-methyl ribonucleotide
  modified_base 48: mod_base = OTHER; note = 2'-O-methyl ribonucleotide
  modified_base 50: mod_base = OTHER; note = 2'-O-methyl ribonucleotide
  modified_base 52: mod_base = OTHER; note = 2'-O-methyl ribonucleotide
  modified_base 53: mod_base = OTHER; note = 2'-O-methyl ribonucleotide
  modified_base 54: mod_base = OTHER; note = 2'-O-methyl ribonucleotide
  modified_base 55: mod_base = OTHER; note = 2'-O-methyl ribonucleotide
  modified_base 56: mod_base = OTHER; note = 2'-O-methyl ribonucleotide
  modified_base 57: mod_base = OTHER; note = 2'-O-methyl ribonucleotide
  modified_base 60: mod_base = OTHER; note = 2'-O-methyl ribonucleotide
  modified_base 61: mod_base = OTHER; note = 2'-O-methyl ribonucleotide
  modified_base 66: mod_base = OTHER; note = 2'-O-methyl ribonucleotide
  modified_base 67: mod_base = OTHER; note = 2'-O-methyl ribonucleotide
  modified_base 70: mod_base = OTHER; note = 2'-O-methyl ribonucleotide
  modified_base 71: mod_base = OTHER; note = 2'-O-methyl ribonucleotide
  modified_base 72: mod_base = OTHER; note = 2'-O-methyl ribonucleotide
  modified_base 73: mod_base = OTHER; note = 2'-O-methyl ribonucleotide
  modified_base 74: mod_base = OTHER; note = 2'-O-methyl ribonucleotide
  modified_base 75: mod_base = OTHER; note = 2'-O-methyl ribonucleotide
  modified_base 76: mod_base = OTHER; note = 2'-O-methyl ribonucleotide
  modified_base 77: mod_base = OTHER; note = 2'-O-methyl ribonucleotide
  modified_base 78: mod_base = OTHER; note = 2'-O-methyl ribonucleotide
  modified_base 79: mod_base = OTHER; note = 2'-O-methyl ribonucleotide
  modified_base 80: mod_base = OTHER; note = 2'-O-methyl ribonucleotide
  modified_base 81: mod_base = OTHER; note = 2'-O-methyl ribonucleotide
  modified_base 83: mod_base = OTHER; note = 2'-O-methyl ribonucleotide
  modified_base 84: mod_base = OTHER; note = 2'-O-methyl ribonucleotide
  modified_base 85: mod_base = OTHER; note = 2'-O-methyl ribonucleotide
  modified_base 86: mod_base = OTHER; note = 2'-O-methyl ribonucleotide
  modified_base 87: mod_base = OTHER; note = 2'-O-methyl ribonucleotide
  modified_base 88: mod_base = OTHER; note = 2'-O-methyl ribonucleotide
  modified_base 89: mod_base = OTHER; note = 2'-O-methyl ribonucleotide
  modified_base 90: mod_base = OTHER; note = 2'-O-methyl ribonucleotide
  modified_base 91: mod_base = OTHER; note = 2'-O-methyl ribonucleotide
  modified_base 92: mod_base = OTHER; note = 2'-O-methyl ribonucleotide
  modified_base 93: mod_base = OTHER; note = 2'-O-methyl ribonucleotide
  modified_base 94: mod_base = OTHER; note = 2'-O-methyl ribonucleotide
  modified_base 95: mod_base = OTHER; note = 2'-O-methyl ribonucleotide
  modified_base 96: mod_base = OTHER; note = 2'-O-methyl ribonucleotide
  modified_base 97: mod_base = OTHER; note = 2'-O-methyl ribonucleotide
  modified_base 98: mod_base = OTHER; note = 2'-O-methyl ribonucleotide
  modified_base 99: mod_base = OTHER; note = 2'-O-methyl ribonucleotide
  modified_base 100: mod_base = OTHER; note = 2'-O-methyl ribonucleotide
  modified_base 1..4: mod_base = OTHER; note = phosphorothioate linkage
  modified_base 98..100: mod_base = OTHER; note = phosphorothioate linkage

SEQ ID NO: 1750 - RNA, 103 nt, synthetic construct; identical to SEQ ID NO: 1699
  source 1..103: mol_type = other RNA
  modified_base 1: mod_base = OTHER; note = 2'-O-methyl ribonucleotide
  modified_base 2: mod_base = OTHER; note = 2'-O-methyl ribonucleotide
  modified_base 3: mod_base = OTHER; note = 2'-O-methyl ribonucleotide
  modified_base 21: mod_base = OTHER; note = 2'-O-methyl ribonucleotide
  modified_base 28: mod_base = OTHER; note = 2'-O-methyl ribonucleotide
  modified_base 29: mod_base = OTHER; note = 2'-O-methyl ribonucleotide
  modified_base 30: mod_base = OTHER; note = 2'-O-methyl ribonucleotide
  modified_base 31: mod_base = OTHER; note = 2'-O-methyl ribonucleotide
  modified_base 32: mod_base = OTHER; note = 2'-O-methyl ribonucleotide
  modified_base 34: mod_base = OTHER; note = 2'-O-methyl ribonucleotide
  modified_base 35: mod_base = OTHER; note = 2'-O-methyl ribonucleotide
  modified_base 36: mod_base = OTHER; note = 2'-O-methyl ribonucleotide
  modified_base 37: mod_base = OTHER; note = 2'-O-methyl ribonucleotide
  modified_base 38: mod_base = OTHER; note = 2'-O-methyl ribonucleotide
  modified_base 39: mod_base = OTHER; note = 2'-O-methyl ribonucleotide
  modified_base 40: mod_base = OTHER; note = 2'-O-methyl ribonucleotide
  modified_base 41: mod_base = OTHER; note = 2'-O-methyl ribonucleotide
  modified_base 42: mod_base = OTHER; note = 2'-O-methyl ribonucleotide
  modified_base 46: mod_base = OTHER; note = 2'-O-methyl ribonucleotide
  modified_base 48: mod_base = OTHER; note = 2'-O-methyl ribonucleotide
  modified_base 50: mod_base = OTHER; note = 2'-O-methyl ribonucleotide
  modified_base 52: mod_base = OTHER; note = 2'-O-methyl ribonucleotide
  modified_base 53: mod_base = OTHER; note = 2'-O-methyl ribonucleotide
  modified_base 54: mod_base = OTHER; note = 2'-O-methyl ribonucleotide
  modified_base 57: mod_base = OTHER; note = 2'-O-methyl ribonucleotide
  modified_base 61: mod_base = OTHER; note = 2'-O-methyl ribonucleotide
  modified_base 66: mod_base = OTHER; note = 2'-O-methyl ribonucleotide
  modified_base 67: mod_base = OTHER; note = 2'-O-methyl ribonucleotide
  modified_base 70: mod_base = OTHER; note = 2'-O-methyl ribonucleotide
  modified_base 71: mod_base = OTHER; note = 2'-O-methyl ribonucleotide
  modified_base 72: mod_base = OTHER; note = 2'-O-methyl ribonucleotide
  modified_base 74: mod_base = OTHER; note = 2'-O-methyl ribonucleotide
  modified_base 75: mod_base = OTHER; note = 2'-O-methyl ribonucleotide
  modified_base 76: mod_base = OTHER; note = 2'-O-methyl ribonucleotide
  modified_base 77: mod_base = OTHER; note = 2'-O-methyl ribonucleotide
  modified_base 78: mod_base = OTHER; note = 2'-O-methyl ribonucleotide
  modified_base 79: mod_base = OTHER; note = 2'-O-methyl ribonucleotide
  modified_base 80: mod_base = OTHER; note = 2'-O-methyl ribonucleotide
  modified_base 82: mod_base = OTHER; note = 2'-O-methyl ribonucleotide
  modified_base 83: mod_base = OTHER; note = 2'-O-methyl ribonucleotide
  modified_base 84: mod_base = OTHER; note = 2'-O-methyl ribonucleotide
  modified_base 85: mod_base = OTHER; note = 2'-O-methyl ribonucleotide
  modified_base 86: mod_base = OTHER; note = 2'-O-methyl ribonucleotide
  modified_base 87: mod_base = OTHER; note = 2'-O-methyl ribonucleotide
  modified_base 89: mod_base = OTHER; note = 2'-O-methyl ribonucleotide
  modified_base 92: mod_base = OTHER; note = 2'-O-methyl ribonucleotide
  modified_base 93: mod_base = OTHER; note = 2'-O-methyl ribonucleotide
  modified_base 94: mod_base = OTHER; note = 2'-O-methyl ribonucleotide
  modified_base 95: mod_base = OTHER; note = 2'-O-methyl ribonucleotide
  modified_base 96: mod_base = OTHER; note = 2'-O-methyl ribonucleotide
  modified_base 97: mod_base = OTHER; note = 2'-O-methyl ribonucleotide
  modified_base 98: mod_base = OTHER; note = 2'-O-methyl ribonucleotide
  modified_base 99: mod_base = OTHER; note = 2'-O-methyl ribonucleotide
  modified_base 100: mod_base = OTHER; note = 2'-O-methyl ribonucleotide
  modified_base 1..4: mod_base = OTHER; note = phosphorothioate linkage
  modified_base 98..100: mod_base = OTHER; note = phosphorothioate linkage

SEQ ID NO: 1751 - RNA, 103 nt, synthetic construct; identical to SEQ ID NO: 1699
  source 1..103: mol_type = other RNA
  modified_base 1: mod_base = OTHER; note = 2'-O-methyl ribonucleotide
  modified_base 2: mod_base = OTHER; note = 2'-O-methyl ribonucleotide
  modified_base 3: mod_base = OTHER; note = 2'-O-methyl ribonucleotide
  modified_base 21: mod_base = OTHER; note = 2'-O-methyl ribonucleotide
  modified_base 28: mod_base = OTHER; note = 2'-O-methyl ribonucleotide
  modified_base 29: mod_base = OTHER; note = 2'-O-methyl ribonucleotide
  modified_base 30: mod_base = OTHER; note = 2'-O-methyl ribonucleotide
  modified_base 31: mod_base = OTHER; note = 2'-O-methyl ribonucleotide
  modified_base 32: mod_base = OTHER; note = 2'-O-methyl ribonucleotide
  modified_base 34: mod_base = OTHER; note = 2'-O-methyl ribonucleotide
  modified_base 35: mod_base = OTHER; note = 2'-O-methyl ribonucleotide
  modified_base 36: mod_base = OTHER; note = 2'-O-methyl ribonucleotide
  modified_base 37: mod_base = OTHER; note = 2'-O-methyl ribonucleotide
  modified_base 38: mod_base = OTHER; note = 2'-O-methyl ribonucleotide
  modified_base 39: mod_base = OTHER; note = 2'-O-methyl ribonucleotide
  modified_base 40: mod_base = OTHER; note = 2'-O-methyl ribonucleotide
  modified_base 41: mod_base = OTHER; note = 2'-O-methyl ribonucleotide
  modified_base 42: mod_base = OTHER; note = 2'-O-methyl ribonucleotide
  modified_base 46: mod_base = OTHER; note = 2'-O-methyl ribonucleotide
  modified_base 48: mod_base = OTHER; note = 2'-O-methyl ribonucleotide
  modified_base 50: mod_base = OTHER; note = 2'-O-methyl ribonucleotide
  modified_base 52: mod_base = OTHER; note = 2'-O-methyl ribonucleotide
  modified_base 53: mod_base = OTHER; note = 2'-O-methyl ribonucleotide
  modified_base 54: mod_base = OTHER; note = 2'-O-methyl ribonucleotide
  modified_base 57: mod_base = OTHER; note = 2'-O-methyl ribonucleotide
  modified_base 61: mod_base = OTHER; note = 2'-O-methyl ribonucleotide
  modified_base 66: mod_base = OTHER; note = 2'-O-methyl ribonucleotide
  modified_base 67: mod_base = OTHER; note = 2'-O-methyl ribonucleotide
  modified_base 70: mod_base = OTHER; note = 2'-O-methyl ribonucleotide
  modified_base 71: mod_base = OTHER; note = 2'-O-methyl ribonucleotide
  modified_base 72: mod_base = OTHER; note = 2'-O-methyl ribonucleotide
  modified_base 74: mod_base = OTHER; note = 2'-O-methyl ribonucleotide
  modified_base 75: mod_base = OTHER; note = 2'-O-methyl ribonucleotide
  modified_base 76: mod_base = OTHER; note = 2'-O-methyl ribonucleotide
  modified_base 77: mod_base = OTHER; note = 2'-O-methyl ribonucleotide
  modified_base 78: mod_base = OTHER; note = 2'-O-methyl ribonucleotide
  modified_base 79: mod_base = OTHER; note = 2'-O-methyl ribonucleotide
  modified_base 80: mod_base = OTHER; note = 2'-O-methyl ribonucleotide
  modified_base 82: mod_base = OTHER; note = 2'-O-methyl ribonucleotide
  modified_base 83: mod_base = OTHER; note = 2'-O-methyl ribonucleotide
  modified_base 84: mod_base = OTHER; note = 2'-O-methyl ribonucleotide
  modified_base 85: mod_base = OTHER; note = 2'-O-methyl ribonucleotide
  modified_base 86: mod_base = OTHER; note = 2'-O-methyl ribonucleotide
  modified_base 87: mod_base = OTHER; note = 2'-O-methyl ribonucleotide
  modified_base 89: mod_base = OTHER; note = 2'-O-methyl ribonucleotide
  modified_base 92: mod_base = OTHER; note = 2'-O-methyl ribonucleotide
  modified_base 93: mod_base = OTHER; note = 2'-O-methyl ribonucleotide
  modified_base 94: mod_base = OTHER; note = 2'-O-methyl ribonucleotide
  modified_base 95: mod_base = OTHER; note = 2'-O-methyl ribonucleotide
  modified_base 96: mod_base = OTHER; note = 2'-O-methyl ribonucleotide
  modified_base 97: mod_base = OTHER; note = 2'-O-methyl ribonucleotide
  modified_base 98: mod_base = OTHER; note = 2'-O-methyl ribonucleotide
  modified_base 99: mod_base = OTHER; note = 2'-O-methyl ribonucleotide
  modified_base 100: mod_base = OTHER; note = 2'-O-methyl ribonucleotide
  modified_base 1..4: mod_base = OTHER; note = phosphorothioate linkage
  modified_base 64..65: mod_base = OTHER; note = phosphorothioate linkage
  modified_base 98..100: mod_base = OTHER; note = phosphorothioate linkage

SEQ ID NO: 1752 - RNA, 103 nt, synthetic construct; identical to SEQ ID NO: 1700
  source 1..103: mol_type = other RNA
  modified_base 1: mod_base = OTHER; note = 2'-O-methyl ribonucleotide
  modified_base 2: mod_base = OTHER; note = 2'-O-methyl ribonucleotide
  modified_base 3: mod_base = OTHER; note = 2'-O-methyl ribonucleotide
  modified_base 21: mod_base = OTHER; note = 2'-O-methyl ribonucleotide
  modified_base 28: mod_base = OTHER; note = 2'-O-methyl ribonucleotide
  modified_base 29: mod_base = OTHER; note = 2'-O-methyl ribonucleotide
  modified_base 30: mod_base = OTHER; note = 2'-O-methyl ribonucleotide
  modified_base 31: mod_base = OTHER; note = 2'-O-methyl ribonucleotide
  modified_base 32: mod_base = OTHER; note = 2'-O-methyl ribonucleotide
  modified_base 34: mod_base = OTHER; note = 2'-O-methyl ribonucleotide
  modified_base 35: mod_base = OTHER; note = 2'-O-methyl ribonucleotide
  modified_base 36: mod_base = OTHER; note = 2'-O-methyl ribonucleotide
  modified_base 37: mod_base = OTHER; note = 2'-O-methyl ribonucleotide
  modified_base 38: mod_base = OTHER; note = 2'-O-methyl ribonucleotide
  modified_base 39: mod_base = OTHER; note = 2'-O-methyl ribonucleotide
  modified_base 40: mod_base = OTHER; note = 2'-O-methyl ribonucleotide
  modified_base 41: mod_base = OTHER; note = 2'-O-methyl ribonucleotide
  modified_base 42: mod_base = OTHER; note = 2'-O-methyl ribonucleotide
  modified_base 46: mod_base = OTHER; note = 2'-O-methyl ribonucleotide
  modified_base 48: mod_base = OTHER; note = 2'-O-methyl ribonucleotide
  modified_base 50: mod_base = OTHER; note = 2'-O-methyl ribonucleotide
  modified_base 52: mod_base = OTHER; note = 2'-O-methyl ribonucleotide
  modified_base 53: mod_base = OTHER; note = 2'-O-methyl ribonucleotide
  modified_base 54: mod_base = OTHER; note = 2'-O-methyl ribonucleotide
  modified_base 55: mod_base = OTHER; note = 2'-O-methyl ribonucleotide
  modified_base 56: mod_base = OTHER; note = 2'-O-methyl ribonucleotide
  modified_base 57: mod_base = OTHER; note = 2'-O-methyl ribonucleotide
  modified_base 60: mod_base = OTHER; note = 2'-O-methyl ribonucleotide
  modified_base 61: mod_base = OTHER; note = 2'-O-methyl ribonucleotide
  modified_base 66: mod_base = OTHER; note = 2'-O-methyl ribonucleotide
  modified_base 67: mod_base = OTHER; note = 2'-O-methyl ribonucleotide
  modified_base 70: mod_base = OTHER; note = 2'-O-methyl ribonucleotide
  modified_base 71: mod_base = OTHER; note = 2'-O-methyl ribonucleotide
  modified_base 72: mod_base = OTHER; note = 2'-O-methyl ribonucleotide
  modified_base 74: mod_base = OTHER; note = 2'-O-methyl ribonucleotide
  modified_base 75: mod_base = OTHER; note = 2'-O-methyl ribonucleotide
  modified_base 76: mod_base = OTHER; note = 2'-O-methyl ribonucleotide
  modified_base 77: mod_base = OTHER; note = 2'-O-methyl ribonucleotide
  modified_base 78: mod_base = OTHER; note = 2'-O-methyl ribonucleotide
  modified_base 79: mod_base = OTHER; note = 2'-O-methyl ribonucleotide
  modified_base 80: mod_base = OTHER; note = 2'-O-methyl ribonucleotide
  modified_base 81: mod_base = OTHER; note = 2'-O-methyl ribonucleotide
  modified_base 83: mod_base = OTHER; note = 2'-O-methyl ribonucleotide
  modified_base 84: mod_base = OTHER; note = 2'-O-methyl ribonucleotide
  modified_base 85: mod_base = OTHER; note = 2'-O-methyl ribonucleotide
  modified_base 86: mod_base = OTHER; note = 2'-O-methyl ribonucleotide
  modified_base 87: mod_base = OTHER; note = 2'-O-methyl ribonucleotide
  modified_base 88: mod_base = OTHER; note = 2'-O-methyl ribonucleotide
  modified_base 89: mod_base = OTHER; note = 2'-O-methyl ribonucleotide
  modified_base 90: mod_base = OTHER; note = 2'-O-methyl ribonucleotide
  modified_base 91: mod_base = OTHER; note = 2'-O-methyl ribonucleotide
  modified_base 92: mod_base = OTHER; note = 2'-O-methyl ribonucleotide
  modified_base 93: mod_base = OTHER; note = 2'-O-methyl ribonucleotide
  modified_base 94: mod_base = OTHER; note = 2'-O-methyl ribonucleotide
  modified_base 95: mod_base = OTHER; note = 2'-O-methyl ribonucleotide
  modified_base 96: mod_base = OTHER; note = 2'-O-methyl ribonucleotide
  modified_base 97: mod_base = OTHER; note = 2'-O-methyl ribonucleotide
  modified_base 98: mod_base = OTHER; note = 2'-O-methyl ribonucleotide
  modified_base 99: mod_base = OTHER; note = 2'-O-methyl ribonucleotide
  modified_base 100: mod_base = OTHER; note = 2'-O-methyl ribonucleotide
  modified_base 1..4: mod_base = OTHER; note = phosphorothioate linkage
  modified_base 64..65: mod_base = OTHER; note = phosphorothioate linkage
  modified_base 98..100: mod_base = OTHER; note = phosphorothioate linkage

SEQ ID NO: 1753 - RNA, 103 nt, synthetic construct; identical to SEQ ID NO: 1699
  source 1..103: mol_type = other RNA
  modified_base 1: mod_base = OTHER; note = 2'-O-methyl ribonucleotide
  modified_base 2: mod_base = OTHER; note = 2'-O-methyl ribonucleotide
  modified_base 3: mod_base = OTHER; note = 2'-O-methyl ribonucleotide
  modified_base 21: mod_base = OTHER; note = 2'-O-methyl ribonucleotide
  modified_base 28: mod_base = OTHER; note = 2'-O-methyl ribonucleotide
  modified_base 29: mod_base = OTHER; note = 2'-O-methyl ribonucleotide
  modified_base 30: mod_base = OTHER; note = 2'-O-methyl ribonucleotide
  modified_base 31: mod_base = OTHER; note = 2'-O-methyl ribonucleotide
  modified_base 32: mod_base = OTHER; note = 2'-O-methyl ribonucleotide
  modified_base 34: mod_base = OTHER; note = 2'-O-methyl ribonucleotide
  modified_base 35: mod_base = OTHER; note = 2'-O-methyl ribonucleotide
  modified_base 36: mod_base = OTHER; note = 2'-O-methyl ribonucleotide
  modified_base 37: mod_base = OTHER; note = 2'-O-methyl ribonucleotide
  modified_base 38: mod_base = OTHER; note = 2'-O-methyl ribonucleotide
  modified_base 39: mod_base = OTHER; note = 2'-O-methyl ribonucleotide
  modified_base 40: mod_base = OTHER; note = 2'-O-methyl ribonucleotide
  modified_base 41: mod_base = OTHER; note = 2'-O-methyl ribonucleotide
  modified_base 42: mod_base = OTHER; note = 2'-O-methyl ribonucleotide
  modified_base 46: mod_base = OTHER; note = 2'-O-methyl ribonucleotide
  modified_base 48: mod_base = OTHER; note = 2'-O-methyl ribonucleotide
  modified_base 50: mod_base = OTHER; note = 2'-O-methyl ribonucleotide
  modified_base 52: mod_base = OTHER; note = 2'-O-methyl ribonucleotide
  modified_base 53: mod_base = OTHER; note = 2'-O-methyl ribonucleotide
  modified_base 54: mod_base = OTHER; note = 2'-O-methyl ribonucleotide
  modified_base 57: mod_base = OTHER; note = 2'-O-methyl ribonucleotide
  modified_base 61: mod_base = OTHER; note = 2'-O-methyl ribonucleotide
  modified_base 66: mod_base = OTHER; note = 2'-O-methyl ribonucleotide
  modified_base 67: mod_base = OTHER; note = 2'-O-methyl ribonucleotide
  modified_base 70: mod_base = OTHER; note = 2'-O-methyl ribonucleotide
  modified_base 71: mod_base = OTHER; note = 2'-O-methyl ribonucleotide
  modified_base 72: mod_base = OTHER; note = 2'-O-methyl ribonucleotide
  modified_base 74: mod_base = OTHER; note = 2'-O-methyl ribonucleotide
  modified_base 75: mod_base = OTHER; note = 2'-O-methyl ribonucleotide
  modified_base 76: mod_base = OTHER; note = 2'-O-methyl ribonucleotide
  modified_base 77: mod_base = OTHER; note = 2'-O-methyl ribonucleotide
  modified_base 78: mod_base = OTHER; note = 2'-O-methyl ribonucleotide
  modified_base 79: mod_base = OTHER; note = 2'-O-methyl ribonucleotide
  modified_base 80: mod_base = OTHER; note = 2'-O-methyl ribonucleotide
  modified_base 82: mod_base = OTHER; note = 2'-O-methyl ribonucleotide
  modified_base 83: mod_base = OTHER; note = 2'-O-methyl ribonucleotide
  modified_base 84: mod_base = OTHER; note = 2'-O-methyl ribonucleotide
  modified_base 85: mod_base = OTHER; note = 2'-O-methyl ribonucleotide
  modified_base 86: mod_base = OTHER; note = 2'-O-methyl ribonucleotide
  modified_base 87: mod_base = OTHER; note = 2'-O-methyl ribonucleotide
  modified_base 89: mod_base = OTHER; note = 2'-O-methyl ribonucleotide
  modified_base 92: mod_base = OTHER; note = 2'-O-methyl ribonucleotide
  modified_base 93: mod_base = OTHER; note = 2'-O-methyl ribonucleotide
  modified_base 94: mod_base = OTHER; note = 2'-O-methyl ribonucleotide
  modified_base 95: mod_base = OTHER; note = 2'-O-methyl ribonucleotide
  modified_base 96: mod_base = OTHER; note = 2'-O-methyl ribonucleotide
  modified_base 97: mod_base = OTHER; note = 2'-O-methyl ribonucleotide
  modified_base 98: mod_base = OTHER; note = 2'-O-methyl ribonucleotide
  modified_base 99: mod_base = OTHER; note = 2'-O-methyl ribonucleotide
  modified_base 100: mod_base = OTHER; note = 2'-O-methyl ribonucleotide
  modified_base 1..4: mod_base = OTHER; note = phosphorothioate linkage
  modified_base 45..46: mod_base = OTHER; note = phosphorothioate linkage
  modified_base 98..100: mod_base = OTHER; note = phosphorothioate linkage

SEQ ID NO: 1754 - RNA, 103 nt, synthetic construct; identical to SEQ ID NO: 1700
  source 1..103: mol_type = other RNA
  modified_base 1: mod_base = OTHER; note = 2'-O-methyl ribonucleotide
  modified_base 2: mod_base = OTHER; note = 2'-O-methyl ribonucleotide
  modified_base 3: mod_base = OTHER; note = 2'-O-methyl ribonucleotide
  modified_base 21: mod_base = OTHER; note = 2'-O-methyl ribonucleotide
  modified_base 28: mod_base = OTHER; note = 2'-O-methyl ribonucleotide
  modified_base 29: mod_base = OTHER; note = 2'-O-methyl ribonucleotide
  modified_base 30: mod_base = OTHER; note = 2'-O-methyl ribonucleotide
  modified_base 31: mod_base = OTHER; note = 2'-O-methyl ribonucleotide
  modified_base 32: mod_base = OTHER; note = 2'-O-methyl ribonucleotide
  modified_base 34: mod_base = OTHER; note = 2'-O-methyl ribonucleotide
  modified_base 35: mod_base = OTHER; note = 2'-O-methyl ribonucleotide
  modified_base 36: mod_base = OTHER; note = 2'-O-methyl ribonucleotide
  modified_base 37: mod_base = OTHER; note = 2'-O-methyl ribonucleotide
  modified_base 38: mod_base = OTHER; note = 2'-O-methyl ribonucleotide
  modified_base 39: mod_base = OTHER; note = 2'-O-methyl ribonucleotide
  modified_base 40: mod_base = OTHER; note = 2'-O-methyl ribonucleotide
  modified_base 41: mod_base = OTHER; note = 2'-O-methyl ribonucleotide
  modified_base 42: mod_base = OTHER; note = 2'-O-methyl ribonucleotide
  modified_base 46: mod_base = OTHER; note = 2'-O-methyl ribonucleotide
  modified_base 48: mod_base = OTHER; note = 2'-O-methyl ribonucleotide
  modified_base 50: mod_base = OTHER; note = 2'-O-methyl ribonucleotide
  modified_base 52: mod_base = OTHER; note = 2'-O-methyl ribonucleotide
  modified_base 53: mod_base = OTHER; note = 2'-O-methyl ribonucleotide
  modified_base 54: mod_base = OTHER; note = 2'-O-methyl ribonucleotide
  modified_base 55: mod_base = OTHER; note = 2'-O-methyl ribonucleotide
  modified_base 56: mod_base = OTHER; note = 2'-O-methyl ribonucleotide
  modified_base 57: mod_base = OTHER; note = 2'-O-methyl ribonucleotide
  modified_base 60: mod_base = OTHER; note = 2'-O-methyl ribonucleotide
  modified_base 61: mod_base = OTHER; note = 2'-O-methyl ribonucleotide
  modified_base 66: mod_base = OTHER; note = 2'-O-methyl ribonucleotide
  modified_base 67: mod_base = OTHER; note = 2'-O-methyl ribonucleotide
  modified_base 70: mod_base = OTHER; note = 2'-O-methyl ribonucleotide
  modified_base 71: mod_base = OTHER; note = 2'-O-methyl ribonucleotide
  modified_base 72: mod_base = OTHER; note = 2'-O-methyl ribonucleotide
  modified_base 74: mod_base = OTHER; note = 2'-O-methyl ribonucleotide
  modified_base 75: mod_base = OTHER; note = 2'-O-methyl ribonucleotide
  modified_base 76: mod_base = OTHER; note = 2'-O-methyl ribonucleotide
  modified_base 77: mod_base = OTHER; note = 2'-O-methyl ribonucleotide
  modified_base 78: mod_base = OTHER; note = 2'-O-methyl ribonucleotide
  modified_base 79: mod_base = OTHER; note = 2'-O-methyl ribonucleotide
  modified_base 80: mod_base = OTHER; note = 2'-O-methyl ribonucleotide
  modified_base 81: mod_base = OTHER; note = 2'-O-methyl ribonucleotide
  modified_base 83: mod_base = OTHER; note = 2'-O-methyl ribonucleotide
  modified_base 84: mod_base = OTHER; note = 2'-O-methyl ribonucleotide
  modified_base 85: mod_base = OTHER; note = 2'-O-methyl ribonucleotide
  modified_base 86: mod_base = OTHER; note = 2'-O-methyl ribonucleotide
  modified_base 87: mod_base = OTHER; note = 2'-O-methyl ribonucleotide
  modified_base 88: mod_base = OTHER; note = 2'-O-methyl ribonucleotide
  modified_base 89: mod_base = OTHER; note = 2'-O-methyl ribonucleotide
  modified_base 90: mod_base = OTHER; note = 2'-O-methyl ribonucleotide
  modified_base 91: mod_base = OTHER; note = 2'-O-methyl ribonucleotide
  modified_base 92: mod_base = OTHER; note = 2'-O-methyl ribonucleotide
  modified_base 93: mod_base = OTHER; note = 2'-O-methyl ribonucleotide
  modified_base 94: mod_base = OTHER; note = 2'-O-methyl ribonucleotide
  modified_base 95: mod_base = OTHER; note = 2'-O-methyl ribonucleotide
  modified_base 96: mod_base = OTHER; note = 2'-O-methyl ribonucleotide
  modified_base 97: mod_base = OTHER; note = 2'-O-methyl ribonucleotide
  modified_base 98: mod_base = OTHER; note = 2'-O-methyl ribonucleotide
  modified_base 99: mod_base = OTHER; note = 2'-O-methyl ribonucleotide
  modified_base 100: mod_base = OTHER; note = 2'-O-methyl ribonucleotide
  modified_base 1..4: mod_base = OTHER; note = phosphorothioate linkage
  modified_base 45..46: mod_base = OTHER; note = phosphorothioate linkage
  modified_base 98..100: mod_base = OTHER; note = phosphorothioate linkage

SEQ ID NO: 1755 - RNA, 103 nt, synthetic construct; identical to SEQ ID NO: 1643
  source 1..103: mol_type = other RNA
  modified_base 1: mod_base = OTHER; note = 2'-O-methyl ribonucleotide
  modified_base 2: mod_base = OTHER; note = 2'-O-methyl ribonucleotide
  modified_base 3: mod_base = OTHER; note = 2'-O-methyl ribonucleotide
  modified_base 21: mod_base = OTHER; note = 2'-O-methyl ribonucleotide
  modified_base 28: mod_base = OTHER; note = 2'-O-methyl ribonucleotide
  modified_base 29: mod_base = OTHER; note = 2'-O-methyl ribonucleotide
  modified_base 30: mod_base = OTHER; note = 2'-O-methyl ribonucleotide
  modified_base 31: mod_base = OTHER; note = 2'-O-methyl ribonucleotide
  modified_base 32: mod_base = OTHER; note = 2'-O-methyl ribonucleotide
  modified_base 34: mod_base = OTHER; note = 2'-O-methyl ribonucleotide
  modified_base 35: mod_base = OTHER; note = 2'-O-methyl ribonucleotide
  modified_base 36: mod_base = OTHER; note = 2'-O-methyl ribonucleotide
  modified_base 37: mod_base = OTHER; note = 2'-O-methyl ribonucleotide
  modified_base 38: mod_base = OTHER; note = 2'-O-methyl ribonucleotide
  modified_base 39: mod_base = OTHER; note = 2'-O-methyl ribonucleotide
  modified_base 40: mod_base = OTHER; note = 2'-O-methyl ribonucleotide
  modified_base 41: mod_base = OTHER; note = 2'-O-methyl ribonucleotide
  modified_base 42: mod_base = OTHER; note = 2'-O-methyl ribonucleotide
  modified_base 46: mod_base = OTHER; note = 2'-O-methyl ribonucleotide
  modified_base 48: mod_base = OTHER; note = 2'-O-methyl ribonucleotide
  modified_base 50: mod_base = OTHER; note = 2'-O-methyl ribonucleotide
  modified_base 52: mod_base = OTHER; note = 2'-O-methyl ribonucleotide
  modified_base 53: mod_base = OTHER; note = 2'-O-methyl ribonucleotide
  modified_base 54: mod_base = OTHER; note = 2'-O-methyl ribonucleotide
  modified_base 57: mod_base = OTHER; note = 2'-O-methyl ribonucleotide
  modified_base 61: mod_base = OTHER; note = 2'-O-methyl ribonucleotide
  modified_base 66: mod_base = OTHER; note = 2'-O-methyl ribonucleotide
  modified_base 67: mod_base = OTHER; note = 2'-O-methyl ribonucleotide
  modified_base 70: mod_base = OTHER; note = 2'-O-methyl ribonucleotide
  modified_base 71: mod_base = OTHER; note = 2'-O-methyl ribonucleotide
  modified_base 72: mod_base = OTHER; note = 2'-O-methyl ribonucleotide
  modified_base 74: mod_base = OTHER; note = 2'-O-methyl ribonucleotide
  modified_base 75: mod_base = OTHER; note = 2'-O-methyl ribonucleotide
  modified_base 76: mod_base = OTHER; note = 2'-O-methyl ribonucleotide
  modified_base 77: mod_base = OTHER; note = 2'-O-methyl ribonucleotide
  modified_base 78: mod_base = OTHER; note = 2'-O-methyl ribonucleotide
  modified_base 79: mod_base = OTHER; note = 2'-O-methyl ribonucleotide
  modified_base 80: mod_base = OTHER; note = 2'-O-methyl ribonucleotide
  modified_base 82: mod_base = OTHER; note = 2'-O-methyl ribonucleotide
  modified_base 83: mod_base = OTHER; note = 2'-O-methyl ribonucleotide
  modified_base 84: mod_base = OTHER; note = 2'-O-methyl ribonucleotide
  modified_base 85: mod_base = OTHER; note = 2'-O-methyl ribonucleotide
  modified_base 86: mod_base = OTHER; note = 2'-O-methyl ribonucleotide
  modified_base 87: mod_base = OTHER; note = 2'-O-methyl ribonucleotide
  modified_base 89: mod_base = OTHER; note = 2'-O-methyl ribonucleotide
  modified_base 92: mod_base = OTHER; note = 2'-O-methyl ribonucleotide
  modified_base 93: mod_base = OTHER; note = 2'-O-methyl ribonucleotide
  modified_base 94: mod_base = OTHER; note = 2'-O-methyl ribonucleotide
  modified_base 95: mod_base = OTHER; note = 2'-O-methyl ribonucleotide
  modified_base 96: mod_base = OTHER; note = 2'-O-methyl ribonucleotide
  modified_base 97: mod_base = OTHER; note = 2'-O-methyl ribonucleotide
  modified_base 98: mod_base = OTHER; note = 2'-O-methyl ribonucleotide
  modified_base 99: mod_base = OTHER; note = 2'-O-methyl ribonucleotide
  modified_base 100: mod_base = OTHER; note = 2'-O-methyl ribonucleotide
  modified_base 1..4: mod_base = OTHER; note = phosphorothioate linkage
  modified_base 25..26: mod_base = OTHER; note = phosphorothioate linkage
  modified_base 98..100: mod_base = OTHER; note = phosphorothioate linkage

SEQ ID NO: 1756 - RNA, 103 nt, synthetic construct; identical to SEQ ID NO: 1699
  source 1..103: mol_type = other RNA
  modified_base 1: mod_base = OTHER; note = 2'-O-methyl ribonucleotide
  modified_base 2: mod_base = OTHER; note = 2'-O-methyl ribonucleotide
  modified_base 3: mod_base = OTHER; note = 2'-O-methyl ribonucleotide
  modified_base 21: mod_base = OTHER; note = 2'-O-methyl ribonucleotide
  modified_base 28: mod_base = OTHER; note = 2'-O-methyl ribonucleotide
  modified_base 29: mod_base = OTHER; note = 2'-O-methyl ribonucleotide
  modified_base 30: mod_base = OTHER; note = 2'-O-methyl ribonucleotide
  modified_base 31: mod_base = OTHER; note = 2'-O-methyl ribonucleotide
  modified_base 32: mod_base = OTHER; note = 2'-O-methyl ribonucleotide
  modified_base 34: mod_base = OTHER; note = 2'-O-methyl ribonucleotide
  modified_base 35: mod_base = OTHER; note = 2'-O-methyl ribonucleotide
  modified_base 36: mod_base = OTHER; note = 2'-O-methyl ribonucleotide
  modified_base 37: mod_base = OTHER; note = 2'-O-methyl ribonucleotide
  modified_base 38: mod_base = OTHER; note = 2'-O-methyl ribonucleotide
  modified_base 39: mod_base = OTHER; note = 2'-O-methyl ribonucleotide
  modified_base 40: mod_base = OTHER; note = 2'-O-methyl ribonucleotide
  modified_base 41: mod_base = OTHER; note = 2'-O-methyl ribonucleotide
  modified_base 42: mod_base = OTHER; note = 2'-O-methyl ribonucleotide
  modified_base 46: mod_base = OTHER; note = 2'-O-methyl ribonucleotide
  modified_base 48: mod_base = OTHER; note = 2'-O-methyl ribonucleotide
  modified_base 50: mod_base = OTHER; note = 2'-O-methyl ribonucleotide
  modified_base 52: mod_base = OTHER; note = 2'-O-methyl ribonucleotide
  modified_base 53: mod_base = OTHER; note = 2'-O-methyl ribonucleotide
  modified_base 54: mod_base = OTHER; note = 2'-O-methyl ribonucleotide
  modified_base 57: mod_base = OTHER; note = 2'-O-methyl ribonucleotide
  modified_base 61: mod_base = OTHER; note = 2'-O-methyl ribonucleotide
  modified_base 66: mod_base = OTHER; note = 2'-O-methyl ribonucleotide
  modified_base 67: mod_base = OTHER; note = 2'-O-methyl ribonucleotide
  modified_base 70: mod_base = OTHER; note = 2'-O-methyl ribonucleotide
  modified_base 71: mod_base = OTHER; note = 2'-O-methyl ribonucleotide
  modified_base 72: mod_base = OTHER; note = 2'-O-methyl ribonucleotide
  modified_base 74: mod_base = OTHER; note = 2'-O-methyl ribonucleotide
  modified_base 75: mod_base = OTHER; note = 2'-O-methyl ribonucleotide
  modified_base 76: mod_base = OTHER; note = 2'-O-methyl ribonucleotide
  modified_base 77: mod_base = OTHER; note = 2'-O-methyl ribonucleotide
  modified_base 78: mod_base = OTHER; note = 2'-O-methyl ribonucleotide
  modified_base 79: mod_base = OTHER; note = 2'-O-methyl ribonucleotide
  modified_base 80: mod_base = OTHER; note = 2'-O-methyl ribonucleotide
  modified_base 82: mod_base = OTHER; note = 2'-O-methyl ribonucleotide
  modified_base 83: mod_base = OTHER; note = 2'-O-methyl ribonucleotide
  modified_base 84: mod_base = OTHER; note = 2'-O-methyl ribonucleotide
  modified_base 85: mod_base = OTHER; note = 2'-O-methyl ribonucleotide
  modified_base 86: mod_base = OTHER; note = 2'-O-methyl ribonucleotide
  modified_base 87: mod_base = OTHER; note = 2'-O-methyl ribonucleotide
  modified_base 89: mod_base = OTHER; note = 2'-O-methyl ribonucleotide
  modified_base 92: mod_base = OTHER; note = 2'-O-methyl ribonucleotide
  modified_base 93: mod_base = OTHER; note = 2'-O-methyl ribonucleotide
  modified_base 94: mod_base = OTHER; note = 2'-O-methyl ribonucleotide
  modified_base 95: mod_base = OTHER; note = 2'-O-methyl ribonucleotide
  modified_base 96: mod_base = OTHER; note = 2'-O-methyl ribonucleotide
  modified_base 97: mod_base = OTHER; note = 2'-O-methyl ribonucleotide
  modified_base 98: mod_base = OTHER; note = 2'-O-methyl ribonucleotide
  modified_base 99: mod_base = OTHER; note = 2'-O-methyl ribonucleotide
  modified_base 100: mod_base = OTHER; note = 2'-O-methyl ribonucleotide
  modified_base 1..4: mod_base = OTHER; note = phosphorothioate linkage
  modified_base 25..26: mod_base = OTHER; note = phosphorothioate linkage
  modified_base 98..100: mod_base = OTHER; note = phosphorothioate linkage

SEQ ID NO: 1757 - RNA, 103 nt, synthetic construct; identical to SEQ ID NO: 1700
  source 1..103: mol_type = other RNA
  modified_base 1: mod_base = OTHER; note = 2'-O-methyl ribonucleotide
  modified_base 2: mod_base = OTHER; note = 2'-O-methyl ribonucleotide
  modified_base 3: mod_base = OTHER; note = 2'-O-methyl ribonucleotide
  modified_base 21: mod_base = OTHER; note = 2'-O-methyl ribonucleotide
  modified_base 28: mod_base = OTHER; note = 2'-O-methyl ribonucleotide
  modified_base 29: mod_base = OTHER; note = 2'-O-methyl ribonucleotide
  modified_base 30: mod_base = OTHER; note = 2'-O-methyl ribonucleotide
  modified_base 31: mod_base = OTHER; note = 2'-O-methyl ribonucleotide
  modified_base 32: mod_base = OTHER; note = 2'-O-methyl ribonucleotide
  modified_base 34: mod_base = OTHER; note = 2'-O-methyl ribonucleotide
  modified_base 35: mod_base = OTHER; note = 2'-O-methyl ribonucleotide
  modified_base 36: mod_base = OTHER; note = 2'-O-methyl ribonucleotide
  modified_base 37: mod_base = OTHER; note = 2'-O-methyl ribonucleotide
  modified_base 38: mod_base = OTHER; note = 2'-O-methyl ribonucleotide
  modified_base 39: mod_base = OTHER; note = 2'-O-methyl ribonucleotide
  modified_base 40: mod_base = OTHER; note = 2'-O-methyl ribonucleotide
  modified_base 41: mod_base = OTHER; note = 2'-O-methyl ribonucleotide
  modified_base 42: mod_base = OTHER; note = 2'-O-methyl ribonucleotide
  modified_base 46: mod_base = OTHER; note = 2'-O-methyl ribonucleotide
  modified_base 48: mod_base = OTHER; note = 2'-O-methyl ribonucleotide
  modified_base 50: mod_base = OTHER; note = 2'-O-methyl ribonucleotide
  modified_base 52: mod_base = OTHER; note = 2'-O-methyl ribonucleotide
  modified_base 53: mod_base = OTHER; note = 2'-O-methyl ribonucleotide
  modified_base 54: mod_base = OTHER; note = 2'-O-methyl ribonucleotide
  modified_base 55: mod_base = OTHER; note = 2'-O-methyl ribonucleotide
  modified_base 56: mod_base = OTHER; note = 2'-O-methyl ribonucleotide
  modified_base 57: mod_base = OTHER; note = 2'-O-methyl ribonucleotide
  modified_base 60: mod_base = OTHER; note = 2'-O-methyl ribonucleotide
  modified_base 61: mod_base = OTHER; note = 2'-O-methyl ribonucleotide
  modified_base 66: mod_base = OTHER; note = 2'-O-methyl ribonucleotide
  modified_base 67: mod_base = OTHER; note = 2'-O-methyl ribonucleotide
  modified_base 70: mod_base = OTHER; note = 2'-O-methyl ribonucleotide
  modified_base 71: mod_base = OTHER; note = 2'-O-methyl ribonucleotide
  modified_base 72: mod_base = OTHER; note = 2'-O-methyl ribonucleotide
  modified_base 74: mod_base = OTHER; note = 2'-O-methyl ribonucleotide
  modified_base 75: mod_base = OTHER; note = 2'-O-methyl ribonucleotide
  modified_base 76: mod_base = OTHER; note = 2'-O-methyl ribonucleotide
  modified_base 77: mod_base = OTHER; note = 2'-O-methyl ribonucleotide
  modified_base 78: mod_base = OTHER; note = 2'-O-methyl ribonucleotide
  modified_base 79: mod_base = OTHER; note = 2'-O-methyl ribonucleotide
  modified_base 80: mod_base = OTHER; note = 2'-O-methyl ribonucleotide
  modified_base 81: mod_base = OTHER; note = 2'-O-methyl ribonucleotide
  modified_base 83: mod_base = OTHER; note = 2'-O-methyl ribonucleotide
  modified_base 84: mod_base = OTHER; note = 2'-O-methyl ribonucleotide
  modified_base 85: mod_base = OTHER; note = 2'-O-methyl ribonucleotide
  modified_base 86: mod_base = OTHER; note = 2'-O-methyl ribonucleotide
  modified_base 87: mod_base = OTHER; note = 2'-O-methyl ribonucleotide
  modified_base 88: mod_base = OTHER; note = 2'-O-methyl ribonucleotide
  modified_base 89: mod_base = OTHER; note = 2'-O-methyl ribonucleotide
  modified_base 90: mod_base = OTHER; note = 2'-O-methyl ribonucleotide
  modified_base 91: mod_base = OTHER; note = 2'-O-methyl ribonucleotide
  modified_base 92: mod_base = OTHER; note = 2'-O-methyl ribonucleotide
  modified_base 93: mod_base = OTHER; note = 2'-O-methyl ribonucleotide
  modified_base 94: mod_base = OTHER; note = 2'-O-methyl ribonucleotide
  modified_base 95: mod_base = OTHER; note = 2'-O-methyl ribonucleotide
  modified_base 96: mod_base = OTHER; note = 2'-O-methyl ribonucleotide
  modified_base 97: mod_base = OTHER; note = 2'-O-methyl ribonucleotide
  modified_base 98: mod_base = OTHER; note = 2'-O-methyl ribonucleotide
  modified_base 99: mod_base = OTHER; note = 2'-O-methyl ribonucleotide
  modified_base 100: mod_base = OTHER; note = 2'-O-methyl ribonucleotide
  modified_base 1..4: mod_base = OTHER; note = phosphorothioate linkage
  modified_base 25..26: mod_base = OTHER; note = phosphorothioate linkage
  modified_base 98..100: mod_base = OTHER; note = phosphorothioate linkage

SEQ ID NO: 1758 - RNA, 103 nt, synthetic construct; identical to SEQ ID NO: 1699
  source 1..103: mol_type = other RNA
  modified_base 1: mod_base = OTHER; note = 2'-O-methyl ribonucleotide
  modified_base 2: mod_base = OTHER; note = 2'-O-methyl ribonucleotide
  modified_base 3: mod_base = OTHER; note = 2'-O-methyl ribonucleotide
  modified_base 21: mod_base = OTHER; note = 2'-O-methyl ribonucleotide
  modified_base 28: mod_base = OTHER; note = 2'-O-methyl ribonucleotide
  modified_base 29: mod_base = OTHER; note = 2'-O-methyl ribonucleotide
  modified_base 30: mod_base = OTHER; note = 2'-O-methyl ribonucleotide
  modified_base 31: mod_base = OTHER; note = 2'-O-methyl ribonucleotide
  modified_base 32: mod_base = OTHER; note = 2'-O-methyl ribonucleotide
  modified_base 34: mod_base = OTHER; note = 2'-O-methyl ribonucleotide
  modified_base 35: mod_base = OTHER; note = 2'-O-methyl ribonucleotide
  modified_base 36: mod_base = OTHER; note = 2'-O-methyl ribonucleotide
  modified_base 37: mod_base = OTHER; note = 2'-O-methyl ribonucleotide
  modified_base 38: mod_base = OTHER; note = 2'-O-methyl ribonucleotide
  modified_base 39: mod_base = OTHER; note = 2'-O-methyl ribonucleotide
  modified_base 40: mod_base = OTHER; note = 2'-O-methyl ribonucleotide
  modified_base 41: mod_base = OTHER; note = 2'-O-methyl ribonucleotide
  modified_base 42: mod_base = OTHER; note = 2'-O-methyl ribonucleotide
  modified_base 46: mod_base = OTHER; note = 2'-O-methyl ribonucleotide
  modified_base 48: mod_base = OTHER; note = 2'-O-methyl ribonucleotide
  modified_base 50: mod_base = OTHER; note = 2'-O-methyl ribonucleotide
  modified_base 52: mod_base = OTHER; note = 2'-O-methyl ribonucleotide
  modified_base 53: mod_base = OTHER; note = 2'-O-methyl ribonucleotide
  modified_base 54: mod_base = OTHER; note = 2'-O-methyl ribonucleotide
  modified_base 57: mod_base = OTHER; note = 2'-O-methyl ribonucleotide
  modified_base 61: mod_base = OTHER; note = 2'-O-methyl ribonucleotide
  modified_base 66: mod_base = OTHER; note = 2'-O-methyl ribonucleotide
  modified_base 67: mod_base = OTHER; note = 2'-O-methyl ribonucleotide
  modified_base 70: mod_base = OTHER; note = 2'-O-methyl ribonucleotide
  modified_base 71: mod_base = OTHER; note = 2'-O-methyl ribonucleotide
  modified_base 72: mod_base = OTHER; note = 2'-O-methyl ribonucleotide
  modified_base 74: mod_base = OTHER; note = 2'-O-methyl ribonucleotide
  modified_base 75: mod_base = OTHER; note = 2'-O-methyl ribonucleotide
  modified_base 76: mod_base = OTHER; note = 2'-O-methyl ribonucleotide
  modified_base 77: mod_base = OTHER; note = 2'-O-methyl ribonucleotide
  modified_base 78: mod_base = OTHER; note = 2'-O-methyl ribonucleotide
  modified_base 79: mod_base = OTHER; note = 2'-O-methyl ribonucleotide
  modified_base 80: mod_base = OTHER; note = 2'-O-methyl ribonucleotide
  modified_base 82: mod_base = OTHER; note = 2'-O-methyl ribonucleotide
  modified_base 83: mod_base = OTHER; note = 2'-O-methyl ribonucleotide
  modified_base 84: mod_base = OTHER; note = 2'-O-methyl ribonucleotide
  modified_base 85: mod_base = OTHER; note = 2'-O-methyl ribonucleotide
  modified_base 86: mod_base = OTHER; note = 2'-O-methyl ribonucleotide
  modified_base 87: mod_base = OTHER; note = 2'-O-methyl ribonucleotide
  modified_base 89: mod_base = OTHER; note = 2'-O-methyl ribonucleotide
  modified_base 92: mod_base = OTHER; note = 2'-O-methyl ribonucleotide
  modified_base 93: mod_base = OTHER; note = 2'-O-methyl ribonucleotide
  modified_base 94: mod_base = OTHER; note = 2'-O-methyl ribonucleotide
  modified_base 95: mod_base = OTHER; note = 2'-O-methyl ribonucleotide
  modified_base 96: mod_base = OTHER; note = 2'-O-methyl ribonucleotide
  modified_base 97: mod_base = OTHER; note = 2'-O-methyl ribonucleotide
  modified_base 98: mod_base = OTHER; note = 2'-O-methyl ribonucleotide
  modified_base 99: mod_base = OTHER; note = 2'-O-methyl ribonucleotide
  modified_base 100: mod_base = OTHER; note = 2'-O-methyl ribonucleotide
  modified_base 1..4: mod_base = OTHER; note = phosphorothioate linkage
  modified_base 45..46: mod_base = OTHER; note = phosphorothioate linkage
  modified_base 64..65: mod_base = OTHER; note = phosphorothioate linkage
  modified_base 98..100: mod_base = OTHER; note = phosphorothioate linkage

SEQ ID NO: 1759 - RNA, 103 nt, synthetic construct; identical to SEQ ID NO: 1700
  source 1..103: mol_type = other RNA
  modified_base 1: mod_base = OTHER; note = 2'-O-methyl ribonucleotide
  modified_base 2: mod_base = OTHER; note = 2'-O-methyl ribonucleotide
  modified_base 3: mod_base = OTHER; note = 2'-O-methyl ribonucleotide
  modified_base 21: mod_base = OTHER; note = 2'-O-methyl ribonucleotide
  modified_base 28: mod_base = OTHER; note = 2'-O-methyl ribonucleotide
  modified_base 29: mod_base = OTHER; note = 2'-O-methyl ribonucleotide
  modified_base 30: mod_base = OTHER; note = 2'-O-methyl ribonucleotide
  modified_base 31: mod_base = OTHER; note = 2'-O-methyl ribonucleotide
  modified_base 32: mod_base = OTHER; note = 2'-O-methyl ribonucleotide
  modified_base 34: mod_base = OTHER; note = 2'-O-methyl ribonucleotide
  modified_base 35: mod_base = OTHER; note = 2'-O-methyl ribonucleotide
  modified_base 36: mod_base = OTHER; note = 2'-O-methyl ribonucleotide
  modified_base 37: mod_base = OTHER; note = 2'-O-methyl ribonucleotide
  modified_base 38: mod_base = OTHER; note = 2'-O-methyl ribonucleotide
  modified_base 39: mod_base = OTHER; note = 2'-O-methyl ribonucleotide
  modified_base 40: mod_base = OTHER; note = 2'-O-methyl ribonucleotide
  modified_base 41: mod_base = OTHER; note = 2'-O-methyl ribonucleotide
  modified_base 42: mod_base = OTHER; note = 2'-O-methyl ribonucleotide
  modified_base 46: mod_base = OTHER; note = 2'-O-methyl ribonucleotide
  modified_base 48: mod_base = OTHER; note = 2'-O-methyl ribonucleotide
  modified_base 50: mod_base = OTHER; note = 2'-O-methyl ribonucleotide
  modified_base 52: mod_base = OTHER; note = 2'-O-methyl ribonucleotide
  modified_base 53: mod_base = OTHER; note = 2'-O-methyl ribonucleotide
  modified_base 54: mod_base = OTHER; note = 2'-O-methyl ribonucleotide
  modified_base 55: mod_base = OTHER; note = 2'-O-methyl ribonucleotide
  modified_base 56: mod_base = OTHER; note = 2'-O-methyl ribonucleotide
  modified_base 57: mod_base = OTHER; note = 2'-O-methyl ribonucleotide
  modified_base 60: mod_base = OTHER; note = 2'-O-methyl ribonucleotide
  modified_base 61: mod_base = OTHER; note = 2'-O-methyl ribonucleotide
  modified_base 66: mod_base = OTHER; note = 2'-O-methyl ribonucleotide
  modified_base 67: mod_base = OTHER; note = 2'-O-methyl ribonucleotide
  modified_base 70: mod_base = OTHER; note = 2'-O-methyl ribonucleotide
  modified_base 71: mod_base = OTHER; note = 2'-O-methyl ribonucleotide
  modified_base 72: mod_base = OTHER; note = 2'-O-methyl ribonucleotide
  modified_base 74: mod_base = OTHER; note = 2'-O-methyl ribonucleotide
  modified_base 75: mod_base = OTHER; note = 2'-O-methyl ribonucleotide
  modified_base 76: mod_base = OTHER; note = 2'-O-methyl ribonucleotide
  modified_base 77: mod_base = OTHER; note = 2'-O-methyl ribonucleotide
  modified_base 78: mod_base = OTHER; note = 2'-O-methyl ribonucleotide
  modified_base 79: mod_base = OTHER; note = 2'-O-methyl ribonucleotide
  modified_base 80: mod_base = OTHER; note = 2'-O-methyl ribonucleotide
  modified_base 81: mod_base = OTHER; note = 2'-O-methyl ribonucleotide
  modified_base 83: mod_base = OTHER; note = 2'-O-methyl ribonucleotide
  modified_base 84: mod_base = OTHER; note = 2'-O-methyl ribonucleotide
  modified_base 85: mod_base = OTHER; note = 2'-O-methyl ribonucleotide
  modified_base 86: mod_base = OTHER; note = 2'-O-methyl ribonucleotide
  modified_base 87: mod_base = OTHER; note = 2'-O-methyl ribonucleotide
  modified_base 88: mod_base = OTHER; note = 2'-O-methyl ribonucleotide
  modified_base 89: mod_base = OTHER; note = 2'-O-methyl ribonucleotide
  modified_base 90: mod_base = OTHER; note = 2'-O-methyl ribonucleotide
  modified_base 91: mod_base = OTHER; note = 2'-O-methyl ribonucleotide
  modified_base 92: mod_base = OTHER; note = 2'-O-methyl ribonucleotide
  modified_base 93: mod_base = OTHER; note = 2'-O-methyl ribonucleotide
  modified_base 94: mod_base = OTHER; note = 2'-O-methyl ribonucleotide
  modified_base 95: mod_base = OTHER; note = 2'-O-methyl ribonucleotide
  modified_base 96: mod_base = OTHER; note = 2'-O-methyl ribonucleotide
  modified_base 97: mod_base = OTHER; note = 2'-O-methyl ribonucleotide
  modified_base 98: mod_base = OTHER; note = 2'-O-methyl ribonucleotide
  modified_base 99: mod_base = OTHER; note = 2'-O-methyl ribonucleotide
  modified_base 100: mod_base = OTHER; note = 2'-O-methyl ribonucleotide
  modified_base 1..4: mod_base = OTHER; note = phosphorothioate linkage
  modified_base 45..46: mod_base = OTHER; note = phosphorothioate linkage
  modified_base 64..65: mod_base = OTHER; note = phosphorothioate linkage
  modified_base 98..100: mod_base = OTHER; note = phosphorothioate linkage

SEQ ID NO: 1760 - RNA, 103 nt, synthetic construct; identical to SEQ ID NO: 1700
  source 1..103: mol_type = other RNA
  modified_base 1: mod_base = OTHER; note = 2'-O-methyl ribonucleotide
  modified_base 2: mod_base = OTHER; note = 2'-O-methyl ribonucleotide
  modified_base 3: mod_base = OTHER; note = 2'-O-methyl ribonucleotide
  modified_base 21: mod_base = OTHER; note = 2'-O-methyl ribonucleotide
  modified_base 28: mod_base = OTHER; note = 2'-O-methyl ribonucleotide
  modified_base 29: mod_base = OTHER; note = 2'-O-methyl ribonucleotide
  modified_base 30: mod_base = OTHER; note = 2'-O-methyl ribonucleotide
  modified_base 31: mod_base = OTHER; note = 2'-O-methyl ribonucleotide
  modified_base 32: mod_base = OTHER; note = 2'-O-methyl ribonucleotide
  modified_base 34: mod_base = OTHER; note = 2'-O-methyl ribonucleotide
  modified_base 35: mod_base = OTHER; note = 2'-O-methyl ribonucleotide
  modified_base 36: mod_base = OTHER; note = 2'-O-methyl ribonucleotide
  modified_base 37: mod_base = OTHER; note = 2'-O-methyl ribonucleotide
  modified_base 38: mod_base = OTHER; note = 2'-O-methyl ribonucleotide
  modified_base 39: mod_base = OTHER; note = 2'-O-methyl ribonucleotide
  modified_base 40: mod_base = OTHER; note = 2'-O-methyl ribonucleotide
  modified_base 41: mod_base = OTHER; note = 2'-O-methyl ribonucleotide
  modified_base 42: mod_base = OTHER; note = 2'-O-methyl ribonucleotide
  modified_base 46: mod_base = OTHER; note = 2'-O-methyl ribonucleotide
  modified_base 48: mod_base = OTHER; note = 2'-O-methyl ribonucleotide
  modified_base 50: mod_base = OTHER; note = 2'-O-methyl ribonucleotide
  modified_base 52: mod_base = OTHER; note = 2'-O-methyl ribonucleotide
  modified_base 53: mod_base = OTHER; note = 2'-O-methyl ribonucleotide
  modified_base 54: mod_base = OTHER; note = 2'-O-methyl ribonucleotide
  modified_base 57: mod_base = OTHER; note = 2'-O-methyl ribonucleotide
  modified_base 61: mod_base = OTHER; note = 2'-O-methyl ribonucleotide
  modified_base 66: mod_base = OTHER; note = 2'-O-methyl ribonucleotide
  modified_base 67: mod_base = OTHER; note = 2'-O-methyl ribonucleotide
  modified_base 70: mod_base = OTHER; note = 2'-O-methyl ribonucleotide
  modified_base 71: mod_base = OTHER; note = 2'-O-methyl ribonucleotide
  modified_base 72: mod_base = OTHER; note = 2'-O-methyl ribonucleotide
  modified_base 73: mod_base = OTHER; note = 2'-O-methyl ribonucleotide
  modified_base 74: mod_base = OTHER; note = 2'-O-methyl ribonucleotide
  modified_base 75: mod_base = OTHER; note = 2'-O-methyl ribonucleotide
  modified_base 76: mod_base = OTHER; note = 2'-O-methyl ribonucleotide
  modified_base 77: mod_base = OTHER; note = 2'-O-methyl ribonucleotide
  modified_base 78: mod_base = OTHER; note = 2'-O-methyl ribonucleotide
  modified_base 79: mod_base = OTHER; note = 2'-O-methyl ribonucleotide
  modified_base 80: mod_base = OTHER; note = 2'-O-methyl ribonucleotide
  modified_base 82: mod_base = OTHER; note = 2'-O-methyl ribonucleotide
  modified_base 83: mod_base = OTHER; note = 2'-O-methyl ribonucleotide
  modified_base 84: mod_base = OTHER; note = 2'-O-methyl ribonucleotide
  modified_base 85: mod_base = OTHER; note = 2'-O-methyl ribonucleotide
  modified_base 86: mod_base = OTHER; note = 2'-O-methyl ribonucleotide
  modified_base 87: mod_base = OTHER; note = 2'-O-methyl ribonucleotide
  modified_base 89: mod_base = OTHER; note = 2'-O-methyl ribonucleotide
  modified_base 92: mod_base = OTHER; note = 2'-O-methyl ribonucleotide
  modified_base 93: mod_base = OTHER; note = 2'-O-methyl ribonucleotide
  modified_base 94: mod_base = OTHER; note = 2'-O-methyl ribonucleotide
  modified_base 95: mod_base = OTHER; note = 2'-O-methyl ribonucleotide
  modified_base 96: mod_base = OTHER; note = 2'-O-methyl ribonucleotide
  modified_base 97: mod_base = OTHER; note = 2'-O-methyl ribonucleotide
  modified_base 98: mod_base = OTHER; note = 2'-O-methyl ribonucleotide
  modified_base 99: mod_base = OTHER; note = 2'-O-methyl ribonucleotide
  modified_base 100: mod_base = OTHER; note = 2'-O-methyl ribonucleotide
  modified_base 1..4: mod_base = OTHER; note = phosphorothioate linkage
  modified_base 45..46: mod_base = OTHER; note = phosphorothioate linkage
  modified_base 64..65: mod_base = OTHER; note = phosphorothioate linkage
  modified_base 98..100: mod_base = OTHER; note = phosphorothioate linkage

SEQ ID NO: 1761 - RNA, 103 nt, synthetic construct; identical to SEQ ID NO: 1643
  source 1..103: mol_type = other RNA
  modified_base 1: mod_base = OTHER; note = 2'-O-methyl ribonucleotide
  modified_base 2: mod_base = OTHER; note = 2'-O-methyl ribonucleotide
  modified_base 3: mod_base = OTHER; note = 2'-O-methyl ribonucleotide
  modified_base 21: mod_base = OTHER; note = 2'-O-methyl ribonucleotide
  modified_base 28: mod_base = OTHER; note = 2'-O-methyl ribonucleotide
  modified_base 29: mod_base = OTHER; note = 2'-O-methyl ribonucleotide
  modified_base 30: mod_base = OTHER; note = 2'-O-methyl ribonucleotide
  modified_base 31: mod_base = OTHER; note = 2'-O-methyl ribonucleotide
  modified_base 32: mod_base = OTHER; note = 2'-O-methyl ribonucleotide
  modified_base 34: mod_base = OTHER; note = 2'-O-methyl ribonucleotide
  modified_base 35: mod_base = OTHER; note = 2'-O-methyl ribonucleotide
  modified_base 36: mod_base = OTHER; note = 2'-O-methyl ribonucleotide
  modified_base 37: mod_base = OTHER; note = 2'-O-methyl ribonucleotide
  modified_base 38: mod_base = OTHER; note = 2'-O-methyl ribonucleotide
  modified_base 39: mod_base = OTHER; note = 2'-O-methyl ribonucleotide
  modified_base 40: mod_base = OTHER; note = 2'-O-methyl ribonucleotide
  modified_base 41: mod_base = OTHER; note = 2'-O-methyl ribonucleotide
  modified_base 42: mod_base = OTHER; note = 2'-O-methyl ribonucleotide
  modified_base 46: mod_base = OTHER; note = 2'-O-methyl ribonucleotide
  modified_base 48: mod_base = OTHER; note = 2'-O-methyl ribonucleotide
  modified_base 50: mod_base = OTHER; note = 2'-O-methyl ribonucleotide
  modified_base 52: mod_base = OTHER; note = 2'-O-methyl ribonucleotide
  modified_base 53: mod_base = OTHER; note = 2'-O-methyl ribonucleotide
  modified_base 54: mod_base = OTHER; note = 2'-O-methyl ribonucleotide
  modified_base 57: mod_base = OTHER; note = 2'-O-methyl ribonucleotide
  modified_base 61: mod_base = OTHER; note = 2'-O-methyl ribonucleotide
  modified_base 66: mod_base = OTHER; note = 2'-O-methyl ribonucleotide
  modified_base 67: mod_base = OTHER; note = 2'-O-methyl ribonucleotide
  modified_base 70: mod_base = OTHER; note = 2'-O-methyl ribonucleotide
  modified_base 71: mod_base = OTHER; note = 2'-O-methyl ribonucleotide
  modified_base 72: mod_base = OTHER; note = 2'-O-methyl ribonucleotide
  modified_base 74: mod_base = OTHER; note = 2'-O-methyl ribonucleotide
  modified_base 75: mod_base = OTHER; note = 2'-O-methyl ribonucleotide
  modified_base 76: mod_base = OTHER; note = 2'-O-methyl ribonucleotide
  modified_base 77: mod_base = OTHER; note = 2'-O-methyl ribonucleotide
  modified_base 78: mod_base = OTHER; note = 2'-O-methyl ribonucleotide
  modified_base 79: mod_base = OTHER; note = 2'-O-methyl ribonucleotide
  modified_base 80: mod_base = OTHER; note = 2'-O-methyl ribonucleotide
  modified_base 82: mod_base = OTHER; note = 2'-O-methyl ribonucleotide
  modified_base 83: mod_base = OTHER; note = 2'-O-methyl ribonucleotide
  modified_base 84: mod_base = OTHER; note = 2'-O-methyl ribonucleotide
  modified_base 85: mod_base = OTHER; note = 2'-O-methyl ribonucleotide
  modified_base 86: mod_base = OTHER; note = 2'-O-methyl ribonucleotide
  modified_base 87: mod_base = OTHER; note = 2'-O-methyl ribonucleotide
  modified_base 89: mod_base = OTHER; note = 2'-O-methyl ribonucleotide
  modified_base 92: mod_base = OTHER; note = 2'-O-methyl ribonucleotide
  modified_base 93: mod_base = OTHER; note = 2'-O-methyl ribonucleotide
  modified_base 94: mod_base = OTHER; note = 2'-O-methyl ribonucleotide
  modified_base 95: mod_base = OTHER; note = 2'-O-methyl ribonucleotide
  modified_base 96: mod_base = OTHER; note = 2'-O-methyl ribonucleotide
  modified_base 97: mod_base = OTHER; note = 2'-O-methyl ribonucleotide
  modified_base 98: mod_base = OTHER; note = 2'-O-methyl ribonucleotide
  modified_base 99: mod_base = OTHER; note = 2'-O-methyl ribonucleotide
  modified_base 100: mod_base = OTHER; note = 2'-O-methyl ribonucleotide
  modified_base 1..4: mod_base = OTHER; note = phosphorothioate linkage
  modified_base 25..26: mod_base = OTHER; note = phosphorothioate linkage
  modified_base 45..46: mod_base = OTHER; note = phosphorothioate linkage
  modified_base 98..100: mod_base = OTHER; note = phosphorothioate linkage

SEQ ID NO: 1762 - RNA, 103 nt, synthetic construct; identical to SEQ ID NO: 1699
  source 1..103: mol_type = other RNA
  modified_base 1: mod_base = OTHER; note = 2'-O-methyl ribonucleotide
  modified_base 2: mod_base = OTHER; note = 2'-O-methyl ribonucleotide
  modified_base 3: mod_base = OTHER; note = 2'-O-methyl ribonucleotide
  modified_base 21: mod_base = OTHER; note = 2'-O-methyl ribonucleotide
  modified_base 28: mod_base = OTHER; note = 2'-O-methyl ribonucleotide
  modified_base 29: mod_base = OTHER; note = 2'-O-methyl ribonucleotide
  modified_base 30: mod_base = OTHER; note = 2'-O-methyl ribonucleotide
  modified_base 31: mod_base = OTHER; note = 2'-O-methyl ribonucleotide
  modified_base 32: mod_base = OTHER; note = 2'-O-methyl ribonucleotide
  modified_base 34: mod_base = OTHER; note = 2'-O-methyl ribonucleotide
  modified_base 35: mod_base = OTHER; note = 2'-O-methyl ribonucleotide
  modified_base 36: mod_base = OTHER; note = 2'-O-methyl ribonucleotide
  modified_base 37: mod_base = OTHER; note = 2'-O-methyl ribonucleotide
  modified_base 38: mod_base = OTHER; note = 2'-O-methyl ribonucleotide
  modified_base 39: mod_base = OTHER; note = 2'-O-methyl ribonucleotide
  modified_base 40: mod_base = OTHER; note = 2'-O-methyl ribonucleotide
  modified_base 41: mod_base = OTHER; note = 2'-O-methyl ribonucleotide
  modified_base 42: mod_base = OTHER; note = 2'-O-methyl ribonucleotide
  modified_base 46: mod_base = OTHER; note = 2'-O-methyl ribonucleotide
  modified_base 48: mod_base = OTHER; note = 2'-O-methyl ribonucleotide
  modified_base 50: mod_base = OTHER; note = 2'-O-methyl ribonucleotide
  modified_base 52: mod_base = OTHER; note = 2'-O-methyl ribonucleotide
  modified_base 53: mod_base = OTHER; note = 2'-O-methyl ribonucleotide
  modified_base 54: mod_base = OTHER; note = 2'-O-methyl ribonucleotide
  modified_base 57: mod_base = OTHER; note = 2'-O-methyl ribonucleotide
  modified_base 61: mod_base = OTHER; note = 2'-O-methyl ribonucleotide
  modified_base 66: mod_base = OTHER; note = 2'-O-methyl ribonucleotide
  modified_base 67: mod_base = OTHER; note = 2'-O-methyl ribonucleotide
  modified_base 70: mod_base = OTHER; note = 2'-O-methyl ribonucleotide
  modified_base 71: mod_base = OTHER; note = 2'-O-methyl ribonucleotide
  modified_base 72: mod_base = OTHER; note = 2'-O-methyl ribonucleotide
  modified_base 74: mod_base = OTHER; note = 2'-O-methyl ribonucleotide
  modified_base 75: mod_base = OTHER; note = 2'-O-methyl ribonucleotide
  modified_base 76: mod_base = OTHER; note = 2'-O-methyl ribonucleotide
  modified_base 77: mod_base = OTHER; note = 2'-O-methyl ribonucleotide
  modified_base 78: mod_base = OTHER; note = 2'-O-methyl ribonucleotide
  modified_base 79: mod_base = OTHER; note = 2'-O-methyl ribonucleotide
  modified_base 80: mod_base = OTHER; note = 2'-O-methyl ribonucleotide
  modified_base 82: mod_base = OTHER; note = 2'-O-methyl ribonucleotide
  modified_base 83: mod_base = OTHER; note = 2'-O-methyl ribonucleotide
  modified_base 84: mod_base = OTHER; note = 2'-O-methyl ribonucleotide
  modified_base 85: mod_base = OTHER; note = 2'-O-methyl ribonucleotide
  modified_base 86: mod_base = OTHER; note = 2'-O-methyl ribonucleotide
  modified_base 87: mod_base = OTHER; note = 2'-O-methyl ribonucleotide
  modified_base 89: mod_base = OTHER; note = 2'-O-methyl ribonucleotide
  modified_base 92: mod_base = OTHER; note = 2'-O-methyl ribonucleotide
  modified_base 93: mod_base = OTHER; note = 2'-O-methyl ribonucleotide
  modified_base 94: mod_base = OTHER; note = 2'-O-methyl ribonucleotide
  modified_base 95: mod_base = OTHER; note = 2'-O-methyl ribonucleotide
  modified_base 96: mod_base = OTHER; note = 2'-O-methyl ribonucleotide
  modified_base 97: mod_base = OTHER; note = 2'-O-methyl ribonucleotide
  modified_base 98: mod_base = OTHER; note = 2'-O-methyl ribonucleotide
  modified_base 99: mod_base = OTHER; note = 2'-O-methyl ribonucleotide
  modified_base 100: mod_base = OTHER; note = 2'-O-methyl ribonucleotide
  modified_base 1..4: mod_base = OTHER; note = phosphorothioate linkage
  modified_base 25..26: mod_base = OTHER; note = phosphorothioate linkage
  modified_base 45..46: mod_base = OTHER; note = phosphorothioate linkage
  modified_base 98..100: mod_base = OTHER; note = phosphorothioate linkage

SEQ ID NO: 1763 - RNA, 103 nt, synthetic construct; identical to SEQ ID NO: 1700
  source 1..103: mol_type = other RNA
  modified_base 1: mod_base = OTHER; note = 2'-O-methyl ribonucleotide
  modified_base 2: mod_base = OTHER; note = 2'-O-methyl ribonucleotide
  modified_base 3: mod_base = OTHER; note = 2'-O-methyl ribonucleotide
  modified_base 21: mod_base = OTHER; note = 2'-O-methyl ribonucleotide
  modified_base 28: mod_base = OTHER; note = 2'-O-methyl ribonucleotide
  modified_base 29: mod_base = OTHER; note = 2'-O-methyl ribonucleotide
  modified_base 30: mod_base = OTHER; note = 2'-O-methyl ribonucleotide
  modified_base 31: mod_base = OTHER; note = 2'-O-methyl ribonucleotide
  modified_base 32: mod_base = OTHER; note = 2'-O-methyl ribonucleotide
  modified_base 34: mod_base = OTHER; note = 2'-O-methyl ribonucleotide
  modified_base 35: mod_base = OTHER; note = 2'-O-methyl ribonucleotide
  modified_base 36: mod_base = OTHER; note = 2'-O-methyl ribonucleotide
  modified_base 37: mod_base = OTHER; note = 2'-O-methyl ribonucleotide
  modified_base 38: mod_base = OTHER; note = 2'-O-methyl ribonucleotide
  modified_base 39: mod_base = OTHER; note = 2'-O-methyl ribonucleotide
  modified_base 40: mod_base = OTHER; note = 2'-O-methyl ribonucleotide
  modified_base 41: mod_base = OTHER; note = 2'-O-methyl ribonucleotide
  modified_base 42: mod_base = OTHER; note = 2'-O-methyl ribonucleotide
  modified_base 46: mod_base = OTHER; note = 2'-O-methyl ribonucleotide
  modified_base 48: mod_base = OTHER; note = 2'-O-methyl ribonucleotide
  modified_base 50: mod_base = OTHER; note = 2'-O-methyl ribonucleotide
  modified_base 52: mod_base = OTHER; note = 2'-O-methyl ribonucleotide
  modified_base 53: mod_base = OTHER; note = 2'-O-methyl ribonucleotide
  modified_base 54: mod_base = OTHER; note = 2'-O-methyl ribonucleotide
  modified_base 55: mod_base = OTHER; note = 2'-O-methyl ribonucleotide
  modified_base 56: mod_base = OTHER; note = 2'-O-methyl ribonucleotide
  modified_base 57: mod_base = OTHER; note = 2'-O-methyl ribonucleotide
  modified_base 60: mod_base = OTHER; note = 2'-O-methyl ribonucleotide
  modified_base 61: mod_base = OTHER; note = 2'-O-methyl ribonucleotide
  modified_base 66: mod_base = OTHER; note = 2'-O-methyl ribonucleotide
  modified_base 67: mod_base = OTHER; note = 2'-O-methyl ribonucleotide
  modified_base 70: mod_base = OTHER; note = 2'-O-methyl ribonucleotide
  modified_base 71: mod_base = OTHER; note = 2'-O-methyl ribonucleotide
  modified_base 72: mod_base = OTHER; note = 2'-O-methyl ribonucleotide
  modified_base 74: mod_base = OTHER; note = 2'-O-methyl ribonucleotide
  modified_base 75: mod_base = OTHER; note = 2'-O-methyl ribonucleotide
  modified_base 76: mod_base = OTHER; note = 2'-O-methyl ribonucleotide
  modified_base 77: mod_base = OTHER; note = 2'-O-methyl ribonucleotide
  modified_base 78: mod_base = OTHER; note = 2'-O-methyl ribonucleotide
  modified_base 79: mod_base = OTHER; note = 2'-O-methyl ribonucleotide
  modified_base 80: mod_base = OTHER; note = 2'-O-methyl ribonucleotide
  modified_base 81: mod_base = OTHER; note = 2'-O-methyl ribonucleotide
  modified_base 83: mod_base = OTHER; note = 2'-O-methyl ribonucleotide
  modified_base 84: mod_base = OTHER; note = 2'-O-methyl ribonucleotide
  modified_base 85: mod_base = OTHER; note = 2'-O-methyl ribonucleotide
  modified_base 86: mod_base = OTHER; note = 2'-O-methyl ribonucleotide
  modified_base 87: mod_base = OTHER; note = 2'-O-methyl ribonucleotide
  modified_base 88: mod_base = OTHER; note = 2'-O-methyl ribonucleotide
  modified_base 89: mod_base = OTHER; note = 2'-O-methyl ribonucleotide
  modified_base 90: mod_base = OTHER; note = 2'-O-methyl ribonucleotide
  modified_base 91: mod_base = OTHER; note = 2'-O-methyl ribonucleotide
  modified_base 92: mod_base = OTHER; note = 2'-O-methyl ribonucleotide
  modified_base 93: mod_base = OTHER; note = 2'-O-methyl ribonucleotide
  modified_base 94: mod_base = OTHER; note = 2'-O-methyl ribonucleotide
  modified_base 95: mod_base = OTHER; note = 2'-O-methyl ribonucleotide
  modified_base 96: mod_base = OTHER; note = 2'-O-methyl ribonucleotide
  modified_base 97: mod_base = OTHER; note = 2'-O-methyl ribonucleotide
  modified_base 98: mod_base = OTHER; note = 2'-O-methyl ribonucleotide
  modified_base 99: mod_base = OTHER; note = 2'-O-methyl ribonucleotide
  modified_base 100: mod_base = OTHER; note = 2'-O-methyl ribonucleotide
  modified_base 1..4: mod_base = OTHER; note = phosphorothioate linkage
  modified_base 25..26: mod_base = OTHER; note = phosphorothioate linkage
  modified_base 45..46: mod_base = OTHER; note = phosphorothioate linkage
  modified_base 98..100: mod_base = OTHER; note = phosphorothioate linkage

SEQ ID NO: 1764 - RNA, 103 nt, synthetic construct; identical to SEQ ID NO: 1643
  source 1..103: mol_type = other RNA
  modified_base 1: mod_base = OTHER; note = 2'-O-methyl ribonucleotide
  modified_base 2: mod_base = OTHER; note = 2'-O-methyl ribonucleotide
  modified_base 3: mod_base = OTHER; note = 2'-O-methyl ribonucleotide
  modified_base 21: mod_base = OTHER; note = 2'-O-methyl ribonucleotide
  modified_base 28: mod_base = OTHER; note = 2'-O-methyl ribonucleotide
  modified_base 29: mod_base = OTHER; note = 2'-O-methyl ribonucleotide
  modified_base 30: mod_base = OTHER; note = 2'-O-methyl ribonucleotide
  modified_base 31: mod_base = OTHER; note = 2'-O-methyl ribonucleotide
  modified_base 32: mod_base = OTHER; note = 2'-O-methyl ribonucleotide
  modified_base 34: mod_base = OTHER; note = 2'-O-methyl ribonucleotide
  modified_base 35: mod_base = OTHER; note = 2'-O-methyl ribonucleotide
  modified_base 36: mod_base = OTHER; note = 2'-O-methyl ribonucleotide
  modified_base 37: mod_base = OTHER; note = 2'-O-methyl ribonucleotide
  modified_base 38: mod_base = OTHER; note = 2'-O-methyl ribonucleotide
  modified_base 39: mod_base = OTHER; note = 2'-O-methyl ribonucleotide
  modified_base 40: mod_base = OTHER; note = 2'-O-methyl ribonucleotide
  modified_base 41: mod_base = OTHER; note = 2'-O-methyl ribonucleotide
  modified_base 42: mod_base = OTHER; note = 2'-O-methyl ribonucleotide
  modified_base 46: mod_base = OTHER; note = 2'-O-methyl ribonucleotide
  modified_base 48: mod_base = OTHER; note = 2'-O-methyl ribonucleotide
  modified_base 50: mod_base = OTHER; note = 2'-O-methyl ribonucleotide
  modified_base 52: mod_base = OTHER; note = 2'-O-methyl ribonucleotide
  modified_base 53: mod_base = OTHER; note = 2'-O-methyl ribonucleotide
  modified_base 54: mod_base = OTHER; note = 2'-O-methyl ribonucleotide
  modified_base 57: mod_base = OTHER; note = 2'-O-methyl ribonucleotide
  modified_base 61: mod_base = OTHER; note = 2'-O-methyl ribonucleotide
  modified_base 66: mod_base = OTHER; note = 2'-O-methyl ribonucleotide
  modified_base 67: mod_base = OTHER; note = 2'-O-methyl ribonucleotide
  modified_base 70: mod_base = OTHER; note = 2'-O-methyl ribonucleotide
  modified_base 71: mod_base = OTHER; note = 2'-O-methyl ribonucleotide
  modified_base 72: mod_base = OTHER; note = 2'-O-methyl ribonucleotide
  modified_base 74: mod_base = OTHER; note = 2'-O-methyl ribonucleotide
  modified_base 75: mod_base = OTHER; note = 2'-O-methyl ribonucleotide
  modified_base 76: mod_base = OTHER; note = 2'-O-methyl ribonucleotide
  modified_base 77: mod_base = OTHER; note = 2'-O-methyl ribonucleotide
  modified_base 78: mod_base = OTHER; note = 2'-O-methyl ribonucleotide
  modified_base 79: mod_base = OTHER; note = 2'-O-methyl ribonucleotide
  modified_base 80: mod_base = OTHER; note = 2'-O-methyl ribonucleotide
  modified_base 82: mod_base = OTHER; note = 2'-O-methyl ribonucleotide
  modified_base 83: mod_base = OTHER; note = 2'-O-methyl ribonucleotide
  modified_base 84: mod_base = OTHER; note = 2'-O-methyl ribonucleotide
  modified_base 85: mod_base = OTHER; note = 2'-O-methyl ribonucleotide
  modified_base 86: mod_base = OTHER; note = 2'-O-methyl ribonucleotide
  modified_base 87: mod_base = OTHER; note = 2'-O-methyl ribonucleotide
  modified_base 89: mod_base = OTHER; note = 2'-O-methyl ribonucleotide
  modified_base 92: mod_base = OTHER; note = 2'-O-methyl ribonucleotide
  modified_base 93: mod_base = OTHER; note = 2'-O-methyl ribonucleotide
  modified_base 94: mod_base = OTHER; note = 2'-O-methyl ribonucleotide
  modified_base 95: mod_base = OTHER; note = 2'-O-methyl ribonucleotide
  modified_base 96: mod_base = OTHER; note = 2'-O-methyl ribonucleotide
  modified_base 97: mod_base = OTHER; note = 2'-O-methyl ribonucleotide
  modified_base 98: mod_base = OTHER; note = 2'-O-methyl ribonucleotide
  modified_base 99: mod_base = OTHER; note = 2'-O-methyl ribonucleotide
  modified_base 100: mod_base = OTHER; note = 2'-O-methyl ribonucleotide
  modified_base 1..4: mod_base = OTHER; note = phosphorothioate linkage
  modified_base 25..26: mod_base = OTHER; note = phosphorothioate linkage
  modified_base 64..65: mod_base = OTHER; note = phosphorothioate linkage
  modified_base 98..100: mod_base = OTHER; note = phosphorothioate linkage

SEQ ID NO: 1765 - RNA, 103 nt, synthetic construct; identical to SEQ ID NO: 1699
  source 1..103: mol_type = other RNA
  modified_base 1: mod_base = OTHER; note = 2'-O-methyl ribonucleotide
  modified_base 2: mod_base = OTHER; note = 2'-O-methyl ribonucleotide
  modified_base 3: mod_base = OTHER; note = 2'-O-methyl ribonucleotide
  modified_base 21: mod_base = OTHER; note = 2'-O-methyl ribonucleotide
  modified_base 28: mod_base = OTHER; note = 2'-O-methyl ribonucleotide
  modified_base 29: mod_base = OTHER; note = 2'-O-methyl ribonucleotide
  modified_base 30: mod_base = OTHER; note = 2'-O-methyl ribonucleotide
  modified_base 31: mod_base = OTHER; note = 2'-O-methyl ribonucleotide
  modified_base 32: mod_base = OTHER; note = 2'-O-methyl ribonucleotide
  modified_base 34: mod_base = OTHER; note = 2'-O-methyl ribonucleotide
  modified_base 35: mod_base = OTHER; note = 2'-O-methyl ribonucleotide
  modified_base 36: mod_base = OTHER; note = 2'-O-methyl ribonucleotide
  modified_base 37: mod_base = OTHER; note = 2'-O-methyl ribonucleotide
  modified_base 38: mod_base = OTHER; note = 2'-O-methyl ribonucleotide
  modified_base 39: mod_base = OTHER; note = 2'-O-methyl ribonucleotide
  modified_base 40: mod_base = OTHER; note = 2'-O-methyl ribonucleotide
  modified_base 41: mod_base = OTHER; note = 2'-O-methyl ribonucleotide
  modified_base 42: mod_base = OTHER; note = 2'-O-methyl ribonucleotide
  modified_base 46: mod_base = OTHER; note = 2'-O-methyl ribonucleotide
  modified_base 48: mod_base = OTHER; note = 2'-O-methyl ribonucleotide
  modified_base 50: mod_base = OTHER; note = 2'-O-methyl ribonucleotide
  modified_base 52: mod_base = OTHER; note = 2'-O-methyl ribonucleotide
  modified_base 53: mod_base = OTHER; note = 2'-O-methyl ribonucleotide
  modified_base 54: mod_base = OTHER; note = 2'-O-methyl ribonucleotide
  modified_base 57: mod_base = OTHER; note = 2'-O-methyl ribonucleotide
  modified_base 61: mod_base = OTHER; note = 2'-O-methyl ribonucleotide
  modified_base 66: mod_base = OTHER; note = 2'-O-methyl ribonucleotide
  modified_base 67: mod_base = OTHER; note = 2'-O-methyl ribonucleotide
  modified_base 70: mod_base = OTHER; note = 2'-O-methyl ribonucleotide
  modified_base 71: mod_base = OTHER; note = 2'-O-methyl ribonucleotide
  modified_base 72: mod_base = OTHER; note = 2'-O-methyl ribonucleotide
  modified_base 74: mod_base = OTHER; note = 2'-O-methyl ribonucleotide
  modified_base 75: mod_base = OTHER; note = 2'-O-methyl ribonucleotide
  modified_base 76: mod_base = OTHER; note = 2'-O-methyl ribonucleotide
  modified_base 77: mod_base = OTHER; note = 2'-O-methyl ribonucleotide
  modified_base 78: mod_base = OTHER; note = 2'-O-methyl ribonucleotide
  modified_base 79: mod_base = OTHER; note = 2'-O-methyl ribonucleotide
  modified_base 80: mod_base = OTHER; note = 2'-O-methyl ribonucleotide
  modified_base 82: mod_base = OTHER; note = 2'-O-methyl ribonucleotide
  modified_base 83: mod_base = OTHER; note = 2'-O-methyl ribonucleotide
  modified_base 84: mod_base = OTHER; note = 2'-O-methyl ribonucleotide
  modified_base 85: mod_base = OTHER; note = 2'-O-methyl ribonucleotide
  modified_base 86: mod_base = OTHER; note = 2'-O-methyl ribonucleotide
  modified_base 87: mod_base = OTHER; note = 2'-O-methyl ribonucleotide
  modified_base 89: mod_base = OTHER; note = 2'-O-methyl ribonucleotide
  modified_base 92: mod_base = OTHER; note = 2'-O-methyl ribonucleotide
  modified_base 93: mod_base = OTHER; note = 2'-O-methyl ribonucleotide
  modified_base 94: mod_base = OTHER; note = 2'-O-methyl ribonucleotide
  modified_base 95: mod_base = OTHER; note = 2'-O-methyl ribonucleotide
  modified_base 96: mod_base = OTHER; note = 2'-O-methyl ribonucleotide
  modified_base 97: mod_base = OTHER; note = 2'-O-methyl ribonucleotide
  modified_base 98: mod_base = OTHER; note = 2'-O-methyl ribonucleotide
  modified_base 99: mod_base = OTHER; note = 2'-O-methyl ribonucleotide
  modified_base 100: mod_base = OTHER; note = 2'-O-methyl ribonucleotide
  modified_base 1..4: mod_base = OTHER; note = phosphorothioate linkage
  modified_base 25..26: mod_base = OTHER; note = phosphorothioate linkage
  modified_base 64..65: mod_base = OTHER; note = phosphorothioate linkage
  modified_base 98..100: mod_base = OTHER; note = phosphorothioate linkage

SEQ ID NO: 1766 - RNA, 103 nt, synthetic construct; identical to SEQ ID NO: 1700
  source 1..103: mol_type = other RNA
  modified_base 1: mod_base = OTHER; note = 2'-O-methyl ribonucleotide
  modified_base 2: mod_base = OTHER; note = 2'-O-methyl ribonucleotide
  modified_base 3: mod_base = OTHER; note = 2'-O-methyl ribonucleotide
  modified_base 21: mod_base = OTHER; note = 2'-O-methyl ribonucleotide
  modified_base 28: mod_base = OTHER; note = 2'-O-methyl ribonucleotide
  modified_base 29: mod_base = OTHER; note = 2'-O-methyl ribonucleotide
  modified_base 30: mod_base = OTHER; note = 2'-O-methyl ribonucleotide
  modified_base 31: mod_base = OTHER; note = 2'-O-methyl ribonucleotide
  modified_base 32: mod_base = OTHER; note = 2'-O-methyl ribonucleotide
  modified_base 34: mod_base = OTHER; note = 2'-O-methyl ribonucleotide
  modified_base 35: mod_base = OTHER; note = 2'-O-methyl ribonucleotide
  modified_base 36: mod_base = OTHER; note = 2'-O-methyl ribonucleotide
  modified_base 37: mod_base = OTHER; note = 2'-O-methyl ribonucleotide
  modified_base 38: mod_base = OTHER; note = 2'-O-methyl ribonucleotide
  modified_base 39: mod_base = OTHER; note = 2'-O-methyl ribonucleotide
  modified_base 40: mod_base = OTHER; note = 2'-O-methyl ribonucleotide
  modified_base 41: mod_base = OTHER; note = 2'-O-methyl ribonucleotide
  modified_base 42: mod_base = OTHER; note = 2'-O-methyl ribonucleotide
  modified_base 46: mod_base = OTHER; note = 2'-O-methyl ribonucleotide
  modified_base 48: mod_base = OTHER; note = 2'-O-methyl ribonucleotide
  modified_base 50: mod_base = OTHER; note = 2'-O-methyl ribonucleotide
  modified_base 52: mod_base = OTHER; note = 2'-O-methyl ribonucleotide
  modified_base 53: mod_base = OTHER; note = 2'-O-methyl ribonucleotide
  modified_base 54: mod_base = OTHER; note = 2'-O-methyl ribonucleotide
  modified_base 55: mod_base = OTHER; note = 2'-O-methyl ribonucleotide
  modified_base 56: mod_base = OTHER; note = 2'-O-methyl ribonucleotide
  modified_base 57: mod_base = OTHER; note = 2'-O-methyl ribonucleotide
  modified_base 60: mod_base = OTHER; note = 2'-O-methyl ribonucleotide
  modified_base 61: mod_base = OTHER; note = 2'-O-methyl ribonucleotide
  modified_base 66: mod_base = OTHER; note = 2'-O-methyl ribonucleotide
  modified_base 67: mod_base = OTHER; note = 2'-O-methyl ribonucleotide
  modified_base 70: mod_base = OTHER; note = 2'-O-methyl ribonucleotide
  modified_base 71: mod_base = OTHER; note = 2'-O-methyl ribonucleotide
  modified_base 72: mod_base = OTHER; note = 2'-O-methyl ribonucleotide
  modified_base 74: mod_base = OTHER; note = 2'-O-methyl ribonucleotide
  modified_base 75: mod_base = OTHER; note = 2'-O-methyl ribonucleotide
  modified_base 76: mod_base = OTHER; note = 2'-O-methyl ribonucleotide
  modified_base 77: mod_base = OTHER; note = 2'-O-methyl ribonucleotide
  modified_base 78: mod_base = OTHER; note = 2'-O-methyl ribonucleotide
  modified_base 79: mod_base = OTHER; note = 2'-O-methyl ribonucleotide
  modified_base 80: mod_base = OTHER; note = 2'-O-methyl ribonucleotide
  modified_base 81: mod_base = OTHER; note = 2'-O-methyl ribonucleotide
  modified_base 83: mod_base = OTHER; note = 2'-O-methyl ribonucleotide
  modified_base 84: mod_base = OTHER; note = 2'-O-methyl ribonucleotide
  modified_base 85: mod_base = OTHER; note = 2'-O-methyl ribonucleotide
  modified_base 86: mod_base = OTHER; note = 2'-O-methyl ribonucleotide
  modified_base 87: mod_base = OTHER; note = 2'-O-methyl ribonucleotide
  modified_base 88: mod_base = OTHER; note = 2'-O-methyl ribonucleotide
  modified_base 89: mod_base = OTHER; note = 2'-O-methyl ribonucleotide
  modified_base 90: mod_base = OTHER; note = 2'-O-methyl ribonucleotide
  modified_base 91: mod_base = OTHER; note = 2'-O-methyl ribonucleotide
  modified_base 92: mod_base = OTHER; note = 2'-O-methyl ribonucleotide
  modified_base 93: mod_base = OTHER; note = 2'-O-methyl ribonucleotide
  modified_base 94: mod_base = OTHER; note = 2'-O-methyl ribonucleotide
  modified_base 95: mod_base = OTHER; note = 2'-O-methyl ribonucleotide
  modified_base 96: mod_base = OTHER; note = 2'-O-methyl ribonucleotide
  modified_base 97: mod_base = OTHER; note = 2'-O-methyl ribonucleotide
  modified_base 98: mod_base = OTHER; note = 2'-O-methyl ribonucleotide
  modified_base 99: mod_base = OTHER; note = 2'-O-methyl ribonucleotide
  modified_base 100: mod_base = OTHER; note = 2'-O-methyl ribonucleotide
  modified_base 1..4: mod_base = OTHER; note = phosphorothioate linkage
  modified_base 25..26: mod_base = OTHER; note = phosphorothioate linkage
  modified_base 64..65: mod_base = OTHER; note = phosphorothioate linkage
  modified_base 98..100: mod_base = OTHER; note = phosphorothioate linkage

SEQ ID NO: 1767 - RNA, 103 nt, synthetic construct; identical to SEQ ID NO: 1643
  source 1..103: mol_type = other RNA
  modified_base 1: mod_base = OTHER; note = 2'-O-methyl ribonucleotide
  modified_base 2: mod_base = OTHER; note = 2'-O-methyl ribonucleotide
  modified_base 3: mod_base = OTHER; note = 2'-O-methyl ribonucleotide
  modified_base 21: mod_base = OTHER; note = 2'-O-methyl ribonucleotide
  modified_base 28: mod_base = OTHER; note = 2'-O-methyl ribonucleotide
  modified_base 29: mod_base = OTHER; note = 2'-O-methyl ribonucleotide
  modified_base 30: mod_base = OTHER; note = 2'-O-methyl ribonucleotide
  modified_base 31: mod_base = OTHER; note = 2'-O-methyl ribonucleotide
  modified_base 32: mod_base = OTHER; note = 2'-O-methyl ribonucleotide
  modified_base 34: mod_base = OTHER; note = 2'-O-methyl ribonucleotide
  modified_base 35: mod_base = OTHER; note = 2'-O-methyl ribonucleotide
  modified_base 36: mod_base = OTHER; note = 2'-O-methyl ribonucleotide
  modified_base 37: mod_base = OTHER; note = 2'-O-methyl ribonucleotide
  modified_base 38: mod_base = OTHER; note = 2'-O-methyl ribonucleotide
  modified_base 39: mod_base = OTHER; note = 2'-O-methyl ribonucleotide
  modified_base 40: mod_base = OTHER; note = 2'-O-methyl ribonucleotide
  modified_base 41: mod_base = OTHER; note = 2'-O-methyl ribonucleotide
  modified_base 42: mod_base = OTHER; note = 2'-O-methyl ribonucleotide
  modified_base 46: mod_base = OTHER; note = 2'-O-methyl ribonucleotide
  modified_base 48: mod_base = OTHER; note = 2'-O-methyl ribonucleotide
  modified_base 50: mod_base = OTHER; note = 2'-O-methyl ribonucleotide
  modified_base 52: mod_base = OTHER; note = 2'-O-methyl ribonucleotide
  modified_base 53: mod_base = OTHER; note = 2'-O-methyl ribonucleotide
  modified_base 54: mod_base = OTHER; note = 2'-O-methyl ribonucleotide
  modified_base 57: mod_base = OTHER; note = 2'-O-methyl ribonucleotide
  modified_base 61: mod_base = OTHER; note = 2'-O-methyl ribonucleotide
  modified_base 66: mod_base = OTHER; note = 2'-O-methyl ribonucleotide
  modified_base 67: mod_base = OTHER; note = 2'-O-methyl ribonucleotide
  modified_base 70: mod_base = OTHER; note = 2'-O-methyl ribonucleotide
  modified_base 71: mod_base = OTHER; note = 2'-O-methyl ribonucleotide
  modified_base 72: mod_base = OTHER; note = 2'-O-methyl ribonucleotide
  modified_base 74: mod_base = OTHER; note = 2'-O-methyl ribonucleotide
  modified_base 75: mod_base = OTHER; note = 2'-O-methyl ribonucleotide
  modified_base 76: mod_base = OTHER; note = 2'-O-methyl ribonucleotide
  modified_base 77: mod_base = OTHER; note = 2'-O-methyl ribonucleotide
  modified_base 78: mod_base = OTHER; note = 2'-O-methyl ribonucleotide
  modified_base 79: mod_base = OTHER; note = 2'-O-methyl ribonucleotide
  modified_base 80: mod_base = OTHER; note = 2'-O-methyl ribonucleotide
  modified_base 82: mod_base = OTHER; note = 2'-O-methyl ribonucleotide
  modified_base 83: mod_base = OTHER; note = 2'-O-methyl ribonucleotide
  modified_base 84: mod_base = OTHER; note = 2'-O-methyl ribonucleotide
  modified_base 85: mod_base = OTHER; note = 2'-O-methyl ribonucleotide
  modified_base 86: mod_base = OTHER; note = 2'-O-methyl ribonucleotide
  modified_base 87: mod_base = OTHER; note = 2'-O-methyl ribonucleotide
  modified_base 89: mod_base = OTHER; note = 2'-O-methyl ribonucleotide
  modified_base 92: mod_base = OTHER; note = 2'-O-methyl ribonucleotide
  modified_base 93: mod_base = OTHER; note = 2'-O-methyl ribonucleotide
  modified_base 94: mod_base = OTHER; note = 2'-O-methyl ribonucleotide
  modified_base 95: mod_base = OTHER; note = 2'-O-methyl ribonucleotide
  modified_base 96: mod_base = OTHER; note = 2'-O-methyl ribonucleotide
  modified_base 97: mod_base = OTHER; note = 2'-O-methyl ribonucleotide
  modified_base 98: mod_base = OTHER; note = 2'-O-methyl ribonucleotide
  modified_base 99: mod_base = OTHER; note = 2'-O-methyl ribonucleotide
  modified_base 100: mod_base = OTHER; note = 2'-O-methyl ribonucleotide
  modified_base 1..4: mod_base = OTHER; note = phosphorothioate linkage
  modified_base 25..26: mod_base = OTHER; note = phosphorothioate linkage
  modified_base 45..46: mod_base = OTHER; note = phosphorothioate linkage
  modified_base 64..65: mod_base = OTHER; note = phosphorothioate linkage
  modified_base 98..100: mod_base = OTHER; note = phosphorothioate linkage

SEQ ID NO: 1768 - RNA, 103 nt, synthetic construct; identical to SEQ ID NO: 1699
  source 1..103: mol_type = other RNA
  modified_base 1: mod_base = OTHER; note = 2'-O-methyl ribonucleotide
  modified_base 2: mod_base = OTHER; note = 2'-O-methyl ribonucleotide
  modified_base 3: mod_base = OTHER; note = 2'-O-methyl ribonucleotide
  modified_base 21: mod_base = OTHER; note = 2'-O-methyl ribonucleotide
  modified_base 28: mod_base = OTHER; note = 2'-O-methyl ribonucleotide
  modified_base 29: mod_base = OTHER; note = 2'-O-methyl ribonucleotide
  modified_base 30: mod_base = OTHER; note = 2'-O-methyl ribonucleotide
  modified_base 31: mod_base = OTHER; note = 2'-O-methyl ribonucleotide
  modified_base 32: mod_base = OTHER; note = 2'-O-methyl ribonucleotide
  modified_base 34: mod_base = OTHER; note = 2'-O-methyl ribonucleotide
  modified_base 35: mod_base = OTHER; note = 2'-O-methyl ribonucleotide
  modified_base 36: mod_base = OTHER; note = 2'-O-methyl ribonucleotide
  modified_base 37: mod_base = OTHER; note = 2'-O-methyl ribonucleotide
  modified_base 38: mod_base = OTHER; note = 2'-O-methyl ribonucleotide
  modified_base 39: mod_base = OTHER; note = 2'-O-methyl ribonucleotide
  modified_base 40: mod_base = OTHER; note = 2'-O-methyl ribonucleotide
  modified_base 41: mod_base = OTHER; note = 2'-O-methyl ribonucleotide
  modified_base 42: mod_base = OTHER; note = 2'-O-methyl ribonucleotide
  modified_base 46: mod_base = OTHER; note = 2'-O-methyl ribonucleotide
  modified_base 48: mod_base = OTHER; note = 2'-O-methyl ribonucleotide
  modified_base 50: mod_base = OTHER; note = 2'-O-methyl ribonucleotide
  modified_base 52: mod_base = OTHER; note = 2'-O-methyl ribonucleotide
  modified_base 53: mod_base = OTHER; note = 2'-O-methyl ribonucleotide
  modified_base 54: mod_base = OTHER; note = 2'-O-methyl ribonucleotide
  modified_base 57: mod_base = OTHER; note = 2'-O-methyl ribonucleotide
  modified_base 61: mod_base = OTHER; note = 2'-O-methyl ribonucleotide
  modified_base 66: mod_base = OTHER; note = 2'-O-methyl ribonucleotide
  modified_base 67: mod_base = OTHER; note = 2'-O-methyl ribonucleotide
  modified_base 70: mod_base = OTHER; note = 2'-O-methyl ribonucleotide
  modified_base 71: mod_base = OTHER; note = 2'-O-methyl ribonucleotide
  modified_base 72: mod_base = OTHER; note = 2'-O-methyl ribonucleotide
  modified_base 74: mod_base = OTHER; note = 2'-O-methyl ribonucleotide
  modified_base 75: mod_base = OTHER; note = 2'-O-methyl ribonucleotide
  modified_base 76: mod_base = OTHER; note = 2'-O-methyl ribonucleotide
  modified_base 77: mod_base = OTHER; note = 2'-O-methyl ribonucleotide
  modified_base 78: mod_base = OTHER; note = 2'-O-methyl ribonucleotide
  modified_base 79: mod_base = OTHER; note = 2'-O-methyl ribonucleotide
  modified_base 80: mod_base = OTHER; note = 2'-O-methyl ribonucleotide
  modified_base 82: mod_base = OTHER; note = 2'-O-methyl ribonucleotide
  modified_base 83: mod_base = OTHER; note = 2'-O-methyl ribonucleotide
  modified_base 84: mod_base = OTHER; note = 2'-O-methyl ribonucleotide
  modified_base 85: mod_base = OTHER; note = 2'-O-methyl ribonucleotide
  modified_base 86: mod_base = OTHER; note = 2'-O-methyl ribonucleotide
  modified_base 87: mod_base = OTHER; note = 2'-O-methyl ribonucleotide
  modified_base 89: mod_base = OTHER; note = 2'-O-methyl ribonucleotide
  modified_base 92: mod_base = OTHER; note = 2'-O-methyl ribonucleotide
  modified_base 93: mod_base = OTHER; note = 2'-O-methyl ribonucleotide
  modified_base 94: mod_base = OTHER; note = 2'-O-methyl ribonucleotide
  modified_base 95: mod_base = OTHER; note = 2'-O-methyl ribonucleotide
  modified_base 96: mod_base = OTHER; note = 2'-O-methyl ribonucleotide
  modified_base 97: mod_base = OTHER; note = 2'-O-methyl ribonucleotide
  modified_base 98: mod_base = OTHER; note = 2'-O-methyl ribonucleotide
  modified_base 99: mod_base = OTHER; note = 2'-O-methyl ribonucleotide
  modified_base 100: mod_base = OTHER; note = 2'-O-methyl ribonucleotide
  modified_base 1..4: mod_base = OTHER; note = phosphorothioate linkage
  modified_base 25..26: mod_base = OTHER; note = phosphorothioate linkage
  modified_base 45..46: mod_base = OTHER; note = phosphorothioate linkage
  modified_base 64..65: mod_base = OTHER; note = phosphorothioate linkage
  modified_base 98..100: mod_base = OTHER; note = phosphorothioate linkage

SEQ ID NO: 1769 - RNA, 103 nt, synthetic construct; identical to SEQ ID NO: 1700
  source 1..103: mol_type = other RNA
  modified_base 1: mod_base = OTHER; note = 2'-O-methyl ribonucleotide
  modified_base 2: mod_base = OTHER; note = 2'-O-methyl ribonucleotide
  modified_base 3: mod_base = OTHER; note = 2'-O-methyl ribonucleotide
  modified_base 21: mod_base = OTHER; note = 2'-O-methyl ribonucleotide
  modified_base 28: mod_base = OTHER; note = 2'-O-methyl ribonucleotide
  modified_base 29: mod_base = OTHER; note = 2'-O-methyl ribonucleotide
  modified_base 30: mod_base = OTHER; note = 2'-O-methyl ribonucleotide
  modified_base 31: mod_base = OTHER; note = 2'-O-methyl ribonucleotide
  modified_base 32: mod_base = OTHER; note = 2'-O-methyl ribonucleotide
  modified_base 34: mod_base = OTHER; note = 2'-O-methyl ribonucleotide
  modified_base 35: mod_base = OTHER; note = 2'-O-methyl ribonucleotide
  modified_base 36: mod_base = OTHER; note = 2'-O-methyl ribonucleotide
  modified_base 37: mod_base = OTHER; note = 2'-O-methyl ribonucleotide
  modified_base 38: mod_base = OTHER; note = 2'-O-methyl ribonucleotide
  modified_base 39: mod_base = OTHER; note = 2'-O-methyl ribonucleotide
  modified_base 40: mod_base = OTHER; note = 2'-O-methyl ribonucleotide
  modified_base 41: mod_base = OTHER; note = 2'-O-methyl ribonucleotide
  modified_base 42: mod_base = OTHER; note = 2'-O-methyl ribonucleotide
  modified_base 46: mod_base = OTHER; note = 2'-O-methyl ribonucleotide
  modified_base 48: mod_base = OTHER; note = 2'-O-methyl ribonucleotide
  modified_base 50: mod_base = OTHER; note = 2'-O-methyl ribonucleotide
  modified_base 52: mod_base = OTHER; note = 2'-O-methyl ribonucleotide
  modified_base 53: mod_base = OTHER; note = 2'-O-methyl ribonucleotide
  modified_base 54: mod_base = OTHER; note = 2'-O-methyl ribonucleotide
  modified_base 55: mod_base = OTHER; note = 2'-O-methyl ribonucleotide
  modified_base 56: mod_base = OTHER; note = 2'-O-methyl ribonucleotide
  modified_base 57: mod_base = OTHER; note = 2'-O-methyl ribonucleotide
  modified_base 60: mod_base = OTHER; note = 2'-O-methyl ribonucleotide
  modified_base 61: mod_base = OTHER; note = 2'-O-methyl ribonucleotide
  modified_base 66: mod_base = OTHER; note = 2'-O-methyl ribonucleotide
  modified_base 67: mod_base = OTHER; note = 2'-O-methyl ribonucleotide
  modified_base 70: mod_base = OTHER; note = 2'-O-methyl ribonucleotide
  modified_base 71: mod_base = OTHER; note = 2'-O-methyl ribonucleotide
  modified_base 72: mod_base = OTHER; note = 2'-O-methyl ribonucleotide
  modified_base 74: mod_base = OTHER; note = 2'-O-methyl ribonucleotide
  modified_base 75: mod_base = OTHER; note = 2'-O-methyl ribonucleotide
  modified_base 76: mod_base = OTHER; note = 2'-O-methyl ribonucleotide
  modified_base 77: mod_base = OTHER; note = 2'-O-methyl ribonucleotide
  modified_base 78: mod_base = OTHER; note = 2'-O-methyl ribonucleotide
  modified_base 79: mod_base = OTHER; note = 2'-O-methyl ribonucleotide
  modified_base 80: mod_base = OTHER; note = 2'-O-methyl ribonucleotide
  modified_base 81: mod_base = OTHER; note = 2'-O-methyl ribonucleotide
  modified_base 83: mod_base = OTHER; note = 2'-O-methyl ribonucleotide
  modified_base 84: mod_base = OTHER; note = 2'-O-methyl ribonucleotide
  modified_base 85: mod_base = OTHER; note = 2'-O-methyl ribonucleotide
  modified_base 86: mod_base = OTHER; note = 2'-O-methyl ribonucleotide
  modified_base 87: mod_base = OTHER; note = 2'-O-methyl ribonucleotide
  modified_base 88: mod_base = OTHER; note = 2'-O-methyl ribonucleotide
  modified_base 89: mod_base = OTHER; note = 2'-O-methyl ribonucleotide
  modified_base 90: mod_base = OTHER; note = 2'-O-methyl ribonucleotide
  modified_base 91: mod_base = OTHER; note = 2'-O-methyl ribonucleotide
  modified_base 92: mod_base = OTHER; note = 2'-O-methyl ribonucleotide
  modified_base 93: mod_base = OTHER; note = 2'-O-methyl ribonucleotide
  modified_base 94: mod_base = OTHER; note = 2'-O-methyl ribonucleotide
  modified_base 95: mod_base = OTHER; note = 2'-O-methyl ribonucleotide
  modified_base 96: mod_base = OTHER; note = 2'-O-methyl ribonucleotide
  modified_base 97: mod_base = OTHER; note = 2'-O-methyl ribonucleotide
  modified_base 98: mod_base = OTHER; note = 2'-O-methyl ribonucleotide
  modified_base 99: mod_base = OTHER; note = 2'-O-methyl ribonucleotide
  modified_base 100: mod_base = OTHER; note = 2'-O-methyl ribonucleotide
  modified_base 1..4: mod_base = OTHER; note = phosphorothioate linkage
  modified_base 25..26: mod_base = OTHER; note = phosphorothioate linkage
  modified_base 45..46: mod_base = OTHER; note = phosphorothioate linkage
  modified_base 64..65: mod_base = OTHER; note = phosphorothioate linkage
  modified_base 98..100: mod_base = OTHER; note = phosphorothioate linkage

SEQ ID NO: 1770 - RNA, 103 nt, synthetic construct; identical to SEQ ID NO: 1700
  source 1..103: mol_type = other RNA
  modified_base 1: mod_base = OTHER; note = 2'-O-methyl ribonucleotide
  modified_base 2: mod_base = OTHER; note = 2'-O-methyl ribonucleotide
  modified_base 3: mod_base = OTHER; note = 2'-O-methyl ribonucleotide
  modified_base 21: mod_base = OTHER; note = 2'-O-methyl ribonucleotide
  modified_base 28: mod_base = OTHER; note = 2'-O-methyl ribonucleotide
  modified_base 29: mod_base = OTHER; note = 2'-O-methyl ribonucleotide
  modified_base 30: mod_base = OTHER; note = 2'-O-methyl ribonucleotide
  modified_base 31: mod_base = OTHER; note = 2'-O-methyl ribonucleotide
  modified_base 32: mod_base = OTHER; note = 2'-O-methyl ribonucleotide
  modified_base 34: mod_base = OTHER; note = 2'-O-methyl ribonucleotide
  modified_base 35: mod_base = OTHER; note = 2'-O-methyl ribonucleotide
  modified_base 36: mod_base = OTHER; note = 2'-O-methyl ribonucleotide
  modified_base 37: mod_base = OTHER; note = 2'-O-methyl ribonucleotide
  modified_base 38: mod_base = OTHER; note = 2'-O-methyl ribonucleotide
  modified_base 39: mod_base = OTHER; note = 2'-O-methyl ribonucleotide
  modified_base 40: mod_base = OTHER; note = 2'-O-methyl ribonucleotide
  modified_base 41: mod_base = OTHER; note = 2'-O-methyl ribonucleotide
  modified_base 42: mod_base = OTHER; note = 2'-O-methyl ribonucleotide
  modified_base 46: mod_base = OTHER; note = 2'-O-methyl ribonucleotide
  modified_base 48: mod_base = OTHER; note = 2'-O-methyl ribonucleotide
  modified_base 50: mod_base = OTHER; note = 2'-O-methyl ribonucleotide
  modified_base 52: mod_base = OTHER; note = 2'-O-methyl ribonucleotide
  modified_base 53: mod_base = OTHER; note = 2'-O-methyl ribonucleotide
  modified_base 54: mod_base = OTHER; note = 2'-O-methyl ribonucleotide
  modified_base 57: mod_base = OTHER; note = 2'-O-methyl ribonucleotide
  modified_base 61: mod_base = OTHER; note = 2'-O-methyl ribonucleotide
  modified_base 66: mod_base = OTHER; note = 2'-O-methyl ribonucleotide
  modified_base 67: mod_base = OTHER; note = 2'-O-methyl ribonucleotide
  modified_base 70: mod_base = OTHER; note = 2'-O-methyl ribonucleotide
  modified_base 71: mod_base = OTHER; note = 2'-O-methyl ribonucleotide
  modified_base 72: mod_base = OTHER; note = 2'-O-methyl ribonucleotide
  modified_base 74: mod_base = OTHER; note = 2'-O-methyl ribonucleotide
  modified_base 75: mod_base = OTHER; note = 2'-O-methyl ribonucleotide
  modified_base 76: mod_base = OTHER; note = 2'-O-methyl ribonucleotide
  modified_base 77: mod_base = OTHER; note = 2'-O-methyl ribonucleotide
  modified_base 78: mod_base = OTHER; note = 2'-O-methyl ribonucleotide
  modified_base 79: mod_base = OTHER; note = 2'-O-methyl ribonucleotide
  modified_base 80: mod_base = OTHER; note = 2'-O-methyl ribonucleotide
  modified_base 82: mod_base = OTHER; note = 2'-O-methyl ribonucleotide
  modified_base 83: mod_base = OTHER; note = 2'-O-methyl ribonucleotide
  modified_base 84: mod_base = OTHER; note = 2'-O-methyl ribonucleotide
  modified_base 85: mod_base = OTHER; note = 2'-O-methyl ribonucleotide
  modified_base 86: mod_base = OTHER; note = 2'-O-methyl ribonucleotide
  modified_base 87: mod_base = OTHER; note = 2'-O-methyl ribonucleotide
  modified_base 89: mod_base = OTHER; note = 2'-O-methyl ribonucleotide
  modified_base 92: mod_base = OTHER; note = 2'-O-methyl ribonucleotide
  modified_base 93: mod_base = OTHER; note = 2'-O-methyl ribonucleotide
  modified_base 94: mod_base = OTHER; note = 2'-O-methyl ribonucleotide
  modified_base 95: mod_base = OTHER; note = 2'-O-methyl ribonucleotide
  modified_base 96: mod_base = OTHER; note = 2'-O-methyl ribonucleotide
  modified_base 97: mod_base = OTHER; note = 2'-O-methyl ribonucleotide
  modified_base 98: mod_base = OTHER; note = 2'-O-methyl ribonucleotide
  modified_base 99: mod_base = OTHER; note = 2'-O-methyl ribonucleotide
  modified_base 100: mod_base = OTHER; note = 2'-O-methyl ribonucleotide
  modified_base 1..3: mod_base = OTHER; note = phosphorothioate linkage
  modified_base 98..100: mod_base = OTHER; note = phosphorothioate linkage

SEQ ID NO: 1771 - RNA, 103 nt, synthetic construct; identical to SEQ ID NO: 1700
  source 1..103: mol_type = other RNA
  modified_base 1: mod_base = OTHER; note = 2'-O-methyl ribonucleotide
  modified_base 2: mod_base = OTHER; note = 2'-O-methyl ribonucleotide
  modified_base 3: mod_base = OTHER; note = 2'-O-methyl ribonucleotide
  modified_base 21: mod_base = OTHER; note = 2'-O-methyl ribonucleotide
  modified_base 28: mod_base = OTHER; note = 2'-O-methyl ribonucleotide
  modified_base 29: mod_base = OTHER; note = 2'-O-methyl ribonucleotide
  modified_base 30: mod_base = OTHER; note = 2'-O-methyl ribonucleotide
  modified_base 31: mod_base = OTHER; note = 2'-O-methyl ribonucleotide
  modified_base 32: mod_base = OTHER; note = 2'-O-methyl ribonucleotide
  modified_base 33: mod_base = OTHER; note = 2'-O-methyl ribonucleotide
  modified_base 34: mod_base = OTHER; note = 2'-O-methyl ribonucleotide
  modified_base 35: mod_base = OTHER; note = 2'-O-methyl ribonucleotide
  modified_base 36: mod_base = OTHER; note = 2'-O-methyl ribonucleotide
  modified_base 37: mod_base = OTHER; note = 2'-O-methyl ribonucleotide
  modified_base 38: mod_base = OTHER; note = 2'-O-methyl ribonucleotide
  modified_base 39: mod_base = OTHER; note = 2'-O-methyl ribonucleotide
  modified_base 40: mod_base = OTHER; note = 2'-O-methyl ribonucleotide
  modified_base 41: mod_base = OTHER; note = 2'-O-methyl ribonucleotide
  modified_base 42: mod_base = OTHER; note = 2'-O-methyl ribonucleotide
  modified_base 46: mod_base = OTHER; note = 2'-O-methyl ribonucleotide
  modified_base 48: mod_base = OTHER; note = 2'-O-methyl ribonucleotide
  modified_base 50: mod_base = OTHER; note = 2'-O-methyl ribonucleotide
  modified_base 52: mod_base = OTHER; note = 2'-O-methyl ribonucleotide
  modified_base 53: mod_base = OTHER; note = 2'-O-methyl ribonucleotide
  modified_base 54: mod_base = OTHER; note = 2'-O-methyl ribonucleotide
  modified_base 55: mod_base = OTHER; note = 2'-O-methyl ribonucleotide
  modified_base 56: mod_base = OTHER; note = 2'-O-methyl ribonucleotide
  modified_base 57: mod_base = OTHER; note = 2'-O-methyl ribonucleotide
  modified_base 60: mod_base = OTHER; note = 2'-O-methyl ribonucleotide
  modified_base 61: mod_base = OTHER; note = 2'-O-methyl ribonucleotide
  modified_base 66: mod_base = OTHER; note = 2'-O-methyl ribonucleotide
  modified_base 67: mod_base = OTHER; note = 2'-O-methyl ribonucleotide
  modified_base 70: mod_base = OTHER; note = 2'-O-methyl ribonucleotide
  modified_base 71: mod_base = OTHER; note = 2'-O-methyl ribonucleotide
  modified_base 72: mod_base = OTHER; note = 2'-O-methyl ribonucleotide
  modified_base 73: mod_base = OTHER; note = 2'-O-methyl ribonucleotide
  modified_base 74: mod_base = OTHER; note = 2'-O-methyl ribonucleotide
  modified_base 75: mod_base = OTHER; note = 2'-O-methyl ribonucleotide
  modified_base 76: mod_base = OTHER; note = 2'-O-methyl ribonucleotide
  modified_base 77: mod_base = OTHER; note = 2'-O-methyl ribonucleotide
  modified_base 78: mod_base = OTHER; note = 2'-O-methyl ribonucleotide
  modified_base 79: mod_base = OTHER; note = 2'-O-methyl ribonucleotide
  modified_base 80: mod_base = OTHER; note = 2'-O-methyl ribonucleotide
  modified_base 81: mod_base = OTHER; note = 2'-O-methyl ribonucleotide
  modified_base 83: mod_base = OTHER; note = 2'-O-methyl ribonucleotide
  modified_base 84: mod_base = OTHER; note = 2'-O-methyl ribonucleotide
  modified_base 85: mod_base = OTHER; note = 2'-O-methyl ribonucleotide
  modified_base 86: mod_base = OTHER; note = 2'-O-methyl ribonucleotide
  modified_base 87: mod_base = OTHER; note = 2'-O-methyl ribonucleotide
  modified_base 88: mod_base = OTHER; note = 2'-O-methyl ribonucleotide
  modified_base 89: mod_base = OTHER; note = 2'-O-methyl ribonucleotide
  modified_base 90: mod_base = OTHER; note = 2'-O-methyl ribonucleotide
  modified_base 91: mod_base = OTHER; note = 2'-O-methyl ribonucleotide
  modified_base 92: mod_base = OTHER; note = 2'-O-methyl ribonucleotide
  modified_base 93: mod_base = OTHER; note = 2'-O-methyl ribonucleotide
  modified_base 94: mod_base = OTHER; note = 2'-O-methyl ribonucleotide
  modified_base 95: mod_base = OTHER; note = 2'-O-methyl ribonucleotide
  modified_base 96: mod_base = OTHER; note = 2'-O-methyl ribonucleotide
  modified_base 97: mod_base = OTHER; note = 2'-O-methyl ribonucleotide
  modified_base 98: mod_base = OTHER; note = 2'-O-methyl ribonucleotide
  modified_base 99: mod_base = OTHER; note = 2'-O-methyl ribonucleotide
  modified_base 100: mod_base = OTHER; note = 2'-O-methyl ribonucleotide
  modified_base 1..3: mod_base = OTHER; note = phosphorothioate linkage
  modified_base 98..100: mod_base = OTHER; note = phosphorothioate linkage

SEQ ID NO: 1772 - RNA, 103 nt, synthetic construct; identical to SEQ ID NO: 1643
  source 1..103: mol_type = other RNA
  modified_base 1: mod_base = OTHER; note = 2'-O-methyl ribonucleotide
  modified_base 2: mod_base = OTHER; note = 2'-O-methyl ribonucleotide
  modified_base 3: mod_base = OTHER; note = 2'-O-methyl ribonucleotide
  modified_base 21: mod_base = OTHER; note = 2'-O-methyl ribonucleotide
  modified_base 28: mod_base = OTHER; note = 2'-O-methyl ribonucleotide
  modified_base 29: mod_base = OTHER; note = 2'-O-methyl ribonucleotide
  modified_base 30: mod_base = OTHER; note = 2'-O-methyl ribonucleotide
  modified_base 31: mod_base = OTHER; note = 2'-O-methyl ribonucleotide
  modified_base 32: mod_base = OTHER; note = 2'-O-methyl ribonucleotide
  modified_base 34: mod_base = OTHER; note = 2'-O-methyl ribonucleotide
  modified_base 35: mod_base = OTHER; note = 2'-O-methyl ribonucleotide
  modified_base 36: mod_base = OTHER; note = 2'-O-methyl ribonucleotide
  modified_base 37: mod_base = OTHER; note = 2'-O-methyl ribonucleotide
  modified_base 38: mod_base = OTHER; note = 2'-O-methyl ribonucleotide
  modified_base 39: mod_base = OTHER; note = 2'-O-methyl ribonucleotide
  modified_base 40: mod_base = OTHER; note = 2'-O-methyl ribonucleotide
  modified_base 41: mod_base = OTHER; note = 2'-O-methyl ribonucleotide
  modified_base 42: mod_base = OTHER; note = 2'-O-methyl ribonucleotide
  modified_base 46: mod_base = OTHER; note = 2'-O-methyl ribonucleotide
  modified_base 48: mod_base = OTHER; note = 2'-O-methyl ribonucleotide
  modified_base 50: mod_base = OTHER; note = 2'-O-methyl ribonucleotide
  modified_base 52: mod_base = OTHER; note = 2'-O-methyl ribonucleotide
  modified_base 53: mod_base = OTHER; note = 2'-O-methyl ribonucleotide
  modified_base 54: mod_base = OTHER; note = 2'-O-methyl ribonucleotide
  modified_base 57: mod_base = OTHER; note = 2'-O-methyl ribonucleotide
  modified_base 61: mod_base = OTHER; note = 2'-O-methyl ribonucleotide
  modified_base 66: mod_base = OTHER; note = 2'-O-methyl ribonucleotide
  modified_base 67: mod_base = OTHER; note = 2'-O-methyl ribonucleotide
  modified_base 70: mod_base = OTHER; note = 2'-O-methyl ribonucleotide
  modified_base 71: mod_base = OTHER; note = 2'-O-methyl ribonucleotide
  modified_base 72: mod_base = OTHER; note = 2'-O-methyl ribonucleotide
  modified_base 74: mod_base = OTHER; note = 2'-O-methyl ribonucleotide
  modified_base 75: mod_base = OTHER; note = 2'-O-methyl ribonucleotide
  modified_base 76: mod_base = OTHER; note = 2'-O-methyl ribonucleotide
  modified_base 77: mod_base = OTHER; note = 2'-O-methyl ribonucleotide
  modified_base 78: mod_base = OTHER; note = 2'-O-methyl ribonucleotide
  modified_base 79: mod_base = OTHER; note = 2'-O-methyl ribonucleotide
  modified_base 80: mod_base = OTHER; note = 2'-O-methyl ribonucleotide
  modified_base 82: mod_base = OTHER; note = 2'-O-methyl ribonucleotide
  modified_base 83: mod_base = OTHER; note = 2'-O-methyl ribonucleotide
  modified_base 84: mod_base = OTHER; note = 2'-O-methyl ribonucleotide
  modified_base 85: mod_base = OTHER; note = 2'-O-methyl ribonucleotide
  modified_base 86: mod_base = OTHER; note = 2'-O-methyl ribonucleotide
  modified_base 87: mod_base = OTHER; note = 2'-O-methyl ribonucleotide
  modified_base 89: mod_base = OTHER; note = 2'-O-methyl ribonucleotide
  modified_base 92: mod_base = OTHER; note = 2'-O-methyl ribonucleotide
  modified_base 93: mod_base = OTHER; note = 2'-O-methyl ribonucleotide
  modified_base 94: mod_base = OTHER; note = 2'-O-methyl ribonucleotide
  modified_base 95: mod_base = OTHER; note = 2'-O-methyl ribonucleotide
  modified_base 96: mod_base = OTHER; note = 2'-O-methyl ribonucleotide
  modified_base 97: mod_base = OTHER; note = 2'-O-methyl ribonucleotide
  modified_base 98: mod_base = OTHER; note = 2'-O-methyl ribonucleotide
  modified_base 99: mod_base = OTHER; note = 2'-O-methyl ribonucleotide
  modified_base 100: mod_base = OTHER; note = 2'-O-methyl ribonucleotide
  modified_base 1..3: mod_base = OTHER; note = phosphorothioate linkage
  modified_base 98..100: mod_base = OTHER; note = phosphorothioate linkage

SEQ ID NO: 1773 - RNA, 103 nt, synthetic construct; identical to SEQ ID NO: 1699
  source 1..103: mol_type = other RNA
  modified_base 1: mod_base = OTHER; note = 2'-O-methyl ribonucleotide
  modified_base 2: mod_base = OTHER; note = 2'-O-methyl ribonucleotide
  modified_base 3: mod_base = OTHER; note = 2'-O-methyl ribonucleotide
  modified_base 21: mod_base = OTHER; note = 2'-O-methyl ribonucleotide
  modified_base 28: mod_base = OTHER; note = 2'-O-methyl ribonucleotide
  modified_base 29: mod_base = OTHER; note = 2'-O-methyl ribonucleotide
  modified_base 30: mod_base = OTHER; note = 2'-O-methyl ribonucleotide
  modified_base 31: mod_base = OTHER; note = 2'-O-methyl ribonucleotide
  modified_base 32: mod_base = OTHER; note = 2'-O-methyl ribonucleotide
  modified_base 34: mod_base = OTHER; note = 2'-O-methyl ribonucleotide
  modified_base 35: mod_base = OTHER; note = 2'-O-methyl ribonucleotide
  modified_base 36: mod_base = OTHER; note = 2'-O-methyl ribonucleotide
  modified_base 37: mod_base = OTHER; note = 2'-O-methyl ribonucleotide
  modified_base 38: mod_base = OTHER; note = 2'-O-methyl ribonucleotide
  modified_base 39: mod_base = OTHER; note = 2'-O-methyl ribonucleotide
  modified_base 40: mod_base = OTHER; note = 2'-O-methyl ribonucleotide
  modified_base 41: mod_base = OTHER; note = 2'-O-methyl ribonucleotide
  modified_base 42: mod_base = OTHER; note = 2'-O-methyl ribonucleotide
  modified_base 46: mod_base = OTHER; note = 2'-O-methyl ribonucleotide
  modified_base 48: mod_base = OTHER; note = 2'-O-methyl ribonucleotide
  modified_base 50: mod_base = OTHER; note = 2'-O-methyl ribonucleotide
  modified_base 52: mod_base = OTHER; note = 2'-O-methyl ribonucleotide
  modified_base 53: mod_base = OTHER; note = 2'-O-methyl ribonucleotide
  modified_base 54: mod_base = OTHER; note = 2'-O-methyl ribonucleotide
  modified_base 57: mod_base = OTHER; note = 2'-O-methyl ribonucleotide
  modified_base 61: mod_base = OTHER; note = 2'-O-methyl ribonucleotide
  modified_base 66: mod_base = OTHER; note = 2'-O-methyl ribonucleotide
  modified_base 67: mod_base = OTHER; note = 2'-O-methyl ribonucleotide
  modified_base 70: mod_base = OTHER; note = 2'-O-methyl ribonucleotide
  modified_base 71: mod_base = OTHER; note = 2'-O-methyl ribonucleotide
  modified_base 72: mod_base = OTHER; note = 2'-O-methyl ribonucleotide
  modified_base 74: mod_base = OTHER; note = 2'-O-methyl ribonucleotide
  modified_base 75: mod_base = OTHER; note = 2'-O-methyl ribonucleotide
  modified_base 76: mod_base = OTHER; note = 2'-O-methyl ribonucleotide
  modified_base 77: mod_base = OTHER; note = 2'-O-methyl ribonucleotide
  modified_base 78: mod_base = OTHER; note = 2'-O-methyl ribonucleotide
  modified_base 79: mod_base = OTHER; note = 2'-O-methyl ribonucleotide
  modified_base 80: mod_base = OTHER; note = 2'-O-methyl ribonucleotide
  modified_base 82: mod_base = OTHER; note = 2'-O-methyl ribonucleotide
  modified_base 83: mod_base = OTHER; note = 2'-O-methyl ribonucleotide
  modified_base 84: mod_base = OTHER; note = 2'-O-methyl ribonucleotide
  modified_base 85: mod_base = OTHER; note = 2'-O-methyl ribonucleotide
  modified_base 86: mod_base = OTHER; note = 2'-O-methyl ribonucleotide
  modified_base 87: mod_base = OTHER; note = 2'-O-methyl ribonucleotide
  modified_base 89: mod_base = OTHER; note = 2'-O-methyl ribonucleotide
  modified_base 92: mod_base = OTHER; note = 2'-O-methyl ribonucleotide
  modified_base 93: mod_base = OTHER; note = 2'-O-methyl ribonucleotide
  modified_base 94: mod_base = OTHER; note = 2'-O-methyl ribonucleotide
  modified_base 95: mod_base = OTHER; note = 2'-O-methyl ribonucleotide
  modified_base 96: mod_base = OTHER; note = 2'-O-methyl ribonucleotide
  modified_base 97: mod_base = OTHER; note = 2'-O-methyl ribonucleotide
  modified_base 98: mod_base = OTHER; note = 2'-O-methyl ribonucleotide
  modified_base 99: mod_base = OTHER; note = 2'-O-methyl ribonucleotide
  modified_base 100: mod_base = OTHER; note = 2'-O-methyl ribonucleotide
  modified_base 1..3: mod_base = OTHER; note = phosphorothioate linkage
  modified_base 98..100: mod_base = OTHER; note = phosphorothioate linkage

SEQ ID NO: 1774 - RNA, 103 nt, synthetic construct; identical to SEQ ID NO: 1643
  source 1..103: mol_type = other RNA
  modified_base 1: mod_base = OTHER; note = 2'-O-methyl ribonucleotide
  modified_base 2: mod_base = OTHER; note = 2'-O-methyl ribonucleotide
  modified_base 3: mod_base = OTHER; note = 2'-O-methyl ribonucleotide
  modified_base 21: mod_base = OTHER; note = 2'-O-methyl ribonucleotide
  modified_base 28: mod_base = OTHER; note = 2'-O-methyl ribonucleotide
  modified_base 29: mod_base = OTHER; note = 2'-O-methyl ribonucleotide
  modified_base 30: mod_base = OTHER; note = 2'-O-methyl ribonucleotide
  modified_base 31: mod_base = OTHER; note = 2'-O-methyl ribonucleotide
  modified_base 32: mod_base = OTHER; note = 2'-O-methyl ribonucleotide
  modified_base 34: mod_base = OTHER; note = 2'-O-methyl ribonucleotide
  modified_base 35: mod_base = OTHER; note = 2'-O-methyl ribonucleotide
  modified_base 36: mod_base = OTHER; note = 2'-O-methyl ribonucleotide
  modified_base 37: mod_base = OTHER; note = 2'-O-methyl ribonucleotide
  modified_base 38: mod_base = OTHER; note = 2'-O-methyl ribonucleotide
  modified_base 39: mod_base = OTHER; note = 2'-O-methyl ribonucleotide
  modified_base 40: mod_base = OTHER; note = 2'-O-methyl ribonucleotide
  modified_base 41: mod_base = OTHER; note = 2'-O-methyl ribonucleotide
  modified_base 42: mod_base = OTHER; note = 2'-O-methyl ribonucleotide
  modified_base 46: mod_base = OTHER; note = 2'-O-methyl ribonucleotide
  modified_base 48: mod_base = OTHER; note = 2'-O-methyl ribonucleotide
  modified_base 50: mod_base = OTHER; note = 2'-O-methyl ribonucleotide
  modified_base 52: mod_base = OTHER; note = 2'-O-methyl ribonucleotide
  modified_base 53: mod_base = OTHER; note = 2'-O-methyl ribonucleotide
  modified_base 54: mod_base = OTHER; note = 2'-O-methyl ribonucleotide
  modified_base 57: mod_base = OTHER; note = 2'-O-methyl ribonucleotide
  modified_base 61: mod_base = OTHER; note = 2'-O-methyl ribonucleotide
  modified_base 66: mod_base = OTHER; note = 2'-O-methyl ribonucleotide
  modified_base 67: mod_base = OTHER; note = 2'-O-methyl ribonucleotide
  modified_base 70: mod_base = OTHER; note = 2'-O-methyl ribonucleotide
  modified_base 71: mod_base = OTHER; note = 2'-O-methyl ribonucleotide
  modified_base 72: mod_base = OTHER; note = 2'-O-methyl ribonucleotide
  modified_base 74: mod_base = OTHER; note = 2'-O-methyl ribonucleotide
  modified_base 75: mod_base = OTHER; note = 2'-O-methyl ribonucleotide
  modified_base 76: mod_base = OTHER; note = 2'-O-methyl ribonucleotide
  modified_base 77: mod_base = OTHER; note = 2'-O-methyl ribonucleotide
  modified_base 78: mod_base = OTHER; note = 2'-O-methyl ribonucleotide
  modified_base 79: mod_base = OTHER; note = 2'-O-methyl ribonucleotide
  modified_base 80: mod_base = OTHER; note = 2'-O-methyl ribonucleotide
  modified_base 82: mod_base = OTHER; note = 2'-O-methyl ribonucleotide
  modified_base 83: mod_base = OTHER; note = 2'-O-methyl ribonucleotide
  modified_base 84: mod_base = OTHER; note = 2'-O-methyl ribonucleotide
  modified_base 85: mod_base = OTHER; note = 2'-O-methyl ribonucleotide
  modified_base 86: mod_base = OTHER; note = 2'-O-methyl ribonucleotide
  modified_base 87: mod_base = OTHER; note = 2'-O-methyl ribonucleotide
  modified_base 89: mod_base = OTHER; note = 2'-O-methyl ribonucleotide
  modified_base 92: mod_base = OTHER; note = 2'-O-methyl ribonucleotide
  modified_base 93: mod_base = OTHER; note = 2'-O-methyl ribonucleotide
  modified_base 94: mod_base = OTHER; note = 2'-O-methyl ribonucleotide
  modified_base 95: mod_base = OTHER; note = 2'-O-methyl ribonucleotide
  modified_base 96: mod_base = OTHER; note = 2'-O-methyl ribonucleotide
  modified_base 97: mod_base = OTHER; note = 2'-O-methyl ribonucleotide
  modified_base 98: mod_base = OTHER; note = 2'-O-methyl ribonucleotide
  modified_base 99: mod_base = OTHER; note = 2'-O-methyl ribonucleotide
  modified_base 100: mod_base = OTHER; note = 2'-O-methyl ribonucleotide
  modified_base 1..3: mod_base = OTHER; note = phosphorothioate linkage
  modified_base 64..65: mod_base = OTHER; note = phosphorothioate linkage
  modified_base 98..100: mod_base = OTHER; note = phosphorothioate linkage

SEQ ID NO: 1775 - RNA, 103 nt, synthetic construct; identical to SEQ ID NO: 1699
  source 1..103: mol_type = other RNA
  modified_base 1: mod_base = OTHER; note = 2'-O-methyl ribonucleotide
  modified_base 2: mod_base = OTHER; note = 2'-O-methyl ribonucleotide
  modified_base 3: mod_base = OTHER; note = 2'-O-methyl ribonucleotide
  modified_base 21: mod_base = OTHER; note = 2'-O-methyl ribonucleotide
  modified_base 28: mod_base = OTHER; note = 2'-O-methyl ribonucleotide
  modified_base 29: mod_base = OTHER; note = 2'-O-methyl ribonucleotide
  modified_base 30: mod_base = OTHER; note = 2'-O-methyl ribonucleotide
  modified_base 31: mod_base = OTHER; note = 2'-O-methyl ribonucleotide
  modified_base 32: mod_base = OTHER; note = 2'-O-methyl ribonucleotide
  modified_base 34: mod_base = OTHER; note = 2'-O-methyl ribonucleotide
  modified_base 35: mod_base = OTHER; note = 2'-O-methyl ribonucleotide
  modified_base 36: mod_base = OTHER; note = 2'-O-methyl ribonucleotide
  modified_base 37: mod_base = OTHER; note = 2'-O-methyl ribonucleotide
  modified_base 38: mod_base = OTHER; note = 2'-O-methyl ribonucleotide
  modified_base 39: mod_base = OTHER; note = 2'-O-methyl ribonucleotide
  modified_base 40: mod_base = OTHER; note = 2'-O-methyl ribonucleotide
  modified_base 41: mod_base = OTHER; note = 2'-O-methyl ribonucleotide
  modified_base 42: mod_base = OTHER; note = 2'-O-methyl ribonucleotide
  modified_base 46: mod_base = OTHER; note = 2'-O-methyl ribonucleotide
  modified_base 48: mod_base = OTHER; note = 2'-O-methyl ribonucleotide
  modified_base 50: mod_base = OTHER; note = 2'-O-methyl ribonucleotide
  modified_base 52: mod_base = OTHER; note = 2'-O-methyl ribonucleotide
  modified_base 53: mod_base = OTHER; note = 2'-O-methyl ribonucleotide
  modified_base 54: mod_base = OTHER; note = 2'-O-methyl ribonucleotide
  modified_base 57: mod_base = OTHER; note = 2'-O-methyl ribonucleotide
  modified_base 61: mod_base = OTHER; note = 2'-O-methyl ribonucleotide
  modified_base 66: mod_base = OTHER; note = 2'-O-methyl ribonucleotide
  modified_base 67: mod_base = OTHER; note = 2'-O-methyl ribonucleotide
  modified_base 70: mod_base = OTHER; note = 2'-O-methyl ribonucleotide
  modified_base 71: mod_base = OTHER; note = 2'-O-methyl ribonucleotide
  modified_base 72: mod_base = OTHER; note = 2'-O-methyl ribonucleotide
  modified_base 74: mod_base = OTHER; note = 2'-O-methyl ribonucleotide
  modified_base 75: mod_base = OTHER; note = 2'-O-methyl ribonucleotide
  modified_base 76: mod_base = OTHER; note = 2'-O-methyl ribonucleotide
  modified_base 77: mod_base = OTHER; note = 2'-O-methyl ribonucleotide
  modified_base 78: mod_base = OTHER; note = 2'-O-methyl ribonucleotide
  modified_base 79: mod_base = OTHER; note = 2'-O-methyl ribonucleotide
  modified_base 80: mod_base = OTHER; note = 2'-O-methyl ribonucleotide
  modified_base 82: mod_base = OTHER; note = 2'-O-methyl ribonucleotide
  modified_base 83: mod_base = OTHER; note = 2'-O-methyl ribonucleotide
  modified_base 84: mod_base = OTHER; note = 2'-O-methyl ribonucleotide
  modified_base 85: mod_base = OTHER; note = 2'-O-methyl ribonucleotide
  modified_base 86: mod_base = OTHER; note = 2'-O-methyl ribonucleotide
  modified_base 87: mod_base = OTHER; note = 2'-O-methyl ribonucleotide
  modified_base 89: mod_base = OTHER; note = 2'-O-methyl ribonucleotide
  modified_base 92: mod_base = OTHER; note = 2'-O-methyl ribonucleotide
  modified_base 93: mod_base = OTHER; note = 2'-O-methyl ribonucleotide
  modified_base 94: mod_base = OTHER; note = 2'-O-methyl ribonucleotide
  modified_base 95: mod_base = OTHER; note = 2'-O-methyl ribonucleotide
  modified_base 96: mod_base = OTHER; note = 2'-O-methyl ribonucleotide
  modified_base 97: mod_base = OTHER; note = 2'-O-methyl ribonucleotide
  modified_base 98: mod_base = OTHER; note = 2'-O-methyl ribonucleotide
  modified_base 99: mod_base = OTHER; note = 2'-O-methyl ribonucleotide
  modified_base 100: mod_base = OTHER; note = 2'-O-methyl ribonucleotide
  modified_base 1..3: mod_base = OTHER; note = phosphorothioate linkage
  modified_base 64..65: mod_base = OTHER; note = phosphorothioate linkage
  modified_base 98..100: mod_base = OTHER; note = phosphorothioate linkage

SEQ ID NO: 1776 - RNA, 103 nt, synthetic construct; identical to SEQ ID NO: 1700
  source 1..103: mol_type = other RNA
  modified_base 1: mod_base = OTHER; note = 2'-O-methyl ribonucleotide
  modified_base 2: mod_base = OTHER; note = 2'-O-methyl ribonucleotide
  modified_base 3: mod_base = OTHER; note = 2'-O-methyl ribonucleotide
  modified_base 21: mod_base = OTHER; note = 2'-O-methyl ribonucleotide
  modified_base 28: mod_base = OTHER; note = 2'-O-methyl ribonucleotide
  modified_base 29: mod_base = OTHER; note = 2'-O-methyl ribonucleotide
  modified_base 30: mod_base = OTHER; note = 2'-O-methyl ribonucleotide
  modified_base 31: mod_base = OTHER; note = 2'-O-methyl ribonucleotide
  modified_base 32: mod_base = OTHER; note = 2'-O-methyl ribonucleotide
  modified_base 34: mod_base = OTHER; note = 2'-O-methyl ribonucleotide
  modified_base 35: mod_base = OTHER; note = 2'-O-methyl ribonucleotide
  modified_base 36: mod_base = OTHER; note = 2'-O-methyl ribonucleotide
  modified_base 37: mod_base = OTHER; note = 2'-O-methyl ribonucleotide
  modified_base 38: mod_base = OTHER; note = 2'-O-methyl ribonucleotide
  modified_base 39: mod_base = OTHER; note = 2'-O-methyl ribonucleotide
  modified_base 40: mod_base = OTHER; note = 2'-O-methyl ribonucleotide
  modified_base 41: mod_base = OTHER; note = 2'-O-methyl ribonucleotide
  modified_base 42: mod_base = OTHER; note = 2'-O-methyl ribonucleotide
  modified_base 46: mod_base = OTHER; note = 2'-O-methyl ribonucleotide
  modified_base 48: mod_base = OTHER; note = 2'-O-methyl ribonucleotide
  modified_base 50: mod_base = OTHER; note = 2'-O-methyl ribonucleotide
  modified_base 52: mod_base = OTHER; note = 2'-O-methyl ribonucleotide
  modified_base 53: mod_base = OTHER; note = 2'-O-methyl ribonucleotide
  modified_base 54: mod_base = OTHER; note = 2'-O-methyl ribonucleotide
  modified_base 55: mod_base = OTHER; note = 2'-O-methyl ribonucleotide
  modified_base 56: mod_base = OTHER; note = 2'-O-methyl ribonucleotide
  modified_base 57: mod_base = OTHER; note = 2'-O-methyl ribonucleotide
  modified_base 60: mod_base = OTHER; note = 2'-O-methyl ribonucleotide
  modified_base 61: mod_base = OTHER; note = 2'-O-methyl ribonucleotide
  modified_base 66: mod_base = OTHER; note = 2'-O-methyl ribonucleotide
  modified_base 67: mod_base = OTHER; note = 2'-O-methyl ribonucleotide
  modified_base 70: mod_base = OTHER; note = 2'-O-methyl ribonucleotide
  modified_base 71: mod_base = OTHER; note = 2'-O-methyl ribonucleotide
  modified_base 72: mod_base = OTHER; note = 2'-O-methyl ribonucleotide
  modified_base 74: mod_base = OTHER; note = 2'-O-methyl ribonucleotide
  modified_base 75: mod_base = OTHER; note = 2'-O-methyl ribonucleotide
  modified_base 76: mod_base = OTHER; note = 2'-O-methyl ribonucleotide
  modified_base 77: mod_base = OTHER; note = 2'-O-methyl ribonucleotide
  modified_base 78: mod_base = OTHER; note = 2'-O-methyl ribonucleotide
  modified_base 79: mod_base = OTHER; note = 2'-O-methyl ribonucleotide
  modified_base 80: mod_base = OTHER; note = 2'-O-methyl ribonucleotide
  modified_base 81: mod_base = OTHER; note = 2'-O-methyl ribonucleotide
  modified_base 83: mod_base = OTHER; note = 2'-O-methyl ribonucleotide
  modified_base 84: mod_base = OTHER; note = 2'-O-methyl ribonucleotide
  modified_base 85: mod_base = OTHER; note = 2'-O-methyl ribonucleotide
  modified_base 86: mod_base = OTHER; note = 2'-O-methyl ribonucleotide
  modified_base 87: mod_base = OTHER; note = 2'-O-methyl ribonucleotide
  modified_base 88: mod_base = OTHER; note = 2'-O-methyl ribonucleotide
  modified_base 89: mod_base = OTHER; note = 2'-O-methyl ribonucleotide
  modified_base 90: mod_base = OTHER; note = 2'-O-methyl ribonucleotide
  modified_base 91: mod_base = OTHER; note = 2'-O-methyl ribonucleotide
  modified_base 92: mod_base = OTHER; note = 2'-O-methyl ribonucleotide
  modified_base 93: mod_base = OTHER; note = 2'-O-methyl ribonucleotide
  modified_base 94: mod_base = OTHER; note = 2'-O-methyl ribonucleotide
  modified_base 95: mod_base = OTHER; note = 2'-O-methyl ribonucleotide
  modified_base 96: mod_base = OTHER; note = 2'-O-methyl ribonucleotide
  modified_base 97: mod_base = OTHER; note = 2'-O-methyl ribonucleotide
  modified_base 98: mod_base = OTHER; note = 2'-O-methyl ribonucleotide
  modified_base 99: mod_base = OTHER; note = 2'-O-methyl ribonucleotide
  modified_base 100: mod_base = OTHER; note = 2'-O-methyl ribonucleotide
  modified_base 1..3: mod_base = OTHER; note = phosphorothioate linkage
  modified_base 64..65: mod_base = OTHER; note = phosphorothioate linkage
  modified_base 98..100: mod_base = OTHER; note = phosphorothioate linkage

SEQ ID NO: 1777 - RNA, 103 nt, synthetic construct; identical to SEQ ID NO: 1643
  source 1..103: mol_type = other RNA
  modified_base 1: mod_base = OTHER; note = 2'-O-methyl ribonucleotide
  modified_base 2: mod_base = OTHER; note = 2'-O-methyl ribonucleotide
  modified_base 3: mod_base = OTHER; note = 2'-O-methyl ribonucleotide
  modified_base 21: mod_base = OTHER; note = 2'-O-methyl ribonucleotide
  modified_base 28: mod_base = OTHER; note = 2'-O-methyl ribonucleotide
  modified_base 29: mod_base = OTHER; note = 2'-O-methyl ribonucleotide
  modified_base 30: mod_base = OTHER; note = 2'-O-methyl ribonucleotide
  modified_base 31: mod_base = OTHER; note = 2'-O-methyl ribonucleotide
  modified_base 32: mod_base = OTHER; note = 2'-O-methyl ribonucleotide
  modified_base 34: mod_base = OTHER; note = 2'-O-methyl ribonucleotide
  modified_base 35: mod_base = OTHER; note = 2'-O-methyl ribonucleotide
  modified_base 36: mod_base = OTHER; note = 2'-O-methyl ribonucleotide
  modified_base 37: mod_base = OTHER; note = 2'-O-methyl ribonucleotide
  modified_base 38: mod_base = OTHER; note = 2'-O-methyl ribonucleotide
  modified_base 39: mod_base = OTHER; note = 2'-O-methyl ribonucleotide
  modified_base 40: mod_base = OTHER; note = 2'-O-methyl ribonucleotide
  modified_base 41: mod_base = OTHER; note = 2'-O-methyl ribonucleotide
  modified_base 42: mod_base = OTHER; note = 2'-O-methyl ribonucleotide
  modified_base 46: mod_base = OTHER; note = 2'-O-methyl ribonucleotide
  modified_base 48: mod_base = OTHER; note = 2'-O-methyl ribonucleotide
  modified_base 50: mod_base = OTHER; note = 2'-O-methyl ribonucleotide
  modified_base 52: mod_base = OTHER; note = 2'-O-methyl ribonucleotide
  modified_base 53: mod_base = OTHER; note = 2'-O-methyl ribonucleotide
  modified_base 54: mod_base = OTHER; note = 2'-O-methyl ribonucleotide
  modified_base 57: mod_base = OTHER; note = 2'-O-methyl ribonucleotide
  modified_base 61: mod_base = OTHER; note = 2'-O-methyl ribonucleotide
  modified_base 66: mod_base = OTHER; note = 2'-O-methyl ribonucleotide
  modified_base 67: mod_base = OTHER; note = 2'-O-methyl ribonucleotide
  modified_base 70: mod_base = OTHER; note = 2'-O-methyl ribonucleotide
  modified_base 71: mod_base = OTHER; note = 2'-O-methyl ribonucleotide
  modified_base 72: mod_base = OTHER; note = 2'-O-methyl ribonucleotide
  modified_base 74: mod_base = OTHER; note = 2'-O-methyl ribonucleotide
  modified_base 75: mod_base = OTHER; note = 2'-O-methyl ribonucleotide
  modified_base 76: mod_base = OTHER; note = 2'-O-methyl ribonucleotide
  modified_base 77: mod_base = OTHER; note = 2'-O-methyl ribonucleotide
  modified_base 78: mod_base = OTHER; note = 2'-O-methyl ribonucleotide
  modified_base 79: mod_base = OTHER; note = 2'-O-methyl ribonucleotide
  modified_base 80: mod_base = OTHER; note = 2'-O-methyl ribonucleotide
  modified_base 82: mod_base = OTHER; note = 2'-O-methyl ribonucleotide
  modified_base 83: mod_base = OTHER; note = 2'-O-methyl ribonucleotide
  modified_base 84: mod_base = OTHER; note = 2'-O-methyl ribonucleotide
  modified_base 85: mod_base = OTHER; note = 2'-O-methyl ribonucleotide
  modified_base 86: mod_base = OTHER; note = 2'-O-methyl ribonucleotide
  modified_base 87: mod_base = OTHER; note = 2'-O-methyl ribonucleotide
  modified_base 89: mod_base = OTHER; note = 2'-O-methyl ribonucleotide
  modified_base 92: mod_base = OTHER; note = 2'-O-methyl ribonucleotide
  modified_base 93: mod_base = OTHER; note = 2'-O-methyl ribonucleotide
  modified_base 94: mod_base = OTHER; note = 2'-O-methyl ribonucleotide
  modified_base 95: mod_base = OTHER; note = 2'-O-methyl ribonucleotide
  modified_base 96: mod_base = OTHER; note = 2'-O-methyl ribonucleotide
  modified_base 97: mod_base = OTHER; note = 2'-O-methyl ribonucleotide
  modified_base 98: mod_base = OTHER; note = 2'-O-methyl ribonucleotide
  modified_base 99: mod_base = OTHER; note = 2'-O-methyl ribonucleotide
  modified_base 100: mod_base = OTHER; note = 2'-O-methyl ribonucleotide
  modified_base 1..3: mod_base = OTHER; note = phosphorothioate linkage
  modified_base 45..46: mod_base = OTHER; note = phosphorothioate linkage
  modified_base 98..100: mod_base = OTHER; note = phosphorothioate linkage

SEQ ID NO: 1778 - RNA, 103 nt, synthetic construct; identical to SEQ ID NO: 1699
  source 1..103: mol_type = other RNA
  modified_base 1: mod_base = OTHER; note = 2'-O-methyl ribonucleotide
  modified_base 2: mod_base = OTHER; note = 2'-O-methyl ribonucleotide
  modified_base 3: mod_base = OTHER; note = 2'-O-methyl ribonucleotide
  modified_base 21: mod_base = OTHER; note = 2'-O-methyl ribonucleotide
  modified_base 28: mod_base = OTHER; note = 2'-O-methyl ribonucleotide
  modified_base 29: mod_base = OTHER; note = 2'-O-methyl ribonucleotide
  modified_base 30: mod_base = OTHER; note = 2'-O-methyl ribonucleotide
  modified_base 31: mod_base = OTHER; note = 2'-O-methyl ribonucleotide
  modified_base 32: mod_base = OTHER; note = 2'-O-methyl ribonucleotide
  modified_base 34: mod_base = OTHER; note = 2'-O-methyl ribonucleotide
  modified_base 35: mod_base = OTHER; note = 2'-O-methyl ribonucleotide
  modified_base 36: mod_base = OTHER; note = 2'-O-methyl ribonucleotide
  modified_base 37: mod_base = OTHER; note = 2'-O-methyl ribonucleotide
  modified_base 38: mod_base = OTHER; note = 2'-O-methyl ribonucleotide
  modified_base 39: mod_base = OTHER; note = 2'-O-methyl ribonucleotide
  modified_base 40: mod_base = OTHER; note = 2'-O-methyl ribonucleotide
  modified_base 41: mod_base = OTHER; note = 2'-O-methyl ribonucleotide
  modified_base 42: mod_base = OTHER; note = 2'-O-methyl ribonucleotide
  modified_base 46: mod_base = OTHER; note = 2'-O-methyl ribonucleotide
  modified_base 48: mod_base = OTHER; note = 2'-O-methyl ribonucleotide
  modified_base 50: mod_base = OTHER; note = 2'-O-methyl ribonucleotide
  modified_base 52: mod_base = OTHER; note = 2'-O-methyl ribonucleotide
  modified_base 53: mod_base = OTHER; note = 2'-O-methyl ribonucleotide
  modified_base 54: mod_base = OTHER; note = 2'-O-methyl ribonucleotide
  modified_base 57: mod_base = OTHER; note = 2'-O-methyl ribonucleotide
  modified_base 61: mod_base = OTHER; note = 2'-O-methyl ribonucleotide
  modified_base 66: mod_base = OTHER; note = 2'-O-methyl ribonucleotide
  modified_base 67: mod_base = OTHER; note = 2'-O-methyl ribonucleotide
  modified_base 70: mod_base = OTHER; note = 2'-O-methyl ribonucleotide
  modified_base 71: mod_base = OTHER; note = 2'-O-methyl ribonucleotide
  modified_base 72: mod_base = OTHER; note = 2'-O-methyl ribonucleotide
  modified_base 74: mod_base = OTHER; note = 2'-O-methyl ribonucleotide
  modified_base 75: mod_base = OTHER; note = 2'-O-methyl ribonucleotide
  modified_base 76: mod_base = OTHER; note = 2'-O-methyl ribonucleotide
  modified_base 77: mod_base = OTHER; note = 2'-O-methyl ribonucleotide
  modified_base 78: mod_base = OTHER; note = 2'-O-methyl ribonucleotide
  modified_base 79: mod_base = OTHER; note = 2'-O-methyl ribonucleotide
  modified_base 80: mod_base = OTHER; note = 2'-O-methyl ribonucleotide
  modified_base 82: mod_base = OTHER; note = 2'-O-methyl ribonucleotide
  modified_base 83: mod_base = OTHER; note = 2'-O-methyl ribonucleotide
  modified_base 84: mod_base = OTHER; note = 2'-O-methyl ribonucleotide
  modified_base 85: mod_base = OTHER; note = 2'-O-methyl ribonucleotide
  modified_base 86: mod_base = OTHER; note = 2'-O-methyl ribonucleotide
  modified_base 87: mod_base = OTHER; note = 2'-O-methyl ribonucleotide
  modified_base 89: mod_base = OTHER; note = 2'-O-methyl ribonucleotide
  modified_base 92: mod_base = OTHER; note = 2'-O-methyl ribonucleotide
  modified_base 93: mod_base = OTHER; note = 2'-O-methyl ribonucleotide
  modified_base 94: mod_base = OTHER; note = 2'-O-methyl ribonucleotide
  modified_base 95: mod_base = OTHER; note = 2'-O-methyl ribonucleotide
  modified_base 96: mod_base = OTHER; note = 2'-O-methyl ribonucleotide
  modified_base 97: mod_base = OTHER; note = 2'-O-methyl ribonucleotide
  modified_base 98: mod_base = OTHER; note = 2'-O-methyl ribonucleotide
  modified_base 99: mod_base = OTHER; note = 2'-O-methyl ribonucleotide
  modified_base 100: mod_base = OTHER; note = 2'-O-methyl ribonucleotide
  modified_base 1..3: mod_base = OTHER; note = phosphorothioate linkage
  modified_base 45..46: mod_base = OTHER; note = phosphorothioate linkage
  modified_base 98..100: mod_base = OTHER; note = phosphorothioate linkage

SEQ ID NO: 1779 - RNA, 103 nt, synthetic construct; identical to SEQ ID NO: 1700
  source 1..103: mol_type = other RNA
  modified_base 1: mod_base = OTHER; note = 2'-O-methyl ribonucleotide
  modified_base 2: mod_base = OTHER; note = 2'-O-methyl ribonucleotide
  modified_base 3: mod_base = OTHER; note = 2'-O-methyl ribonucleotide
  modified_base 21: mod_base = OTHER; note = 2'-O-methyl ribonucleotide
  modified_base 28: mod_base = OTHER; note = 2'-O-methyl ribonucleotide
  modified_base 29: mod_base = OTHER; note = 2'-O-methyl ribonucleotide
  modified_base 30: mod_base = OTHER; note = 2'-O-methyl ribonucleotide
  modified_base 31: mod_base = OTHER; note = 2'-O-methyl ribonucleotide
  modified_base 32: mod_base = OTHER; note = 2'-O-methyl ribonucleotide
  modified_base 34: mod_base = OTHER; note = 2'-O-methyl ribonucleotide
  modified_base 35: mod_base = OTHER; note = 2'-O-methyl ribonucleotide
  modified_base 36: mod_base = OTHER; note = 2'-O-methyl ribonucleotide
  modified_base 37: mod_base = OTHER; note = 2'-O-methyl ribonucleotide
  modified_base 38: mod_base = OTHER; note = 2'-O-methyl ribonucleotide
  modified_base 39: mod_base = OTHER; note = 2'-O-methyl ribonucleotide
  modified_base 40: mod_base = OTHER; note = 2'-O-methyl ribonucleotide
  modified_base 41: mod_base = OTHER; note = 2'-O-methyl ribonucleotide
  modified_base 42: mod_base = OTHER; note = 2'-O-methyl ribonucleotide
  modified_base 46: mod_base = OTHER; note = 2'-O-methyl ribonucleotide
  modified_base 48: mod_base = OTHER; note = 2'-O-methyl ribonucleotide
  modified_base 50: mod_base = OTHER; note = 2'-O-methyl ribonucleotide
  modified_base 52: mod_base = OTHER; note = 2'-O-methyl ribonucleotide
  modified_base 53: mod_base = OTHER; note = 2'-O-methyl ribonucleotide
  modified_base 54: mod_base = OTHER; note = 2'-O-methyl ribonucleotide
  modified_base 55: mod_base = OTHER; note = 2'-O-methyl ribonucleotide
  modified_base 56: mod_base = OTHER; note = 2'-O-methyl ribonucleotide
  modified_base 57: mod_base = OTHER; note = 2'-O-methyl ribonucleotide
  modified_base 60: mod_base = OTHER; note = 2'-O-methyl ribonucleotide
  modified_base 61: mod_base = OTHER; note = 2'-O-methyl ribonucleotide
  modified_base 66: mod_base = OTHER; note = 2'-O-methyl ribonucleotide
  modified_base 67: mod_base = OTHER; note = 2'-O-methyl ribonucleotide
  modified_base 70: mod_base = OTHER; note = 2'-O-methyl ribonucleotide
  modified_base 71: mod_base = OTHER; note = 2'-O-methyl ribonucleotide
  modified_base 72: mod_base = OTHER; note = 2'-O-methyl ribonucleotide
  modified_base 74: mod_base = OTHER; note = 2'-O-methyl ribonucleotide
  modified_base 75: mod_base = OTHER; note = 2'-O-methyl ribonucleotide
  modified_base 76: mod_base = OTHER; note = 2'-O-methyl ribonucleotide
  modified_base 77: mod_base = OTHER; note = 2'-O-methyl ribonucleotide
  modified_base 78: mod_base = OTHER; note = 2'-O-methyl ribonucleotide
  modified_base 79: mod_base = OTHER; note = 2'-O-methyl ribonucleotide
  modified_base 80: mod_base = OTHER; note = 2'-O-methyl ribonucleotide
  modified_base 81: mod_base = OTHER; note = 2'-O-methyl ribonucleotide
  modified_base 83: mod_base = OTHER; note = 2'-O-methyl ribonucleotide
  modified_base 84: mod_base = OTHER; note = 2'-O-methyl ribonucleotide
  modified_base 85: mod_base = OTHER; note = 2'-O-methyl ribonucleotide
  modified_base 86: mod_base = OTHER; note = 2'-O-methyl ribonucleotide
  modified_base 87: mod_base = OTHER; note = 2'-O-methyl ribonucleotide
  modified_base 88: mod_base = OTHER; note = 2'-O-methyl ribonucleotide
  modified_base 89: mod_base = OTHER; note = 2'-O-methyl ribonucleotide
  modified_base 90: mod_base = OTHER; note = 2'-O-methyl ribonucleotide
  modified_base 91: mod_base = OTHER; note = 2'-O-methyl ribonucleotide
  modified_base 92: mod_base = OTHER; note = 2'-O-methyl ribonucleotide
  modified_base 93: mod_base = OTHER; note = 2'-O-methyl ribonucleotide
  modified_base 94: mod_base = OTHER; note = 2'-O-methyl ribonucleotide
  modified_base 95: mod_base = OTHER; note = 2'-O-methyl ribonucleotide
  modified_base 96: mod_base = OTHER; note = 2'-O-methyl ribonucleotide
  modified_base 97: mod_base = OTHER; note = 2'-O-methyl ribonucleotide
  modified_base 98: mod_base = OTHER; note = 2'-O-methyl ribonucleotide
  modified_base 99: mod_base = OTHER; note = 2'-O-methyl ribonucleotide
  modified_base 100: mod_base = OTHER; note = 2'-O-methyl ribonucleotide
  modified_base 1..3: mod_base = OTHER; note = phosphorothioate linkage
  modified_base 45..46: mod_base = OTHER; note = phosphorothioate linkage
  modified_base 98..100: mod_base = OTHER; note = phosphorothioate linkage

SEQ ID NO: 1780 - RNA, 103 nt, synthetic construct; identical to SEQ ID NO: 1643
  source 1..103: mol_type = other RNA
  modified_base 1: mod_base = OTHER; note = 2'-O-methyl ribonucleotide
  modified_base 2: mod_base = OTHER; note = 2'-O-methyl ribonucleotide
  modified_base 3: mod_base = OTHER; note = 2'-O-methyl ribonucleotide
  modified_base 21: mod_base = OTHER; note = 2'-O-methyl ribonucleotide
  modified_base 28: mod_base = OTHER; note = 2'-O-methyl ribonucleotide
  modified_base 29: mod_base = OTHER; note = 2'-O-methyl ribonucleotide
  modified_base 30: mod_base = OTHER; note = 2'-O-methyl ribonucleotide
  modified_base 31: mod_base = OTHER; note = 2'-O-methyl ribonucleotide
  modified_base 32: mod_base = OTHER; note = 2'-O-methyl ribonucleotide
  modified_base 34: mod_base = OTHER; note = 2'-O-methyl ribonucleotide
  modified_base 35: mod_base = OTHER; note = 2'-O-methyl ribonucleotide
  modified_base 36: mod_base = OTHER; note = 2'-O-methyl ribonucleotide
  modified_base 37: mod_base = OTHER; note = 2'-O-methyl ribonucleotide
  modified_base 38: mod_base = OTHER; note = 2'-O-methyl ribonucleotide
  modified_base 39: mod_base = OTHER; note = 2'-O-methyl ribonucleotide
  modified_base 40: mod_base = OTHER; note = 2'-O-methyl ribonucleotide
  modified_base 41: mod_base = OTHER; note = 2'-O-methyl ribonucleotide
  modified_base 42: mod_base = OTHER; note = 2'-O-methyl ribonucleotide
  modified_base 46: mod_base = OTHER; note = 2'-O-methyl ribonucleotide
  modified_base 48: mod_base = OTHER; note = 2'-O-methyl ribonucleotide
  modified_base 50: mod_base = OTHER; note = 2'-O-methyl ribonucleotide
  modified_base 52: mod_base = OTHER; note = 2'-O-methyl ribonucleotide
  modified_base 53: mod_base = OTHER; note = 2'-O-methyl ribonucleotide
  modified_base 54: mod_base = OTHER; note = 2'-O-methyl ribonucleotide
  modified_base 57: mod_base = OTHER; note = 2'-O-methyl ribonucleotide
  modified_base 61: mod_base = OTHER; note = 2'-O-methyl ribonucleotide
  modified_base 66: mod_base = OTHER; note = 2'-O-methyl ribonucleotide
  modified_base 67: mod_base = OTHER; note = 2'-O-methyl ribonucleotide
  modified_base 70: mod_base = OTHER; note = 2'-O-methyl ribonucleotide
  modified_base 71: mod_base = OTHER; note = 2'-O-methyl ribonucleotide
  modified_base 72: mod_base = OTHER; note = 2'-O-methyl ribonucleotide
  modified_base 74: mod_base = OTHER; note = 2'-O-methyl ribonucleotide
  modified_base 75: mod_base = OTHER; note = 2'-O-methyl ribonucleotide
  modified_base 76: mod_base = OTHER; note = 2'-O-methyl ribonucleotide
  modified_base 77: mod_base = OTHER; note = 2'-O-methyl ribonucleotide
  modified_base 78: mod_base = OTHER; note = 2'-O-methyl ribonucleotide
  modified_base 79: mod_base = OTHER; note = 2'-O-methyl ribonucleotide
  modified_base 80: mod_base = OTHER; note = 2'-O-methyl ribonucleotide
  modified_base 82: mod_base = OTHER; note = 2'-O-methyl ribonucleotide
  modified_base 83: mod_base = OTHER; note = 2'-O-methyl ribonucleotide
  modified_base 84: mod_base = OTHER; note = 2'-O-methyl ribonucleotide
  modified_base 85: mod_base = OTHER; note = 2'-O-methyl ribonucleotide
  modified_base 86: mod_base = OTHER; note = 2'-O-methyl ribonucleotide
  modified_base 87: mod_base = OTHER; note = 2'-O-methyl ribonucleotide
  modified_base 89: mod_base = OTHER; note = 2'-O-methyl ribonucleotide
  modified_base 92: mod_base = OTHER; note = 2'-O-methyl ribonucleotide
  modified_base 93: mod_base = OTHER; note = 2'-O-methyl ribonucleotide
  modified_base 94: mod_base = OTHER; note = 2'-O-methyl ribonucleotide
  modified_base 95: mod_base = OTHER; note = 2'-O-methyl ribonucleotide
  modified_base 96: mod_base = OTHER; note = 2'-O-methyl ribonucleotide
  modified_base 97: mod_base = OTHER; note = 2'-O-methyl ribonucleotide
  modified_base 98: mod_base = OTHER; note = 2'-O-methyl ribonucleotide
  modified_base 99: mod_base = OTHER; note = 2'-O-methyl ribonucleotide
  modified_base 100: mod_base = OTHER; note = 2'-O-methyl ribonucleotide
  modified_base 1..3: mod_base = OTHER; note = phosphorothioate linkage
  modified_base 25..26: mod_base = OTHER; note = phosphorothioate linkage
  modified_base 98..100: mod_base = OTHER; note = phosphorothioate linkage

SEQ ID NO: 1781 - RNA, 103 nt, synthetic construct; identical to SEQ ID NO: 1699
  source 1..103: mol_type = other RNA
  modified_base 1: mod_base = OTHER; note = 2'-O-methyl ribonucleotide
  modified_base 2: mod_base = OTHER; note = 2'-O-methyl ribonucleotide
  modified_base 3: mod_base = OTHER; note = 2'-O-methyl ribonucleotide
  modified_base 21: mod_base = OTHER; note = 2'-O-methyl ribonucleotide
  modified_base 28: mod_base = OTHER; note = 2'-O-methyl ribonucleotide
  modified_base 29: mod_base = OTHER; note = 2'-O-methyl ribonucleotide
  modified_base 30: mod_base = OTHER; note = 2'-O-methyl ribonucleotide
  modified_base 31: mod_base = OTHER; note = 2'-O-methyl ribonucleotide
  modified_base 32: mod_base = OTHER; note = 2'-O-methyl ribonucleotide
  modified_base 34: mod_base = OTHER; note = 2'-O-methyl ribonucleotide
  modified_base 35: mod_base = OTHER; note = 2'-O-methyl ribonucleotide
  modified_base 36: mod_base = OTHER; note = 2'-O-methyl ribonucleotide
  modified_base 37: mod_base = OTHER; note = 2'-O-methyl ribonucleotide
  modified_base 38: mod_base = OTHER; note = 2'-O-methyl ribonucleotide
  modified_base 39: mod_base = OTHER; note = 2'-O-methyl ribonucleotide
  modified_base 40: mod_base = OTHER; note = 2'-O-methyl ribonucleotide
  modified_base 41: mod_base = OTHER; note = 2'-O-methyl ribonucleotide
  modified_base 42: mod_base = OTHER; note = 2'-O-methyl ribonucleotide
  modified_base 46: mod_base = OTHER; note = 2'-O-methyl ribonucleotide
  modified_base 48: mod_base = OTHER; note = 2'-O-methyl ribonucleotide
  modified_base 50: mod_base = OTHER; note = 2'-O-methyl ribonucleotide
  modified_base 52: mod_base = OTHER; note = 2'-O-methyl ribonucleotide
  modified_base 53: mod_base = OTHER; note = 2'-O-methyl ribonucleotide
  modified_base 54: mod_base = OTHER; note = 2'-O-methyl ribonucleotide
  modified_base 57: mod_base = OTHER; note = 2'-O-methyl ribonucleotide
  modified_base 61: mod_base = OTHER; note = 2'-O-methyl ribonucleotide
  modified_base 66: mod_base = OTHER; note = 2'-O-methyl ribonucleotide
  modified_base 67: mod_base = OTHER; note = 2'-O-methyl ribonucleotide
  modified_base 70: mod_base = OTHER; note = 2'-O-methyl ribonucleotide
  modified_base 71: mod_base = OTHER; note = 2'-O-methyl ribonucleotide
  modified_base 72: mod_base = OTHER; note = 2'-O-methyl ribonucleotide
  modified_base 74: mod_base = OTHER; note = 2'-O-methyl ribonucleotide
  modified_base 75: mod_base = OTHER; note = 2'-O-methyl ribonucleotide
  modified_base 76: mod_base = OTHER; note = 2'-O-methyl ribonucleotide
  modified_base 77: mod_base = OTHER; note = 2'-O-methyl ribonucleotide
  modified_base 78: mod_base = OTHER; note = 2'-O-methyl ribonucleotide
  modified_base 79: mod_base = OTHER; note = 2'-O-methyl ribonucleotide
  modified_base 80: mod_base = OTHER; note = 2'-O-methyl ribonucleotide
  modified_base 82: mod_base = OTHER; note = 2'-O-methyl ribonucleotide
  modified_base 83: mod_base = OTHER; note = 2'-O-methyl ribonucleotide
  modified_base 84: mod_base = OTHER; note = 2'-O-methyl ribonucleotide
  modified_base 85: mod_base = OTHER; note = 2'-O-methyl ribonucleotide
  modified_base 86: mod_base = OTHER; note = 2'-O-methyl ribonucleotide
  modified_base 87: mod_base = OTHER; note = 2'-O-methyl ribonucleotide
  modified_base 89: mod_base = OTHER; note = 2'-O-methyl ribonucleotide
  modified_base 92: mod_base = OTHER; note = 2'-O-methyl ribonucleotide
  modified_base 93: mod_base = OTHER; note = 2'-O-methyl ribonucleotide
  modified_base 94: mod_base = OTHER; note = 2'-O-methyl ribonucleotide
  modified_base 95: mod_base = OTHER; note = 2'-O-methyl ribonucleotide
  modified_base 96: mod_base = OTHER; note = 2'-O-methyl ribonucleotide
  modified_base 97: mod_base = OTHER; note = 2'-O-methyl ribonucleotide
  modified_base 98: mod_base = OTHER; note = 2'-O-methyl ribonucleotide
  modified_base 99: mod_base = OTHER; note = 2'-O-methyl ribonucleotide
  modified_base 100: mod_base = OTHER; note = 2'-O-methyl ribonucleotide
  modified_base 1..3: mod_base = OTHER; note = phosphorothioate linkage
  modified_base 25..26: mod_base = OTHER; note = phosphorothioate linkage
  modified_base 98..100: mod_base = OTHER; note = phosphorothioate linkage

SEQ ID NO: 1782 - RNA, 103 nt, synthetic construct; identical to SEQ ID NO: 1700
  source 1..103: mol_type = other RNA
  modified_base 1: mod_base = OTHER; note = 2'-O-methyl ribonucleotide
  modified_base 2: mod_base = OTHER; note = 2'-O-methyl ribonucleotide
  modified_base 3: mod_base = OTHER; note = 2'-O-methyl ribonucleotide
  modified_base 21: mod_base = OTHER; note = 2'-O-methyl ribonucleotide
  modified_base 28: mod_base = OTHER; note = 2'-O-methyl ribonucleotide
  modified_base 29: mod_base = OTHER; note = 2'-O-methyl ribonucleotide
  modified_base 30: mod_base = OTHER; note = 2'-O-methyl ribonucleotide
  modified_base 31: mod_base = OTHER; note = 2'-O-methyl ribonucleotide
  modified_base 32: mod_base = OTHER; note = 2'-O-methyl ribonucleotide
  modified_base 34: mod_base = OTHER; note = 2'-O-methyl ribonucleotide
  modified_base 35: mod_base = OTHER; note = 2'-O-methyl ribonucleotide
  modified_base 36: mod_base = OTHER; note = 2'-O-methyl ribonucleotide
  modified_base 37: mod_base = OTHER; note = 2'-O-methyl ribonucleotide
  modified_base 38: mod_base = OTHER; note = 2'-O-methyl ribonucleotide
  modified_base 39: mod_base = OTHER; note = 2'-O-methyl ribonucleotide
  modified_base 40: mod_base = OTHER; note = 2'-O-methyl ribonucleotide
  modified_base 41: mod_base = OTHER; note = 2'-O-methyl ribonucleotide
  modified_base 42: mod_base = OTHER; note = 2'-O-methyl ribonucleotide
  modified_base 46: mod_base = OTHER; note = 2'-O-methyl ribonucleotide
  modified_base 48: mod_base = OTHER; note = 2'-O-methyl ribonucleotide
  modified_base 50: mod_base = OTHER; note = 2'-O-methyl ribonucleotide
  modified_base 52: mod_base = OTHER; note = 2'-O-methyl ribonucleotide
  modified_base 53: mod_base = OTHER; note = 2'-O-methyl ribonucleotide
  modified_base 54: mod_base = OTHER; note = 2'-O-methyl ribonucleotide
  modified_base 55: mod_base = OTHER; note = 2'-O-methyl ribonucleotide
  modified_base 56: mod_base = OTHER; note = 2'-O-methyl ribonucleotide
  modified_base 57: mod_base = OTHER; note = 2'-O-methyl ribonucleotide
  modified_base 60: mod_base = OTHER; note = 2'-O-methyl ribonucleotide
  modified_base 61: mod_base = OTHER; note = 2'-O-methyl ribonucleotide
  modified_base 66: mod_base = OTHER; note = 2'-O-methyl ribonucleotide
  modified_base 67: mod_base = OTHER; note = 2'-O-methyl ribonucleotide
  modified_base 70: mod_base = OTHER; note = 2'-O-methyl ribonucleotide
  modified_base 71: mod_base = OTHER; note = 2'-O-methyl ribonucleotide
  modified_base 72: mod_base = OTHER; note = 2'-O-methyl ribonucleotide
  modified_base 74: mod_base = OTHER; note = 2'-O-methyl ribonucleotide
  modified_base 75: mod_base = OTHER; note = 2'-O-methyl ribonucleotide
  modified_base 76: mod_base = OTHER; note = 2'-O-methyl ribonucleotide
  modified_base 77: mod_base = OTHER; note = 2'-O-methyl ribonucleotide
  modified_base 78: mod_base = OTHER; note = 2'-O-methyl ribonucleotide
  modified_base 79: mod_base = OTHER; note = 2'-O-methyl ribonucleotide
  modified_base 80: mod_base = OTHER; note = 2'-O-methyl ribonucleotide
  modified_base 81: mod_base = OTHER; note = 2'-O-methyl ribonucleotide
  modified_base 83: mod_base = OTHER; note = 2'-O-methyl ribonucleotide
  modified_base 84: mod_base = OTHER; note = 2'-O-methyl ribonucleotide
  modified_base 85: mod_base = OTHER; note = 2'-O-methyl ribonucleotide
  modified_base 86: mod_base = OTHER; note = 2'-O-methyl ribonucleotide
  modified_base 87: mod_base = OTHER; note = 2'-O-methyl ribonucleotide
  modified_base 88: mod_base = OTHER; note = 2'-O-methyl ribonucleotide
  modified_base 89: mod_base = OTHER; note = 2'-O-methyl ribonucleotide
  modified_base 90: mod_base = OTHER; note = 2'-O-methyl ribonucleotide
  modified_base 91: mod_base = OTHER; note = 2'-O-methyl ribonucleotide
  modified_base 92: mod_base = OTHER; note = 2'-O-methyl ribonucleotide
  modified_base 93: mod_base = OTHER; note = 2'-O-methyl ribonucleotide
  modified_base 94: mod_base = OTHER; note = 2'-O-methyl ribonucleotide
  modified_base 95: mod_base = OTHER; note = 2'-O-methyl ribonucleotide
  modified_base 96: mod_base = OTHER; note = 2'-O-methyl ribonucleotide
  modified_base 97: mod_base = OTHER; note = 2'-O-methyl ribonucleotide
  modified_base 98: mod_base = OTHER; note = 2'-O-methyl ribonucleotide
  modified_base 99: mod_base = OTHER; note = 2'-O-methyl ribonucleotide
  modified_base 100: mod_base = OTHER; note = 2'-O-methyl ribonucleotide
  modified_base 1..3: mod_base = OTHER; note = phosphorothioate linkage
  modified_base 25..26: mod_base = OTHER; note = phosphorothioate linkage
  modified_base 98..100: mod_base = OTHER; note = phosphorothioate linkage

SEQ ID NO: 1783 - RNA, 103 nt, synthetic construct; identical to SEQ ID NO: 1643
  source 1..103: mol_type = other RNA
  modified_base 1: mod_base = OTHER; note = 2'-O-methyl ribonucleotide
  modified_base 2: mod_base = OTHER; note = 2'-O-methyl ribonucleotide
  modified_base 3: mod_base = OTHER; note = 2'-O-methyl ribonucleotide
  modified_base 21: mod_base = OTHER; note = 2'-O-methyl ribonucleotide
  modified_base 28: mod_base = OTHER; note = 2'-O-methyl ribonucleotide
  modified_base 29: mod_base = OTHER; note = 2'-O-methyl ribonucleotide
  modified_base 30: mod_base = OTHER; note = 2'-O-methyl ribonucleotide
  modified_base 31: mod_base = OTHER; note = 2'-O-methyl ribonucleotide
  modified_base 32: mod_base = OTHER; note = 2'-O-methyl ribonucleotide
  modified_base 34: mod_base = OTHER; note = 2'-O-methyl ribonucleotide
  modified_base 35: mod_base = OTHER; note = 2'-O-methyl ribonucleotide
  modified_base 36: mod_base = OTHER; note = 2'-O-methyl ribonucleotide
  modified_base 37: mod_base = OTHER; note = 2'-O-methyl ribonucleotide
  modified_base 38: mod_base = OTHER; note = 2'-O-methyl ribonucleotide
  modified_base 39: mod_base = OTHER; note = 2'-O-methyl ribonucleotide
  modified_base 40: mod_base = OTHER; note = 2'-O-methyl ribonucleotide
  modified_base 41: mod_base = OTHER; note = 2'-O-methyl ribonucleotide
  modified_base 42: mod_base = OTHER; note = 2'-O-methyl ribonucleotide
  modified_base 46: mod_base = OTHER; note = 2'-O-methyl ribonucleotide
  modified_base 48: mod_base = OTHER; note = 2'-O-methyl ribonucleotide
  modified_base 50: mod_base = OTHER; note = 2'-O-methyl ribonucleotide
  modified_base 52: mod_base = OTHER; note = 2'-O-methyl ribonucleotide
  modified_base 53: mod_base = OTHER; note = 2'-O-methyl ribonucleotide
  modified_base 54: mod_base = OTHER; note = 2'-O-methyl ribonucleotide
  modified_base 57: mod_base = OTHER; note = 2'-O-methyl ribonucleotide
  modified_base 61: mod_base = OTHER; note = 2'-O-methyl ribonucleotide
  modified_base 66: mod_base = OTHER; note = 2'-O-methyl ribonucleotide
  modified_base 67: mod_base = OTHER; note = 2'-O-methyl ribonucleotide
  modified_base 70: mod_base = OTHER; note = 2'-O-methyl ribonucleotide
  modified_base 71: mod_base = OTHER; note = 2'-O-methyl ribonucleotide
  modified_base 72: mod_base = OTHER; note = 2'-O-methyl ribonucleotide
  modified_base 74: mod_base = OTHER; note = 2'-O-methyl ribonucleotide
  modified_base 75: mod_base = OTHER; note = 2'-O-methyl ribonucleotide
  modified_base 76: mod_base = OTHER; note = 2'-O-methyl ribonucleotide
  modified_base 77: mod_base = OTHER; note = 2'-O-methyl ribonucleotide
  modified_base 78: mod_base = OTHER; note = 2'-O-methyl ribonucleotide
  modified_base 79: mod_base = OTHER; note = 2'-O-methyl ribonucleotide
  modified_base 80: mod_base = OTHER; note = 2'-O-methyl ribonucleotide
  modified_base 82: mod_base = OTHER; note = 2'-O-methyl ribonucleotide
  modified_base 83: mod_base = OTHER; note = 2'-O-methyl ribonucleotide
  modified_base 84: mod_base = OTHER; note = 2'-O-methyl ribonucleotide
  modified_base 85: mod_base = OTHER; note = 2'-O-methyl ribonucleotide
  modified_base 86: mod_base = OTHER; note = 2'-O-methyl ribonucleotide
  modified_base 87: mod_base = OTHER; note = 2'-O-methyl ribonucleotide
  modified_base 89: mod_base = OTHER; note = 2'-O-methyl ribonucleotide
  modified_base 92: mod_base = OTHER; note = 2'-O-methyl ribonucleotide
  modified_base 93: mod_base = OTHER; note = 2'-O-methyl ribonucleotide
  modified_base 94: mod_base = OTHER; note = 2'-O-methyl ribonucleotide
  modified_base 95: mod_base = OTHER; note = 2'-O-methyl ribonucleotide
  modified_base 96: mod_base = OTHER; note = 2'-O-methyl ribonucleotide
  modified_base 97: mod_base = OTHER; note = 2'-O-methyl ribonucleotide
  modified_base 98: mod_base = OTHER; note = 2'-O-methyl ribonucleotide
  modified_base 99: mod_base = OTHER; note = 2'-O-methyl ribonucleotide
  modified_base 100: mod_base = OTHER; note = 2'-O-methyl ribonucleotide
  modified_base 1..3: mod_base = OTHER; note = phosphorothioate linkage
  modified_base 45..46: mod_base = OTHER; note = phosphorothioate linkage
  modified_base 64..65: mod_base = OTHER; note = phosphorothioate linkage
  modified_base 98..100: mod_base = OTHER; note = phosphorothioate linkage

SEQ ID NO: 1784 - RNA, 103 nt, synthetic construct; identical to SEQ ID NO: 1699
  source 1..103: mol_type = other RNA
  modified_base 1: mod_base = OTHER; note = 2'-O-methyl ribonucleotide
  modified_base 2: mod_base = OTHER; note = 2'-O-methyl ribonucleotide
  modified_base 3: mod_base = OTHER; note = 2'-O-methyl ribonucleotide
  modified_base 21: mod_base = OTHER; note = 2'-O-methyl ribonucleotide
  modified_base 28: mod_base = OTHER; note = 2'-O-methyl ribonucleotide
  modified_base 29: mod_base = OTHER; note = 2'-O-methyl ribonucleotide
  modified_base 30: mod_base = OTHER; note = 2'-O-methyl ribonucleotide
  modified_base 31: mod_base = OTHER; note = 2'-O-methyl ribonucleotide
  modified_base 32: mod_base = OTHER; note = 2'-O-methyl ribonucleotide
  modified_base 34: mod_base = OTHER; note = 2'-O-methyl ribonucleotide
  modified_base 35: mod_base = OTHER; note = 2'-O-methyl ribonucleotide
  modified_base 36: mod_base = OTHER; note = 2'-O-methyl ribonucleotide
  modified_base 37: mod_base = OTHER; note = 2'-O-methyl ribonucleotide
  modified_base 38: mod_base = OTHER; note = 2'-O-methyl ribonucleotide
  modified_base 39: mod_base = OTHER; note = 2'-O-methyl ribonucleotide
  modified_base 40: mod_base = OTHER; note = 2'-O-methyl ribonucleotide
  modified_base 41: mod_base = OTHER; note = 2'-O-methyl ribonucleotide
  modified_base 42: mod_base = OTHER; note = 2'-O-methyl ribonucleotide
  modified_base 46: mod_base = OTHER; note = 2'-O-methyl ribonucleotide
  modified_base 48: mod_base = OTHER; note = 2'-O-methyl ribonucleotide
  modified_base 50: mod_base = OTHER; note = 2'-O-methyl ribonucleotide
  modified_base 52: mod_base = OTHER; note = 2'-O-methyl ribonucleotide
  modified_base 53: mod_base = OTHER; note = 2'-O-methyl ribonucleotide
  modified_base 54: mod_base = OTHER; note = 2'-O-methyl ribonucleotide
  modified_base 57: mod_base = OTHER; note = 2'-O-methyl ribonucleotide
  modified_base 61: mod_base = OTHER; note = 2'-O-methyl ribonucleotide
  modified_base 66: mod_base = OTHER; note = 2'-O-methyl ribonucleotide
  modified_base 67: mod_base = OTHER; note = 2'-O-methyl ribonucleotide
  modified_base 70: mod_base = OTHER; note = 2'-O-methyl ribonucleotide
  modified_base 71: mod_base = OTHER; note = 2'-O-methyl ribonucleotide
  modified_base 72: mod_base = OTHER; note = 2'-O-methyl ribonucleotide
  modified_base 74: mod_base = OTHER; note = 2'-O-methyl ribonucleotide
  modified_base 75: mod_base = OTHER; note = 2'-O-methyl ribonucleotide
  modified_base 76: mod_base = OTHER; note = 2'-O-methyl ribonucleotide
  modified_base 77: mod_base = OTHER; note = 2'-O-methyl ribonucleotide
  modified_base 78: mod_base = OTHER; note = 2'-O-methyl ribonucleotide
  modified_base 79: mod_base = OTHER; note = 2'-O-methyl ribonucleotide
  modified_base 80: mod_base = OTHER; note = 2'-O-methyl ribonucleotide
  modified_base 82: mod_base = OTHER; note = 2'-O-methyl ribonucleotide
  modified_base 83: mod_base = OTHER; note = 2'-O-methyl ribonucleotide
  modified_base 84: mod_base = OTHER; note = 2'-O-methyl ribonucleotide
  modified_base 85: mod_base = OTHER; note = 2'-O-methyl ribonucleotide
  modified_base 86: mod_base = OTHER; note = 2'-O-methyl ribonucleotide
  modified_base 87: mod_base = OTHER; note = 2'-O-methyl ribonucleotide
  modified_base 89: mod_base = OTHER; note = 2'-O-methyl ribonucleotide
  modified_base 92: mod_base = OTHER; note = 2'-O-methyl ribonucleotide
  modified_base 93: mod_base = OTHER; note = 2'-O-methyl ribonucleotide
  modified_base 94: mod_base = OTHER; note = 2'-O-methyl ribonucleotide
  modified_base 95: mod_base = OTHER; note = 2'-O-methyl ribonucleotide
  modified_base 96: mod_base = OTHER; note = 2'-O-methyl ribonucleotide
  modified_base 97: mod_base = OTHER; note = 2'-O-methyl ribonucleotide
  modified_base 98: mod_base = OTHER; note = 2'-O-methyl ribonucleotide
  modified_base 99: mod_base = OTHER; note = 2'-O-methyl ribonucleotide
  modified_base 100: mod_base = OTHER; note = 2'-O-methyl ribonucleotide
  modified_base 1..3: mod_base = OTHER; note = phosphorothioate linkage
  modified_base 45..46: mod_base = OTHER; note = phosphorothioate linkage
  modified_base 64..65: mod_base = OTHER; note = phosphorothioate linkage
  modified_base 98..100: mod_base = OTHER; note = phosphorothioate linkage

SEQ ID NO: 1785 - RNA, 103 nt, synthetic construct; identical to SEQ ID NO: 1700
  source 1..103: mol_type = other RNA
  modified_base 1: mod_base = OTHER; note = 2'-O-methyl ribonucleotide
  modified_base 2: mod_base = OTHER; note = 2'-O-methyl ribonucleotide
  modified_base 3: mod_base = OTHER; note = 2'-O-methyl ribonucleotide
  modified_base 21: mod_base = OTHER; note = 2'-O-methyl ribonucleotide
  modified_base 28: mod_base = OTHER; note = 2'-O-methyl ribonucleotide
  modified_base 29: mod_base = OTHER; note = 2'-O-methyl ribonucleotide
  modified_base 30: mod_base = OTHER; note = 2'-O-methyl ribonucleotide
  modified_base 31: mod_base = OTHER; note = 2'-O-methyl ribonucleotide
  modified_base 32: mod_base = OTHER; note = 2'-O-methyl ribonucleotide
  modified_base 34: mod_base = OTHER; note = 2'-O-methyl ribonucleotide
  modified_base 35: mod_base = OTHER; note = 2'-O-methyl ribonucleotide
  modified_base 36: mod_base = OTHER; note = 2'-O-methyl ribonucleotide
  modified_base 37: mod_base = OTHER; note = 2'-O-methyl ribonucleotide
  modified_base 38: mod_base = OTHER; note = 2'-O-methyl ribonucleotide
  modified_base 39: mod_base = OTHER; note = 2'-O-methyl ribonucleotide
  modified_base 40: mod_base = OTHER; note = 2'-O-methyl ribonucleotide
  modified_base 41: mod_base = OTHER; note = 2'-O-methyl ribonucleotide
  modified_base 42: mod_base = OTHER; note = 2'-O-methyl ribonucleotide
  modified_base 46: mod_base = OTHER; note = 2'-O-methyl ribonucleotide
  modified_base 48: mod_base = OTHER; note = 2'-O-methyl ribonucleotide
  modified_base 50: mod_base = OTHER; note = 2'-O-methyl ribonucleotide
  modified_base 52: mod_base = OTHER; note = 2'-O-methyl ribonucleotide
  modified_base 53: mod_base = OTHER; note = 2'-O-methyl ribonucleotide
  modified_base 54: mod_base = OTHER; note = 2'-O-methyl ribonucleotide
  modified_base 55: mod_base = OTHER; note = 2'-O-methyl ribonucleotide
  modified_base 56: mod_base = OTHER; note = 2'-O-methyl ribonucleotide
  modified_base 57: mod_base = OTHER; note = 2'-O-methyl ribonucleotide
  modified_base 60: mod_base = OTHER; note = 2'-O-methyl ribonucleotide
  modified_base 61: mod_base = OTHER; note = 2'-O-methyl ribonucleotide
  modified_base 66: mod_base = OTHER; note = 2'-O-methyl ribonucleotide
  modified_base 67: mod_base = OTHER; note = 2'-O-methyl ribonucleotide
  modified_base 70: mod_base = OTHER; note = 2'-O-methyl ribonucleotide
  modified_base 71: mod_base = OTHER; note = 2'-O-methyl ribonucleotide
  modified_base 72: mod_base = OTHER; note = 2'-O-methyl ribonucleotide
  modified_base 74: mod_base = OTHER; note = 2'-O-methyl ribonucleotide
  modified_base 75: mod_base = OTHER; note = 2'-O-methyl ribonucleotide
  modified_base 76: mod_base = OTHER; note = 2'-O-methyl ribonucleotide
  modified_base 77: mod_base = OTHER; note = 2'-O-methyl ribonucleotide
  modified_base 78: mod_base = OTHER; note = 2'-O-methyl ribonucleotide
  modified_base 79: mod_base = OTHER; note = 2'-O-methyl ribonucleotide
  modified_base 80: mod_base = OTHER; note = 2'-O-methyl ribonucleotide
  modified_base 81: mod_base = OTHER; note = 2'-O-methyl ribonucleotide
  modified_base 83: mod_base = OTHER; note = 2'-O-methyl ribonucleotide
  modified_base 84: mod_base = OTHER; note = 2'-O-methyl ribonucleotide
  modified_base 85: mod_base = OTHER; note = 2'-O-methyl ribonucleotide
  modified_base 86: mod_base = OTHER; note = 2'-O-methyl ribonucleotide
  modified_base 87: mod_base = OTHER; note = 2'-O-methyl ribonucleotide
  modified_base 88: mod_base = OTHER; note = 2'-O-methyl ribonucleotide
  modified_base 89: mod_base = OTHER; note = 2'-O-methyl ribonucleotide
  modified_base 90: mod_base = OTHER; note = 2'-O-methyl ribonucleotide
  modified_base 91: mod_base = OTHER; note = 2'-O-methyl ribonucleotide
  modified_base 92: mod_base = OTHER; note = 2'-O-methyl ribonucleotide
  modified_base 93: mod_base = OTHER; note = 2'-O-methyl ribonucleotide
  modified_base 94: mod_base = OTHER; note = 2'-O-methyl ribonucleotide
  modified_base 95: mod_base = OTHER; note = 2'-O-methyl ribonucleotide
  modified_base 96: mod_base = OTHER; note = 2'-O-methyl ribonucleotide
  modified_base 97: mod_base = OTHER; note = 2'-O-methyl ribonucleotide
  modified_base 98: mod_base = OTHER; note = 2'-O-methyl ribonucleotide
  modified_base 99: mod_base = OTHER; note = 2'-O-methyl ribonucleotide
  modified_base 100: mod_base = OTHER; note = 2'-O-methyl ribonucleotide
  modified_base 1..3: mod_base = OTHER; note = phosphorothioate linkage
  modified_base 45..46: mod_base = OTHER; note = phosphorothioate linkage
  modified_base 64..65: mod_base = OTHER; note = phosphorothioate linkage
  modified_base 98..100: mod_base = OTHER; note = phosphorothioate linkage

SEQ ID NO: 1786 - RNA, 103 nt, synthetic construct; identical to SEQ ID NO: 1643
  source 1..103: mol_type = other RNA
  modified_base 1: mod_base = OTHER; note = 2'-O-methyl ribonucleotide
  modified_base 2: mod_base = OTHER; note = 2'-O-methyl ribonucleotide
  modified_base 3: mod_base = OTHER; note = 2'-O-methyl ribonucleotide
  modified_base 21: mod_base = OTHER; note = 2'-O-methyl ribonucleotide
  modified_base 28: mod_base = OTHER; note = 2'-O-methyl ribonucleotide
  modified_base 29: mod_base = OTHER; note = 2'-O-methyl ribonucleotide
  modified_base 30: mod_base = OTHER; note = 2'-O-methyl ribonucleotide
  modified_base 31: mod_base = OTHER; note = 2'-O-methyl ribonucleotide
  modified_base 32: mod_base = OTHER; note = 2'-O-methyl ribonucleotide
  modified_base 34: mod_base = OTHER; note = 2'-O-methyl ribonucleotide
  modified_base 35: mod_base = OTHER; note = 2'-O-methyl ribonucleotide
  modified_base 36: mod_base = OTHER; note = 2'-O-methyl ribonucleotide
  modified_base 37: mod_base = OTHER; note = 2'-O-methyl ribonucleotide
  modified_base 38: mod_base = OTHER; note = 2'-O-methyl ribonucleotide
  modified_base 39: mod_base = OTHER; note = 2'-O-methyl ribonucleotide
  modified_base 40: mod_base = OTHER; note = 2'-O-methyl ribonucleotide
  modified_base 41: mod_base = OTHER; note = 2'-O-methyl ribonucleotide
  modified_base 42: mod_base = OTHER; note = 2'-O-methyl ribonucleotide
  modified_base 46: mod_base = OTHER; note = 2'-O-methyl ribonucleotide
  modified_base 48: mod_base = OTHER; note = 2'-O-methyl ribonucleotide
  modified_base 50: mod_base = OTHER; note = 2'-O-methyl ribonucleotide
  modified_base 52: mod_base = OTHER; note = 2'-O-methyl ribonucleotide
  modified_base 53: mod_base = OTHER; note = 2'-O-methyl ribonucleotide
  modified_base 54: mod_base = OTHER; note = 2'-O-methyl ribonucleotide
  modified_base 57: mod_base = OTHER; note = 2'-O-methyl ribonucleotide
  modified_base 61: mod_base = OTHER; note = 2'-O-methyl ribonucleotide
  modified_base 66: mod_base = OTHER; note = 2'-O-methyl ribonucleotide
  modified_base 67: mod_base = OTHER; note = 2'-O-methyl ribonucleotide
  modified_base 70: mod_base = OTHER; note = 2'-O-methyl ribonucleotide
  modified_base 71: mod_base = OTHER; note = 2'-O-methyl ribonucleotide
  modified_base 72: mod_base = OTHER; note = 2'-O-methyl ribonucleotide
  modified_base 74: mod_base = OTHER; note = 2'-O-methyl ribonucleotide
  modified_base 75: mod_base = OTHER; note = 2'-O-methyl ribonucleotide
  modified_base 76: mod_base = OTHER; note = 2'-O-methyl ribonucleotide
  modified_base 77: mod_base = OTHER; note = 2'-O-methyl ribonucleotide
  modified_base 78: mod_base = OTHER; note = 2'-O-methyl ribonucleotide
  modified_base 79: mod_base = OTHER; note = 2'-O-methyl ribonucleotide
  modified_base 80: mod_base = OTHER; note = 2'-O-methyl ribonucleotide
  modified_base 82: mod_base = OTHER; note = 2'-O-methyl ribonucleotide
  modified_base 83: mod_base = OTHER; note = 2'-O-methyl ribonucleotide
  modified_base 84: mod_base = OTHER; note = 2'-O-methyl ribonucleotide
  modified_base 85: mod_base = OTHER; note = 2'-O-methyl ribonucleotide
  modified_base 86: mod_base = OTHER; note = 2'-O-methyl ribonucleotide
  modified_base 87: mod_base = OTHER; note = 2'-O-methyl ribonucleotide
  modified_base 89: mod_base = OTHER; note = 2'-O-methyl ribonucleotide
  modified_base 92: mod_base = OTHER; note = 2'-O-methyl ribonucleotide
  modified_base 93: mod_base = OTHER; note = 2'-O-methyl ribonucleotide
  modified_base 94: mod_base = OTHER; note = 2'-O-methyl ribonucleotide
  modified_base 95: mod_base = OTHER; note = 2'-O-methyl ribonucleotide
  modified_base 96: mod_base = OTHER; note = 2'-O-methyl ribonucleotide
  modified_base 97: mod_base = OTHER; note = 2'-O-methyl ribonucleotide
  modified_base 98: mod_base = OTHER; note = 2'-O-methyl ribonucleotide
  modified_base 99: mod_base = OTHER; note = 2'-O-methyl ribonucleotide
  modified_base 100: mod_base = OTHER; note = 2'-O-methyl ribonucleotide
  modified_base 1..3: mod_base = OTHER; note = phosphorothioate linkage
  modified_base 25..26: mod_base = OTHER; note = phosphorothioate linkage
  modified_base 45..46: mod_base = OTHER; note = phosphorothioate linkage
  modified_base 98..100: mod_base = OTHER; note = phosphorothioate linkage

SEQ ID NO: 1787 - RNA, 103 nt, synthetic construct; identical to SEQ ID NO: 1699
  source 1..103: mol_type = other RNA
  modified_base 1: mod_base = OTHER; note = 2'-O-methyl ribonucleotide
  modified_base 2: mod_base = OTHER; note = 2'-O-methyl ribonucleotide
  modified_base 3: mod_base = OTHER; note = 2'-O-methyl ribonucleotide
  modified_base 21: mod_base = OTHER; note = 2'-O-methyl ribonucleotide
  modified_base 28: mod_base = OTHER; note = 2'-O-methyl ribonucleotide
  modified_base 29: mod_base = OTHER; note = 2'-O-methyl ribonucleotide
  modified_base 30: mod_base = OTHER; note = 2'-O-methyl ribonucleotide
  modified_base 31: mod_base = OTHER; note = 2'-O-methyl ribonucleotide
  modified_base 32: mod_base = OTHER; note = 2'-O-methyl ribonucleotide
  modified_base 34: mod_base = OTHER; note = 2'-O-methyl ribonucleotide
  modified_base 35: mod_base = OTHER; note = 2'-O-methyl ribonucleotide
  modified_base 36: mod_base = OTHER; note = 2'-O-methyl ribonucleotide
  modified_base 37: mod_base = OTHER; note = 2'-O-methyl ribonucleotide
  modified_base 38: mod_base = OTHER; note = 2'-O-methyl ribonucleotide
  modified_base 39: mod_base = OTHER; note = 2'-O-methyl ribonucleotide
  modified_base 40: mod_base = OTHER; note = 2'-O-methyl ribonucleotide
  modified_base 41: mod_base = OTHER; note = 2'-O-methyl ribonucleotide
  modified_base 42: mod_base = OTHER; note = 2'-O-methyl ribonucleotide
  modified_base 46: mod_base = OTHER; note = 2'-O-methyl ribonucleotide
  modified_base 48: mod_base = OTHER; note = 2'-O-methyl ribonucleotide
  modified_base 50: mod_base = OTHER; note = 2'-O-methyl ribonucleotide
  modified_base 52: mod_base = OTHER; note = 2'-O-methyl ribonucleotide
  modified_base 53: mod_base = OTHER; note = 2'-O-methyl ribonucleotide
  modified_base 54: mod_base = OTHER; note = 2'-O-methyl ribonucleotide
  modified_base 57: mod_base = OTHER; note = 2'-O-methyl ribonucleotide
  modified_base 61: mod_base = OTHER; note = 2'-O-methyl ribonucleotide
  modified_base 66: mod_base = OTHER; note = 2'-O-methyl ribonucleotide
  modified_base 67: mod_base = OTHER; note = 2'-O-methyl ribonucleotide
  modified_base 70: mod_base = OTHER; note = 2'-O-methyl ribonucleotide
  modified_base 71: mod_base = OTHER; note = 2'-O-methyl ribonucleotide
  modified_base 72: mod_base = OTHER; note = 2'-O-methyl ribonucleotide
  modified_base 74: mod_base = OTHER; note = 2'-O-methyl ribonucleotide
  modified_base 75: mod_base = OTHER; note = 2'-O-methyl ribonucleotide
  modified_base 76: mod_base = OTHER; note = 2'-O-methyl ribonucleotide
  modified_base 77: mod_base = OTHER; note = 2'-O-methyl ribonucleotide
  modified_base 78: mod_base = OTHER; note = 2'-O-methyl ribonucleotide
  modified_base 79: mod_base = OTHER; note = 2'-O-methyl ribonucleotide
  modified_base 80: mod_base = OTHER; note = 2'-O-methyl ribonucleotide
  modified_base 82: mod_base = OTHER; note = 2'-O-methyl ribonucleotide
  modified_base 83: mod_base = OTHER; note = 2'-O-methyl ribonucleotide
  modified_base 84: mod_base = OTHER; note = 2'-O-methyl ribonucleotide
  modified_base 85: mod_base = OTHER; note = 2'-O-methyl ribonucleotide
  modified_base 86: mod_base = OTHER; note = 2'-O-methyl ribonucleotide
  modified_base 87: mod_base = OTHER; note = 2'-O-methyl ribonucleotide
  modified_base 89: mod_base = OTHER; note = 2'-O-methyl ribonucleotide
  modified_base 92: mod_base = OTHER; note = 2'-O-methyl ribonucleotide
  modified_base 93: mod_base = OTHER; note = 2'-O-methyl ribonucleotide
  modified_base 94: mod_base = OTHER; note = 2'-O-methyl ribonucleotide
  modified_base 95: mod_base = OTHER; note = 2'-O-methyl ribonucleotide
  modified_base 96: mod_base = OTHER; note = 2'-O-methyl ribonucleotide
  modified_base 97: mod_base = OTHER; note = 2'-O-methyl ribonucleotide
  modified_base 98: mod_base = OTHER; note = 2'-O-methyl ribonucleotide
  modified_base 99: mod_base = OTHER; note = 2'-O-methyl ribonucleotide
  modified_base 100: mod_base = OTHER; note = 2'-O-methyl ribonucleotide
  modified_base 1..3: mod_base = OTHER; note = phosphorothioate linkage
  modified_base 25..26: mod_base = OTHER; note = phosphorothioate linkage
  modified_base 45..46: mod_base = OTHER; note = phosphorothioate linkage
  modified_base 98..100: mod_base = OTHER; note = phosphorothioate linkage

SEQ ID NO: 1788 - RNA, 103 nt, synthetic construct; identical to SEQ ID NO: 1700
  source 1..103: mol_type = other RNA
  modified_base 1: mod_base = OTHER; note = 2'-O-methyl ribonucleotide
  modified_base 2: mod_base = OTHER; note = 2'-O-methyl ribonucleotide
  modified_base 3: mod_base = OTHER; note = 2'-O-methyl ribonucleotide
  modified_base 21: mod_base = OTHER; note = 2'-O-methyl ribonucleotide
  modified_base 28: mod_base = OTHER; note = 2'-O-methyl ribonucleotide
  modified_base 29: mod_base = OTHER; note = 2'-O-methyl ribonucleotide
  modified_base 30: mod_base = OTHER; note = 2'-O-methyl ribonucleotide
  modified_base 31: mod_base = OTHER; note = 2'-O-methyl ribonucleotide
  modified_base 32: mod_base = OTHER; note = 2'-O-methyl ribonucleotide
  modified_base 34: mod_base = OTHER; note = 2'-O-methyl ribonucleotide
  modified_base 35: mod_base = OTHER; note = 2'-O-methyl ribonucleotide
  modified_base 36: mod_base = OTHER; note = 2'-O-methyl ribonucleotide
  modified_base 37: mod_base = OTHER; note = 2'-O-methyl ribonucleotide
  modified_base 38: mod_base = OTHER; note = 2'-O-methyl ribonucleotide
  modified_base 39: mod_base = OTHER; note = 2'-O-methyl ribonucleotide
  modified_base 40: mod_base = OTHER; note = 2'-O-methyl ribonucleotide
  modified_base 41: mod_base = OTHER; note = 2'-O-methyl ribonucleotide
  modified_base 42: mod_base = OTHER; note = 2'-O-methyl ribonucleotide
  modified_base 46: mod_base = OTHER; note = 2'-O-methyl ribonucleotide
  modified_base 48: mod_base = OTHER; note = 2'-O-methyl ribonucleotide
  modified_base 50: mod_base = OTHER; note = 2'-O-methyl ribonucleotide
  modified_base 52: mod_base = OTHER; note = 2'-O-methyl ribonucleotide
  modified_base 53: mod_base = OTHER; note = 2'-O-methyl ribonucleotide
  modified_base 54: mod_base = OTHER; note = 2'-O-methyl ribonucleotide
  modified_base 55: mod_base = OTHER; note = 2'-O-methyl ribonucleotide
  modified_base 56: mod_base = OTHER; note = 2'-O-methyl ribonucleotide
  modified_base 57: mod_base = OTHER; note = 2'-O-methyl ribonucleotide
  modified_base 60: mod_base = OTHER; note = 2'-O-methyl ribonucleotide
  modified_base 61: mod_base = OTHER; note = 2'-O-methyl ribonucleotide
  modified_base 66: mod_base = OTHER; note = 2'-O-methyl ribonucleotide
  modified_base 67: mod_base = OTHER; note = 2'-O-methyl ribonucleotide
  modified_base 70: mod_base = OTHER; note = 2'-O-methyl ribonucleotide
  modified_base 71: mod_base = OTHER; note = 2'-O-methyl ribonucleotide
  modified_base 72: mod_base = OTHER; note = 2'-O-methyl ribonucleotide
  modified_base 74: mod_base = OTHER; note = 2'-O-methyl ribonucleotide
  modified_base 75: mod_base = OTHER; note = 2'-O-methyl ribonucleotide
  modified_base 76: mod_base = OTHER; note = 2'-O-methyl ribonucleotide
  modified_base 77: mod_base = OTHER; note = 2'-O-methyl ribonucleotide
  modified_base 78: mod_base = OTHER; note = 2'-O-methyl ribonucleotide
  modified_base 79: mod_base = OTHER; note = 2'-O-methyl ribonucleotide
  modified_base 80: mod_base = OTHER; note = 2'-O-methyl ribonucleotide
  modified_base 81: mod_base = OTHER; note = 2'-O-methyl ribonucleotide
  modified_base 83: mod_base = OTHER; note = 2'-O-methyl ribonucleotide
  modified_base 84: mod_base = OTHER; note = 2'-O-methyl ribonucleotide
  modified_base 85: mod_base = OTHER; note = 2'-O-methyl ribonucleotide
  modified_base 86: mod_base = OTHER; note = 2'-O-methyl ribonucleotide
  modified_base 87: mod_base = OTHER; note = 2'-O-methyl ribonucleotide
  modified_base 88: mod_base = OTHER; note = 2'-O-methyl ribonucleotide
  modified_base 89: mod_base = OTHER; note = 2'-O-methyl ribonucleotide
  modified_base 90: mod_base = OTHER; note = 2'-O-methyl ribonucleotide
  modified_base 91: mod_base = OTHER; note = 2'-O-methyl ribonucleotide
  modified_base 92: mod_base = OTHER; note = 2'-O-methyl ribonucleotide
  modified_base 93: mod_base = OTHER; note = 2'-O-methyl ribonucleotide
  modified_base 94: mod_base = OTHER; note = 2'-O-methyl ribonucleotide
  modified_base 95: mod_base = OTHER; note = 2'-O-methyl ribonucleotide
  modified_base 96: mod_base = OTHER; note = 2'-O-methyl ribonucleotide
  modified_base 97: mod_base = OTHER; note = 2'-O-methyl ribonucleotide
  modified_base 98: mod_base = OTHER; note = 2'-O-methyl ribonucleotide
  modified_base 99: mod_base = OTHER; note = 2'-O-methyl ribonucleotide
  modified_base 100: mod_base = OTHER; note = 2'-O-methyl ribonucleotide
  modified_base 1..3: mod_base = OTHER; note = phosphorothioate linkage
  modified_base 25..26: mod_base = OTHER; note = phosphorothioate linkage
  modified_base 45..46: mod_base = OTHER; note = phosphorothioate linkage
  modified_base 98..100: mod_base = OTHER; note = phosphorothioate linkage

SEQ ID NO: 1789 - RNA, 103 nt, synthetic construct; identical to SEQ ID NO: 1643
  source 1..103: mol_type = other RNA
  modified_base 1: mod_base = OTHER; note = 2'-O-methyl ribonucleotide
  modified_base 2: mod_base = OTHER; note = 2'-O-methyl ribonucleotide
  modified_base 3: mod_base = OTHER; note = 2'-O-methyl ribonucleotide
  modified_base 21: mod_base = OTHER; note = 2'-O-methyl ribonucleotide
  modified_base 28: mod_base = OTHER; note = 2'-O-methyl ribonucleotide
  modified_base 29: mod_base = OTHER; note = 2'-O-methyl ribonucleotide
  modified_base 30: mod_base = OTHER; note = 2'-O-methyl ribonucleotide
  modified_base 31: mod_base = OTHER; note = 2'-O-methyl ribonucleotide
  modified_base 32: mod_base = OTHER; note = 2'-O-methyl ribonucleotide
  modified_base 34: mod_base = OTHER; note = 2'-O-methyl ribonucleotide
  modified_base 35: mod_base = OTHER; note = 2'-O-methyl ribonucleotide
  modified_base 36: mod_base = OTHER; note = 2'-O-methyl ribonucleotide
  modified_base 37: mod_base = OTHER; note = 2'-O-methyl ribonucleotide
  modified_base 38: mod_base = OTHER; note = 2'-O-methyl ribonucleotide
  modified_base 39: mod_base = OTHER; note = 2'-O-methyl ribonucleotide
  modified_base 40: mod_base = OTHER; note = 2'-O-methyl ribonucleotide
  modified_base 41: mod_base = OTHER; note = 2'-O-methyl ribonucleotide
  modified_base 42: mod_base = OTHER; note = 2'-O-methyl ribonucleotide
  modified_base 46: mod_base = OTHER; note = 2'-O-methyl ribonucleotide
  modified_base 48: mod_base = OTHER; note = 2'-O-methyl ribonucleotide
  modified_base 50: mod_base = OTHER; note = 2'-O-methyl ribonucleotide
  modified_base 52: mod_base = OTHER; note = 2'-O-methyl ribonucleotide
  modified_base 53: mod_base = OTHER; note = 2'-O-methyl ribonucleotide
  modified_base 54: mod_base = OTHER; note = 2'-O-methyl ribonucleotide
  modified_base 57: mod_base = OTHER; note = 2'-O-methyl ribonucleotide
  modified_base 61: mod_base = OTHER; note = 2'-O-methyl ribonucleotide
  modified_base 66: mod_base = OTHER; note = 2'-O-methyl ribonucleotide
  modified_base 67: mod_base = OTHER; note = 2'-O-methyl ribonucleotide
  modified_base 70: mod_base = OTHER; note = 2'-O-methyl ribonucleotide
  modified_base 71: mod_base = OTHER; note = 2'-O-methyl ribonucleotide
  modified_base 72: mod_base = OTHER; note = 2'-O-methyl ribonucleotide
  modified_base 74: mod_base = OTHER; note = 2'-O-methyl ribonucleotide
  modified_base 75: mod_base = OTHER; note = 2'-O-methyl ribonucleotide
  modified_base 76: mod_base = OTHER; note = 2'-O-methyl ribonucleotide
  modified_base 77: mod_base = OTHER; note = 2'-O-methyl ribonucleotide
  modified_base 78: mod_base = OTHER; note = 2'-O-methyl ribonucleotide
  modified_base 79: mod_base = OTHER; note = 2'-O-methyl ribonucleotide
  modified_base 80: mod_base = OTHER; note = 2'-O-methyl ribonucleotide
  modified_base 82: mod_base = OTHER; note = 2'-O-methyl ribonucleotide
  modified_base 83: mod_base = OTHER; note = 2'-O-methyl ribonucleotide
  modified_base 84: mod_base = OTHER; note = 2'-O-methyl ribonucleotide
  modified_base 85: mod_base = OTHER; note = 2'-O-methyl ribonucleotide
  modified_base 86: mod_base = OTHER; note = 2'-O-methyl ribonucleotide
  modified_base 87: mod_base = OTHER; note = 2'-O-methyl ribonucleotide
  modified_base 89: mod_base = OTHER; note = 2'-O-methyl ribonucleotide
  modified_base 92: mod_base = OTHER; note = 2'-O-methyl ribonucleotide
  modified_base 93: mod_base = OTHER; note = 2'-O-methyl ribonucleotide
  modified_base 94: mod_base = OTHER; note = 2'-O-methyl ribonucleotide
  modified_base 95: mod_base = OTHER; note = 2'-O-methyl ribonucleotide
  modified_base 96: mod_base = OTHER; note = 2'-O-methyl ribonucleotide
  modified_base 97: mod_base = OTHER; note = 2'-O-methyl ribonucleotide
  modified_base 98: mod_base = OTHER; note = 2'-O-methyl ribonucleotide
  modified_base 99: mod_base = OTHER; note = 2'-O-methyl ribonucleotide
  modified_base 100: mod_base = OTHER; note = 2'-O-methyl ribonucleotide
  modified_base 1..3: mod_base = OTHER; note = phosphorothioate linkage
  modified_base 25..26: mod_base = OTHER; note = phosphorothioate linkage
  modified_base 64..65: mod_base = OTHER; note = phosphorothioate linkage
  modified_base 98..100: mod_base = OTHER; note = phosphorothioate linkage

SEQ ID NO: 1790 - RNA, 103 nt, synthetic construct; identical to SEQ ID NO: 1699
  source 1..103: mol_type = other RNA
  modified_base 1: mod_base = OTHER; note = 2'-O-methyl ribonucleotide
  modified_base 2: mod_base = OTHER; note = 2'-O-methyl ribonucleotide
  modified_base 3: mod_base = OTHER; note = 2'-O-methyl ribonucleotide
  modified_base 21: mod_base = OTHER; note = 2'-O-methyl ribonucleotide
  modified_base 28: mod_base = OTHER; note = 2'-O-methyl ribonucleotide
  modified_base 29: mod_base = OTHER; note = 2'-O-methyl ribonucleotide
  modified_base 30: mod_base = OTHER; note = 2'-O-methyl ribonucleotide
  modified_base 31: mod_base = OTHER; note = 2'-O-methyl ribonucleotide
  modified_base 32: mod_base = OTHER; note = 2'-O-methyl ribonucleotide
  modified_base 34: mod_base = OTHER; note = 2'-O-methyl ribonucleotide
  modified_base 35: mod_base = OTHER; note = 2'-O-methyl ribonucleotide
  modified_base 36: mod_base = OTHER; note = 2'-O-methyl ribonucleotide
  modified_base 37: mod_base = OTHER; note = 2'-O-methyl ribonucleotide
  modified_base 38: mod_base = OTHER; note = 2'-O-methyl ribonucleotide
  modified_base 39: mod_base = OTHER; note = 2'-O-methyl ribonucleotide
  modified_base 40: mod_base = OTHER; note = 2'-O-methyl ribonucleotide
  modified_base 41: mod_base = OTHER; note = 2'-O-methyl ribonucleotide
  modified_base 42: mod_base = OTHER; note = 2'-O-methyl ribonucleotide
  modified_base 46: mod_base = OTHER; note = 2'-O-methyl ribonucleotide
  modified_base 48: mod_base = OTHER; note = 2'-O-methyl ribonucleotide
  modified_base 50: mod_base = OTHER; note = 2'-O-methyl ribonucleotide
  modified_base 52: mod_base = OTHER; note = 2'-O-methyl ribonucleotide
  modified_base 53: mod_base = OTHER; note = 2'-O-methyl ribonucleotide
  modified_base 54: mod_base = OTHER; note = 2'-O-methyl ribonucleotide
  modified_base 57: mod_base = OTHER; note = 2'-O-methyl ribonucleotide
  modified_base 61: mod_base = OTHER; note = 2'-O-methyl ribonucleotide
  modified_base 66: mod_base = OTHER; note = 2'-O-methyl ribonucleotide
  modified_base 67: mod_base = OTHER; note = 2'-O-methyl ribonucleotide
  modified_base 70: mod_base = OTHER; note = 2'-O-methyl ribonucleotide
  modified_base 71: mod_base = OTHER; note = 2'-O-methyl ribonucleotide
  modified_base 72: mod_base = OTHER; note = 2'-O-methyl ribonucleotide
  modified_base 74: mod_base = OTHER; note = 2'-O-methyl ribonucleotide
  modified_base 75: mod_base = OTHER; note = 2'-O-methyl ribonucleotide
  modified_base 76: mod_base = OTHER; note = 2'-O-methyl ribonucleotide
  modified_base 77: mod_base = OTHER; note = 2'-O-methyl ribonucleotide
  modified_base 78: mod_base = OTHER; note = 2'-O-methyl ribonucleotide
  modified_base 79: mod_base = OTHER; note = 2'-O-methyl ribonucleotide
  modified_base 80: mod_base = OTHER; note = 2'-O-methyl ribonucleotide
  modified_base 82: mod_base = OTHER; note = 2'-O-methyl ribonucleotide
  modified_base 83: mod_base = OTHER; note = 2'-O-methyl ribonucleotide
  modified_base 84: mod_base = OTHER; note = 2'-O-methyl ribonucleotide
  modified_base 85: mod_base = OTHER; note = 2'-O-methyl ribonucleotide
  modified_base 86: mod_base = OTHER; note = 2'-O-methyl ribonucleotide
  modified_base 87: mod_base = OTHER; note = 2'-O-methyl ribonucleotide
  modified_base 89: mod_base = OTHER; note = 2'-O-methyl ribonucleotide
  modified_base 92: mod_base = OTHER; note = 2'-O-methyl ribonucleotide
  modified_base 93: mod_base = OTHER; note = 2'-O-methyl ribonucleotide
  modified_base 94: mod_base = OTHER; note = 2'-O-methyl ribonucleotide
  modified_base 95: mod_base = OTHER; note = 2'-O-methyl ribonucleotide
  modified_base 96: mod_base = OTHER; note = 2'-O-methyl ribonucleotide
  modified_base 97: mod_base = OTHER; note = 2'-O-methyl ribonucleotide
  modified_base 98: mod_base = OTHER; note = 2'-O-methyl ribonucleotide
  modified_base 99: mod_base = OTHER; note = 2'-O-methyl ribonucleotide
  modified_base 100: mod_base = OTHER; note = 2'-O-methyl ribonucleotide
  modified_base 1..3: mod_base = OTHER; note = phosphorothioate linkage
  modified_base 25..26: mod_base = OTHER; note = phosphorothioate linkage
  modified_base 64..65: mod_base = OTHER; note = phosphorothioate linkage
  modified_base 98..100: mod_base = OTHER; note = phosphorothioate linkage

SEQ ID NO: 1791 - RNA, 103 nt, synthetic construct; identical to SEQ ID NO: 1700
  source 1..103: mol_type = other RNA
  modified_base 1: mod_base = OTHER; note = 2'-O-methyl ribonucleotide
  modified_base 2: mod_base = OTHER; note = 2'-O-methyl ribonucleotide
  modified_base 3: mod_base = OTHER; note = 2'-O-methyl ribonucleotide
  modified_base 21: mod_base = OTHER; note = 2'-O-methyl ribonucleotide
  modified_base 28: mod_base = OTHER; note = 2'-O-methyl ribonucleotide
  modified_base 29: mod_base = OTHER; note = 2'-O-methyl ribonucleotide
  modified_base 30: mod_base = OTHER; note = 2'-O-methyl ribonucleotide
  modified_base 31: mod_base = OTHER; note = 2'-O-methyl ribonucleotide
  modified_base 32: mod_base = OTHER; note = 2'-O-methyl ribonucleotide
  modified_base 34: mod_base = OTHER; note = 2'-O-methyl ribonucleotide
  modified_base 35: mod_base = OTHER; note = 2'-O-methyl ribonucleotide
  modified_base 36: mod_base = OTHER; note = 2'-O-methyl ribonucleotide
  modified_base 37: mod_base = OTHER; note = 2'-O-methyl ribonucleotide
  modified_base 38: mod_base = OTHER; note = 2'-O-methyl ribonucleotide
  modified_base 39: mod_base = OTHER; note = 2'-O-methyl ribonucleotide
  modified_base 40: mod_base = OTHER; note = 2'-O-methyl ribonucleotide
  modified_base 41: mod_base = OTHER; note = 2'-O-methyl ribonucleotide
  modified_base 42: mod_base = OTHER; note = 2'-O-methyl ribonucleotide
  modified_base 46: mod_base = OTHER; note = 2'-O-methyl ribonucleotide
  modified_base 48: mod_base = OTHER; note = 2'-O-methyl ribonucleotide
  modified_base 50: mod_base = OTHER; note = 2'-O-methyl ribonucleotide
  modified_base 52: mod_base = OTHER; note = 2'-O-methyl ribonucleotide
  modified_base 53: mod_base = OTHER; note = 2'-O-methyl ribonucleotide
  modified_base 54: mod_base = OTHER; note = 2'-O-methyl ribonucleotide
  modified_base 55: mod_base = OTHER; note = 2'-O-methyl ribonucleotide
  modified_base 56: mod_base = OTHER; note = 2'-O-methyl ribonucleotide
  modified_base 57: mod_base = OTHER; note = 2'-O-methyl ribonucleotide
  modified_base 60: mod_base = OTHER; note = 2'-O-methyl ribonucleotide
  modified_base 61: mod_base = OTHER; note = 2'-O-methyl ribonucleotide
  modified_base 66: mod_base = OTHER; note = 2'-O-methyl ribonucleotide
  modified_base 67: mod_base = OTHER; note = 2'-O-methyl ribonucleotide
  modified_base 70: mod_base = OTHER; note = 2'-O-methyl ribonucleotide
  modified_base 71: mod_base = OTHER; note = 2'-O-methyl ribonucleotide
  modified_base 72: mod_base = OTHER; note = 2'-O-methyl ribonucleotide
  modified_base 74: mod_base = OTHER; note = 2'-O-methyl ribonucleotide
  modified_base 75: mod_base = OTHER; note = 2'-O-methyl ribonucleotide
  modified_base 76: mod_base = OTHER; note = 2'-O-methyl ribonucleotide
  modified_base 77: mod_base = OTHER; note = 2'-O-methyl ribonucleotide
  modified_base 78: mod_base = OTHER; note = 2'-O-methyl ribonucleotide
  modified_base 79: mod_base = OTHER; note = 2'-O-methyl ribonucleotide
  modified_base 80: mod_base = OTHER; note = 2'-O-methyl ribonucleotide
  modified_base 81: mod_base = OTHER; note = 2'-O-methyl ribonucleotide
  modified_base 83: mod_base = OTHER; note = 2'-O-methyl ribonucleotide
  modified_base 84: mod_base = OTHER; note = 2'-O-methyl ribonucleotide
  modified_base 85: mod_base = OTHER; note = 2'-O-methyl ribonucleotide
  modified_base 86: mod_base = OTHER; note = 2'-O-methyl ribonucleotide
  modified_base 87: mod_base = OTHER; note = 2'-O-methyl ribonucleotide
  modified_base 88: mod_base = OTHER; note = 2'-O-methyl ribonucleotide
  modified_base 89: mod_base = OTHER; note = 2'-O-methyl ribonucleotide
  modified_base 90: mod_base = OTHER; note = 2'-O-methyl ribonucleotide
  modified_base 91: mod_base = OTHER; note = 2'-O-methyl ribonucleotide
  modified_base 92: mod_base = OTHER; note = 2'-O-methyl ribonucleotide
  modified_base 93: mod_base = OTHER; note = 2'-O-methyl ribonucleotide
  modified_base 94: mod_base = OTHER; note = 2'-O-methyl ribonucleotide
  modified_base 95: mod_base = OTHER; note = 2'-O-methyl ribonucleotide
  modified_base 96: mod_base = OTHER; note = 2'-O-methyl ribonucleotide
  modified_base 97: mod_base = OTHER; note = 2'-O-methyl ribonucleotide
  modified_base 98: mod_base = OTHER; note = 2'-O-methyl ribonucleotide
  modified_base 99: mod_base = OTHER; note = 2'-O-methyl ribonucleotide
  modified_base 100: mod_base = OTHER; note = 2'-O-methyl ribonucleotide
  modified_base 1..3: mod_base = OTHER; note = phosphorothioate linkage
  modified_base 25..26: mod_base = OTHER; note = phosphorothioate linkage
  modified_base 64..65: mod_base = OTHER; note = phosphorothioate linkage
  modified_base 98..100: mod_base = OTHER; note = phosphorothioate linkage

SEQ ID NO: 1792 - RNA, 103 nt, synthetic construct; identical to SEQ ID NO: 1643
  source 1..103: mol_type = other RNA
  modified_base 1: mod_base = OTHER; note = 2'-O-methyl ribonucleotide
  modified_base 2: mod_base = OTHER; note = 2'-O-methyl ribonucleotide
  modified_base 3: mod_base = OTHER; note = 2'-O-methyl ribonucleotide
  modified_base 21: mod_base = OTHER; note = 2'-O-methyl ribonucleotide
  modified_base 28: mod_base = OTHER; note = 2'-O-methyl ribonucleotide
  modified_base 29: mod_base = OTHER; note = 2'-O-methyl ribonucleotide
  modified_base 30: mod_base = OTHER; note = 2'-O-methyl ribonucleotide
  modified_base 31: mod_base = OTHER; note = 2'-O-methyl ribonucleotide
  modified_base 32: mod_base = OTHER; note = 2'-O-methyl ribonucleotide
  modified_base 34: mod_base = OTHER; note = 2'-O-methyl ribonucleotide
  modified_base 35: mod_base = OTHER; note = 2'-O-methyl ribonucleotide
  modified_base 36: mod_base = OTHER; note = 2'-O-methyl ribonucleotide
  modified_base 37: mod_base = OTHER; note = 2'-O-methyl ribonucleotide
  modified_base 38: mod_base = OTHER; note = 2'-O-methyl ribonucleotide
  modified_base 39: mod_base = OTHER; note = 2'-O-methyl ribonucleotide
  modified_base 40: mod_base = OTHER; note = 2'-O-methyl ribonucleotide
  modified_base 41: mod_base = OTHER; note = 2'-O-methyl ribonucleotide
  modified_base 42: mod_base = OTHER; note = 2'-O-methyl ribonucleotide
  modified_base 46: mod_base = OTHER; note = 2'-O-methyl ribonucleotide
  modified_base 48: mod_base = OTHER; note = 2'-O-methyl ribonucleotide
  modified_base 50: mod_base = OTHER; note = 2'-O-methyl ribonucleotide
  modified_base 52: mod_base = OTHER; note = 2'-O-methyl ribonucleotide
  modified_base 53: mod_base = OTHER; note = 2'-O-methyl ribonucleotide
  modified_base 54: mod_base = OTHER; note = 2'-O-methyl ribonucleotide
  modified_base 57: mod_base = OTHER; note = 2'-O-methyl ribonucleotide
  modified_base 61: mod_base = OTHER; note = 2'-O-methyl ribonucleotide
  modified_base 66: mod_base = OTHER; note = 2'-O-methyl ribonucleotide
  modified_base 67: mod_base = OTHER; note = 2'-O-methyl ribonucleotide
  modified_base 70: mod_base = OTHER; note = 2'-O-methyl ribonucleotide
  modified_base 71: mod_base = OTHER; note = 2'-O-methyl ribonucleotide
  modified_base 72: mod_base = OTHER; note = 2'-O-methyl ribonucleotide
  modified_base 74: mod_base = OTHER; note = 2'-O-methyl ribonucleotide
  modified_base 75: mod_base = OTHER; note = 2'-O-methyl ribonucleotide
  modified_base 76: mod_base = OTHER; note = 2'-O-methyl ribonucleotide
  modified_base 77: mod_base = OTHER; note = 2'-O-methyl ribonucleotide
  modified_base 78: mod_base = OTHER; note = 2'-O-methyl ribonucleotide
  modified_base 79: mod_base = OTHER; note = 2'-O-methyl ribonucleotide
  modified_base 80: mod_base = OTHER; note = 2'-O-methyl ribonucleotide
  modified_base 82: mod_base = OTHER; note = 2'-O-methyl ribonucleotide
  modified_base 83: mod_base = OTHER; note = 2'-O-methyl ribonucleotide
  modified_base 84: mod_base = OTHER; note = 2'-O-methyl ribonucleotide
  modified_base 85: mod_base = OTHER; note = 2'-O-methyl ribonucleotide
  modified_base 86: mod_base = OTHER; note = 2'-O-methyl ribonucleotide
  modified_base 87: mod_base = OTHER; note = 2'-O-methyl ribonucleotide
  modified_base 89: mod_base = OTHER; note = 2'-O-methyl ribonucleotide
  modified_base 92: mod_base = OTHER; note = 2'-O-methyl ribonucleotide
  modified_base 93: mod_base = OTHER; note = 2'-O-methyl ribonucleotide
  modified_base 94: mod_base = OTHER; note = 2'-O-methyl ribonucleotide
  modified_base 95: mod_base = OTHER; note = 2'-O-methyl ribonucleotide
  modified_base 96: mod_base = OTHER; note = 2'-O-methyl ribonucleotide
  modified_base 97: mod_base = OTHER; note = 2'-O-methyl ribonucleotide
  modified_base 98: mod_base = OTHER; note = 2'-O-methyl ribonucleotide
  modified_base 99: mod_base = OTHER; note = 2'-O-methyl ribonucleotide
  modified_base 100: mod_base = OTHER; note = 2'-O-methyl ribonucleotide
  modified_base 1..3: mod_base = OTHER; note = phosphorothioate linkage
  modified_base 25..26: mod_base = OTHER; note = phosphorothioate linkage
  modified_base 45..46: mod_base = OTHER; note = phosphorothioate linkage
  modified_base 64..65: mod_base = OTHER; note = phosphorothioate linkage
  modified_base 98..100: mod_base = OTHER; note = phosphorothioate linkage

SEQ ID NO: 1793 - RNA, 103 nt, synthetic construct; identical to SEQ ID NO: 1699
  source 1..103: mol_type = other RNA
  modified_base 1: mod_base = OTHER; note = 2'-O-methyl ribonucleotide
  modified_base 2: mod_base = OTHER; note = 2'-O-methyl ribonucleotide
  modified_base 3: mod_base = OTHER; note = 2'-O-methyl ribonucleotide
  modified_base 21: mod_base = OTHER; note = 2'-O-methyl ribonucleotide
  modified_base 28: mod_base = OTHER; note = 2'-O-methyl ribonucleotide
  modified_base 29: mod_base = OTHER; note = 2'-O-methyl ribonucleotide
  modified_base 30: mod_base = OTHER; note = 2'-O-methyl ribonucleotide
  modified_base 31: mod_base = OTHER; note = 2'-O-methyl ribonucleotide
  modified_base 32: mod_base = OTHER; note = 2'-O-methyl ribonucleotide
  modified_base 34: mod_base = OTHER; note = 2'-O-methyl ribonucleotide
  modified_base 35: mod_base = OTHER; note = 2'-O-methyl ribonucleotide
  modified_base 36: mod_base = OTHER; note = 2'-O-methyl ribonucleotide
  modified_base 37: mod_base = OTHER; note = 2'-O-methyl ribonucleotide
  modified_base 38: mod_base = OTHER; note = 2'-O-methyl ribonucleotide
  modified_base 39: mod_base = OTHER; note = 2'-O-methyl ribonucleotide
  modified_base 40: mod_base = OTHER; note = 2'-O-methyl ribonucleotide
  modified_base 41: mod_base = OTHER; note = 2'-O-methyl ribonucleotide
  modified_base 42: mod_base = OTHER; note = 2'-O-methyl ribonucleotide
  modified_base 46: mod_base = OTHER; note = 2'-O-methyl ribonucleotide
  modified_base 48: mod_base = OTHER; note = 2'-O-methyl ribonucleotide
  modified_base 50: mod_base = OTHER; note = 2'-O-methyl ribonucleotide
  modified_base 52: mod_base = OTHER; note = 2'-O-methyl ribonucleotide
  modified_base 53: mod_base = OTHER; note = 2'-O-methyl ribonucleotide
  modified_base 54: mod_base = OTHER; note = 2'-O-methyl ribonucleotide
  modified_base 57: mod_base = OTHER; note = 2'-O-methyl ribonucleotide
  modified_base 61: mod_base = OTHER; note = 2'-O-methyl ribonucleotide
  modified_base 66: mod_base = OTHER; note = 2'-O-methyl ribonucleotide
  modified_base 67: mod_base = OTHER; note = 2'-O-methyl ribonucleotide
  modified_base 70: mod_base = OTHER; note = 2'-O-methyl ribonucleotide
  modified_base 71: mod_base = OTHER; note = 2'-O-methyl ribonucleotide
  modified_base 72: mod_base = OTHER; note = 2'-O-methyl ribonucleotide
  modified_base 74: mod_base = OTHER; note = 2'-O-methyl ribonucleotide
  modified_base 75: mod_base = OTHER; note = 2'-O-methyl ribonucleotide
  modified_base 76: mod_base = OTHER; note = 2'-O-methyl ribonucleotide
  modified_base 77: mod_base = OTHER; note = 2'-O-methyl ribonucleotide
  modified_base 78: mod_base = OTHER; note = 2'-O-methyl ribonucleotide
  modified_base 79: mod_base = OTHER; note = 2'-O-methyl ribonucleotide
  modified_base 80: mod_base = OTHER; note = 2'-O-methyl ribonucleotide
  modified_base 82: mod_base = OTHER; note = 2'-O-methyl ribonucleotide
  modified_base 83: mod_base = OTHER; note = 2'-O-methyl ribonucleotide
  modified_base 84: mod_base = OTHER; note = 2'-O-methyl ribonucleotide
  modified_base 85: mod_base = OTHER; note = 2'-O-methyl ribonucleotide
  modified_base 86: mod_base = OTHER; note = 2'-O-methyl ribonucleotide
  modified_base 87: mod_base = OTHER; note = 2'-O-methyl ribonucleotide
  modified_base 89: mod_base = OTHER; note = 2'-O-methyl ribonucleotide
  modified_base 92: mod_base = OTHER; note = 2'-O-methyl ribonucleotide
  modified_base 93: mod_base = OTHER; note = 2'-O-methyl ribonucleotide
  modified_base 94: mod_base = OTHER; note = 2'-O-methyl ribonucleotide
  modified_base 95: mod_base = OTHER; note = 2'-O-methyl ribonucleotide
  modified_base 96: mod_base = OTHER; note = 2'-O-methyl ribonucleotide
  modified_base 97: mod_base = OTHER; note = 2'-O-methyl ribonucleotide
  modified_base 98: mod_base = OTHER; note = 2'-O-methyl ribonucleotide
  modified_base 99: mod_base = OTHER; note = 2'-O-methyl ribonucleotide
  modified_base 100: mod_base = OTHER; note = 2'-O-methyl ribonucleotide
  modified_base 1..3: mod_base = OTHER; note = phosphorothioate linkage
  modified_base 25..26: mod_base = OTHER; note = phosphorothioate linkage
  modified_base 45..46: mod_base = OTHER; note = phosphorothioate linkage
  modified_base 64..65: mod_base = OTHER; note = phosphorothioate linkage
  modified_base 98..100: mod_base = OTHER; note = phosphorothioate linkage

SEQ ID NO: 1794 - RNA, 103 nt, synthetic construct; identical to SEQ ID NO: 1700
  source 1..103: mol_type = other RNA
  modified_base 1: mod_base = OTHER; note = 2'-O-methyl ribonucleotide
  modified_base 2: mod_base = OTHER; note = 2'-O-methyl ribonucleotide
  modified_base 3: mod_base = OTHER; note = 2'-O-methyl ribonucleotide
  modified_base 21: mod_base = OTHER; note = 2'-O-methyl ribonucleotide
  modified_base 28: mod_base = OTHER; note = 2'-O-methyl ribonucleotide
  modified_base 29: mod_base = OTHER; note = 2'-O-methyl ribonucleotide
  modified_base 30: mod_base = OTHER; note = 2'-O-methyl ribonucleotide
  modified_base 31: mod_base = OTHER; note = 2'-O-methyl ribonucleotide
  modified_base 32: mod_base = OTHER; note = 2'-O-methyl ribonucleotide
  modified_base 34: mod_base = OTHER; note = 2'-O-methyl ribonucleotide
  modified_base 35: mod_base = OTHER; note = 2'-O-methyl ribonucleotide
  modified_base 36: mod_base = OTHER; note = 2'-O-methyl ribonucleotide
  modified_base 37: mod_base = OTHER; note = 2'-O-methyl ribonucleotide
  modified_base 38: mod_base = OTHER; note = 2'-O-methyl ribonucleotide
  modified_base 39: mod_base = OTHER; note = 2'-O-methyl ribonucleotide
  modified_base 40: mod_base = OTHER; note = 2'-O-methyl ribonucleotide
  modified_base 41: mod_base = OTHER; note = 2'-O-methyl ribonucleotide
  modified_base 42: mod_base = OTHER; note = 2'-O-methyl ribonucleotide
  modified_base 46: mod_base = OTHER; note = 2'-O-methyl ribonucleotide
  modified_base 48: mod_base = OTHER; note = 2'-O-methyl ribonucleotide
  modified_base 50: mod_base = OTHER; note = 2'-O-methyl ribonucleotide
  modified_base 52: mod_base = OTHER; note = 2'-O-methyl ribonucleotide
  modified_base 53: mod_base = OTHER; note = 2'-O-methyl ribonucleotide
  modified_base 54: mod_base = OTHER; note = 2'-O-methyl ribonucleotide
  modified_base 55: mod_base = OTHER; note = 2'-O-methyl ribonucleotide
  modified_base 56: mod_base = OTHER; note = 2'-O-methyl ribonucleotide
  modified_base 57: mod_base = OTHER; note = 2'-O-methyl ribonucleotide
  modified_base 60: mod_base = OTHER; note = 2'-O-methyl ribonucleotide
  modified_base 61: mod_base = OTHER; note = 2'-O-methyl ribonucleotide
  modified_base 66: mod_base = OTHER; note = 2'-O-methyl ribonucleotide
  modified_base 67: mod_base = OTHER; note = 2'-O-methyl ribonucleotide
  modified_base 70: mod_base = OTHER; note = 2'-O-methyl ribonucleotide
  modified_base 71: mod_base = OTHER; note = 2'-O-methyl ribonucleotide
  modified_base 72: mod_base = OTHER; note = 2'-O-methyl ribonucleotide
  modified_base 74: mod_base = OTHER; note = 2'-O-methyl ribonucleotide
  modified_base 75: mod_base = OTHER; note = 2'-O-methyl ribonucleotide
  modified_base 76: mod_base = OTHER; note = 2'-O-methyl ribonucleotide
  modified_base 77: mod_base = OTHER; note = 2'-O-methyl ribonucleotide
  modified_base 78: mod_base = OTHER; note = 2'-O-methyl ribonucleotide
  modified_base 79: mod_base = OTHER; note = 2'-O-methyl ribonucleotide
  modified_base 80: mod_base = OTHER; note = 2'-O-methyl ribonucleotide
  modified_base 81: mod_base = OTHER; note = 2'-O-methyl ribonucleotide
  modified_base 83: mod_base = OTHER; note = 2'-O-methyl ribonucleotide
  modified_base 84: mod_base = OTHER; note = 2'-O-methyl ribonucleotide
  modified_base 85: mod_base = OTHER; note = 2'-O-methyl ribonucleotide
  modified_base 86: mod_base = OTHER; note = 2'-O-methyl ribonucleotide
  modified_base 87: mod_base = OTHER; note = 2'-O-methyl ribonucleotide
  modified_base 88: mod_base = OTHER; note = 2'-O-methyl ribonucleotide
  modified_base 89: mod_base = OTHER; note = 2'-O-methyl ribonucleotide
  modified_base 90: mod_base = OTHER; note = 2'-O-methyl ribonucleotide
  modified_base 91: mod_base = OTHER; note = 2'-O-methyl ribonucleotide
  modified_base 92: mod_base = OTHER; note = 2'-O-methyl ribonucleotide
  modified_base 93: mod_base = OTHER; note = 2'-O-methyl ribonucleotide
  modified_base 94: mod_base = OTHER; note = 2'-O-methyl ribonucleotide
  modified_base 95: mod_base = OTHER; note = 2'-O-methyl ribonucleotide
  modified_base 96: mod_base = OTHER; note = 2'-O-methyl ribonucleotide
  modified_base 97: mod_base = OTHER; note = 2'-O-methyl ribonucleotide
  modified_base 98: mod_base = OTHER; note = 2'-O-methyl ribonucleotide
  modified_base 99: mod_base = OTHER; note = 2'-O-methyl ribonucleotide
  modified_base 100: mod_base = OTHER; note = 2'-O-methyl ribonucleotide
  modified_base 1..3: mod_base = OTHER; note = phosphorothioate linkage
  modified_base 25..26: mod_base = OTHER; note = phosphorothioate linkage
  modified_base 45..46: mod_base = OTHER; note = phosphorothioate linkage
  modified_base 64..65: mod_base = OTHER; note = phosphorothioate linkage
  modified_base 98..100: mod_base = OTHER; note = phosphorothioate linkage

SEQ ID NO: 1795 - DNA, 103 bp, synthetic construct
  source 1..103: mol_type = other DNA
  modified_base 1: mod_base = OTHER; note = 2'-O-methyl ribonucleotide
  modified_base 2: mod_base = OTHER; note = 2'-O-methyl ribonucleotide
  modified_base 3: mod_base = OTHER; note = 2'-O-methyl ribonucleotide
  modified_base 21: mod_base = OTHER; note = 2'-O-methyl ribonucleotide
  modified_base 28: mod_base = OTHER; note = 2'-O-methyl ribonucleotide
  modified_base 29: mod_base = OTHER; note = 2'-O-methyl ribonucleotide
  modified_base 30: mod_base = OTHER; note = 2'-O-methyl ribonucleotide
  modified_base 31: mod_base = OTHER; note = 2'-O-methyl ribonucleotide
  modified_base 32: mod_base = OTHER; note = 2'-O-methyl ribonucleotide
  modified_base 34: mod_base = OTHER; note = 2'-O-methyl ribonucleotide
  modified_base 35: mod_base = OTHER; note = 2'-O-methyl ribonucleotide
  modified_base 36: mod_base = OTHER; note = 2'-O-methyl ribonucleotide
  modified_base 37: mod_base = OTHER; note = 2'-O-methyl ribonucleotide
  modified_base 38: mod_base = OTHER; note = 2'-O-methyl ribonucleotide
  modified_base 39: mod_base = OTHER; note = 2'-O-methyl ribonucleotide
  modified_base 40: mod_base = OTHER; note = 2'-O-methyl ribonucleotide
  modified_base 41: mod_base = OTHER; note = 2'-O-methyl ribonucleotide
  modified_base 42: mod_base = OTHER; note = 2'-O-methyl ribonucleotide
  modified_base 46: mod_base = OTHER; note = 2'-O-methyl ribonucleotide
  modified_base 48: mod_base = OTHER; note = 2'-O-methyl ribonucleotide
  modified_base 50: mod_base = OTHER; note = 2'-O-methyl ribonucleotide
  modified_base 52: mod_base = OTHER; note = 2'-O-methyl ribonucleotide
  modified_base 53: mod_base = OTHER; note = 2'-O-methyl ribonucleotide
  modified_base 54: mod_base = OTHER; note = 2'-O-methyl ribonucleotide
  modified_base 57: mod_base = OTHER; note = 2'-O-methyl ribonucleotide
  modified_base 61: mod_base = OTHER; note = 2'-O-methyl ribonucleotide
  modified_base 66: mod_base = OTHER; note = 2'-O-methyl ribonucleotide
  modified_base 67: mod_base = OTHER; note = 2'-O-methyl ribonucleotide
  modified_base 70: mod_base = OTHER; note = 2'-O-methyl ribonucleotide
  modified_base 71: mod_base = OTHER; note = 2'-O-methyl ribonucleotide
  modified_base 72: mod_base = OTHER; note = 2'-O-methyl ribonucleotide
  modified_base 74: mod_base = OTHER; note = 2'-O-methyl ribonucleotide
  modified_base 75: mod_base = OTHER; note = 2'-O-methyl ribonucleotide
  modified_base 76: mod_base = OTHER; note = 2'-O-methyl ribonucleotide
  modified_base 77: mod_base = OTHER; note = 2'-O-methyl ribonucleotide
  modified_base 78: mod_base = OTHER; note = 2'-O-methyl ribonucleotide
  modified_base 79: mod_base = OTHER; note = 2'-O-methyl ribonucleotide
  modified_base 80: mod_base = OTHER; note = 2'-O-methyl ribonucleotide
  modified_base 82: mod_base = OTHER; note = 2'-O-methyl ribonucleotide
  modified_base 83: mod_base = OTHER; note = 2'-O-methyl ribonucleotide
  modified_base 84: mod_base = OTHER; note = 2'-O-methyl ribonucleotide
  modified_base 85: mod_base = OTHER; note = 2'-O-methyl ribonucleotide
  modified_base 86: mod_base = OTHER; note = 2'-O-methyl ribonucleotide
  modified_base 87: mod_base = OTHER; note = 2'-O-methyl ribonucleotide
  modified_base 89: mod_base = OTHER; note = 2'-O-methyl ribonucleotide
  modified_base 92: mod_base = OTHER; note = 2'-O-methyl ribonucleotide
  modified_base 93: mod_base = OTHER; note = 2'-O-methyl ribonucleotide
  modified_base 94: mod_base = OTHER; note = 2'-O-methyl ribonucleotide
  modified_base 95: mod_base = OTHER; note = 2'-O-methyl ribonucleotide
  modified_base 96: mod_base = OTHER; note = 2'-O-methyl ribonucleotide
  modified_base 97: mod_base = OTHER; note = 2'-O-methyl ribonucleotide
  modified_base 98: mod_base = OTHER; note = 2'-O-methyl ribonucleotide
  modified_base 99: mod_base = OTHER; note = 2'-O-methyl ribonucleotide
  modified_base 100: mod_base = OTHER; note = 2'-O-methyl ribonucleotide
  modified_base 101: mod_base = OTHER; note = uniform ribonucleotides (A, C, G, inosine or U), deoxynucleotides (A, G, C, inosine or T), ribonebularine, 2'-O-methylnebularine or deoxynebularine
  modified_base 102: mod_base = OTHER; note = uniform ribonucleotides (A, C, G, inosine or U), deoxynucleotides (A, G, C, inosine or T), ribonebularine, 2'-O-methylnebularine or deoxynebularine
  modified_base 103: mod_base = OTHER; note = uniform ribonucleotides (A, C, G, inosine or U), deoxynucleotides (A, G, C, inosine or T), ribonebularine, 2'-O-methylnebularine or deoxynebularine
  modified_base 1..4: mod_base = OTHER; note = phosphorothioate linkage
  modified_base 97..100: mod_base = OTHER; note = phosphorothioate linkage
  misc_feature 1..100: note = RNA
  misc_feature 101..103: note = Optionally DNA or RNA
cccataccttggagcaacgggttttagagctagaaatagcaagttaaaataaggctagtccgttatcaacttgaaaaagtggcaccgagtcggtgcttttnnn

SEQ ID NO: 1796 - DNA, 103 bp, synthetic construct
  source 1..103: mol_type = other DNA
  modified_base 1: mod_base = OTHER; note = 2'-O-methyl ribonucleotide
  modified_base 2: mod_base = OTHER; note = 2'-O-methyl ribonucleotide
  modified_base 3: mod_base = OTHER; note = 2'-O-methyl ribonucleotide
  modified_base 21: mod_base = OTHER; note = 2'-O-methyl ribonucleotide
  modified_base 28: mod_base = OTHER; note = 2'-O-methyl ribonucleotide
  modified_base 29: mod_base = OTHER; note = 2'-O-methyl ribonucleotide
  modified_base 30: mod_base = OTHER; note = 2'-O-methyl ribonucleotide
  modified_base 31: mod_base = OTHER; note = 2'-O-methyl ribonucleotide
  modified_base 32: mod_base = OTHER; note = 2'-O-methyl ribonucleotide
  modified_base 34: mod_base = OTHER; note = 2'-O-methyl ribonucleotide
  modified_base 35: mod_base = OTHER; note = 2'-O-methyl ribonucleotide
  modified_base 36: mod_base = OTHER; note = 2'-O-methyl ribonucleotide
  modified_base 37: mod_base = OTHER; note = 2'-O-methyl ribonucleotide
  modified_base 38: mod_base = OTHER; note = 2'-O-methyl ribonucleotide
  modified_base 39: mod_base = OTHER; note = 2'-O-methyl ribonucleotide
  modified_base 40: mod_base = OTHER; note = 2'-O-methyl ribonucleotide
  modified_base 41: mod_base = OTHER; note = 2'-O-methyl ribonucleotide
  modified_base 42: mod_base = OTHER; note = 2'-O-methyl ribonucleotide
  modified_base 46: mod_base = OTHER; note = 2'-O-methyl ribonucleotide
  modified_base 48: mod_base = OTHER; note = 2'-O-methyl ribonucleotide
  modified_base 50: mod_base = OTHER; note = 2'-O-methyl ribonucleotide
  modified_base 52: mod_base = OTHER; note = 2'-O-methyl ribonucleotide
  modified_base 53: mod_base = OTHER; note = 2'-O-methyl ribonucleotide
  modified_base 54: mod_base = OTHER; note = 2'-O-methyl ribonucleotide
  modified_base 57: mod_base = OTHER; note = 2'-O-methyl ribonucleotide
  modified_base 61: mod_base = OTHER; note = 2'-O-methyl ribonucleotide
  modified_base 66: mod_base = OTHER; note = 2'-O-methyl ribonucleotide
  modified_base 67: mod_base = OTHER; note = 2'-O-methyl ribonucleotide
  modified_base 70: mod_base = OTHER; note = 2'-O-methyl ribonucleotide
  modified_base 71: mod_base = OTHER; note = 2'-O-methyl ribonucleotide
  modified_base 72: mod_base = OTHER; note = 2'-O-methyl ribonucleotide
  modified_base 74: mod_base = OTHER; note = 2'-O-methyl ribonucleotide
  modified_base 75: mod_base = OTHER; note = 2'-O-methyl ribonucleotide
  modified_base 76: mod_base = OTHER; note = 2'-O-methyl ribonucleotide
  modified_base 77: mod_base = OTHER; note = 2'-O-methyl ribonucleotide
  modified_base 78: mod_base = OTHER; note = 2'-O-methyl ribonucleotide
  modified_base 79: mod_base = OTHER; note = 2'-O-methyl ribonucleotide
  modified_base 80: mod_base = OTHER; note = 2'-O-methyl ribonucleotide
  modified_base 82: mod_base = OTHER; note = 2'-O-methyl ribonucleotide
  modified_base 83: mod_base = OTHER; note = 2'-O-methyl ribonucleotide
  modified_base 84: mod_base = OTHER; note = 2'-O-methyl ribonucleotide
  modified_base 85: mod_base = OTHER; note = 2'-O-methyl ribonucleotide
  modified_base 86: mod_base = OTHER; note = 2'-O-methyl ribonucleotide
  modified_base 87: mod_base = OTHER; note = 2'-O-methyl ribonucleotide
  modified_base 89: mod_base = OTHER; note = 2'-O-methyl ribonucleotide
  modified_base 92: mod_base = OTHER; note = 2'-O-methyl ribonucleotide
  modified_base 93: mod_base = OTHER; note = 2'-O-methyl ribonucleotide
  modified_base 94: mod_base = OTHER; note = 2'-O-methyl ribonucleotide
  modified_base 95: mod_base = OTHER; note = 2'-O-methyl ribonucleotide
  modified_base 96: mod_base = OTHER; note = 2'-O-methyl ribonucleotide
  modified_base 97: mod_base = OTHER; note = 2'-O-methyl ribonucleotide
  modified_base 98: mod_base = OTHER; note = 2'-O-methyl ribonucleotide
  modified_base 99: mod_base = OTHER; note = 2'-O-methyl ribonucleotide
  modified_base 100: mod_base = OTHER; note = 2'-O-methyl ribonucleotide
  modified_base 101: mod_base = OTHER; note = uniform ribonucleotides (A, C, G, inosine or U), deoxynucleotides (A, G, C, inosine or T), ribonebularine, 2'-O-methylnebularine or deoxynebularine
  modified_base 102: mod_base = OTHER; note = uniform ribonucleotides (A, C, G, inosine or U), deoxynucleotides (A, G, C, inosine or T), ribonebularine, 2'-O-methylnebularine or deoxynebularine
  modified_base 103: mod_base = OTHER; note = uniform ribonucleotides (A, C, G, inosine or U), deoxynucleotides (A, G, C, inosine or T), ribonebularine, 2'-O-methylnebularine or deoxynebularine
  modified_base 1..4: mod_base = OTHER; note = phosphorothioate linkage
  modified_base 97..100: mod_base = OTHER; note = phosphorothioate linkage
  misc_feature 1..100: note = RNA
  misc_feature 101..103: note = Optionally DNA or RNA
gagatacctgagtaactttcgttttagagctagaaatagcaagttaaaataaggctagtccgttatcaacttgaaaaagtggcaccgagtcggtgcttttnnn

SEQ ID NO: 1797 - DNA, 103 bp, synthetic construct
  source 1..103: mol_type = other DNA
  modified_base 1: mod_base = OTHER; note = 2'-O-methyl ribonucleotide
  modified_base 2: mod_base = OTHER; note = 2'-O-methyl ribonucleotide
  modified_base 3: mod_base = OTHER; note = 2'-O-methyl ribonucleotide
  modified_base 21: mod_base = OTHER; note = 2'-O-methyl ribonucleotide
  modified_base 28: mod_base = OTHER; note = 2'-O-methyl ribonucleotide
  modified_base 29: mod_base = OTHER; note = 2'-O-methyl ribonucleotide
  modified_base 30: mod_base = OTHER; note = 2'-O-methyl ribonucleotide
  modified_base 31: mod_base = OTHER; note = 2'-O-methyl ribonucleotide
  modified_base 32: mod_base = OTHER; note = 2'-O-methyl ribonucleotide
  modified_base 34: mod_base = OTHER; note = 2'-O-methyl ribonucleotide
  modified_base 35: mod_base = OTHER; note = 2'-O-methyl ribonucleotide
  modified_base 36: mod_base = OTHER; note = 2'-O-methyl ribonucleotide
  modified_base 37: mod_base = OTHER; note = 2'-O-methyl ribonucleotide
  modified_base 38: mod_base = OTHER; note = 2'-O-methyl ribonucleotide
  modified_base 39: mod_base = OTHER; note = 2'-O-methyl ribonucleotide
  modified_base 40: mod_base = OTHER; note = 2'-O-methyl ribonucleotide
  modified_base 41: mod_base = OTHER; note = 2'-O-methyl ribonucleotide
  modified_base 42: mod_base = OTHER; note = 2'-O-methyl ribonucleotide
  modified_base 46: mod_base = OTHER; note = 2'-O-methyl ribonucleotide
  modified_base 48: mod_base = OTHER; note = 2'-O-methyl ribonucleotide
  modified_base 50: mod_base = OTHER; note = 2'-O-methyl ribonucleotide
  modified_base 52: mod_base = OTHER; note = 2'-O-methyl ribonucleotide
  modified_base 53: mod_base = OTHER; note = 2'-O-methyl ribonucleotide
  modified_base 54: mod_base = OTHER; note = 2'-O-methyl ribonucleotide
  modified_base 55: mod_base = OTHER; note = 2'-O-methyl ribonucleotide
  modified_base 56: mod_base = OTHER; note = 2'-O-methyl ribonucleotide
  modified_base 57: mod_base = OTHER; note = 2'-O-methyl ribonucleotide
  modified_base 60: mod_base = OTHER; note = 2'-O-methyl ribonucleotide
  modified_base 61: mod_base = OTHER; note = 2'-O-methyl ribonucleotide
  modified_base 66: mod_base = OTHER; note = 2'-O-methyl ribonucleotide
  modified_base 67: mod_base = OTHER; note = 2'-O-methyl ribonucleotide
  modified_base 70: mod_base = OTHER; note = 2'-O-methyl ribonucleotide
  modified_base 71: mod_base = OTHER; note = 2'-O-methyl ribonucleotide
  modified_base 72: mod_base = OTHER; note = 2'-O-methyl ribonucleotide
  modified_base 74: mod_base = OTHER; note = 2'-O-methyl ribonucleotide
  modified_base 75: mod_base = OTHER; note = 2'-O-methyl ribonucleotide
  modified_base 76: mod_base = OTHER; note = 2'-O-methyl ribonucleotide
  modified_base 77: mod_base = OTHER; note = 2'-O-methyl ribonucleotide
  modified_base 78: mod_base = OTHER; note = 2'-O-methyl ribonucleotide
  modified_base 79: mod_base = OTHER; note = 2'-O-methyl ribonucleotide
  modified_base 80: mod_base = OTHER; note = 2'-O-methyl ribonucleotide
  modified_base 81: mod_base = OTHER; note = 2'-O-methyl ribonucleotide
  modified_base 83: mod_base = OTHER; note = 2'-O-methyl ribonucleotide
  modified_base 84: mod_base = OTHER; note = 2'-O-methyl ribonucleotide
  modified_base 85: mod_base = OTHER; note = 2'-O-methyl ribonucleotide
  modified_base 86: mod_base = OTHER; note = 2'-O-methyl ribonucleotide
  modified_base 87: mod_base = OTHER; note = 2'-O-methyl ribonucleotide
  modified_base 88: mod_base = OTHER; note = 2'-O-methyl ribonucleotide
  modified_base 89: mod_base = OTHER; note = 2'-O-methyl ribonucleotide
  modified_base 90: mod_base = OTHER; note = 2'-O-methyl ribonucleotide
  modified_base 91: mod_base = OTHER; note = 2'-O-methyl ribonucleotide
  modified_base 92: mod_base = OTHER; note = 2'-O-methyl ribonucleotide
  modified_base 93: mod_base = OTHER; note = 2'-O-methyl ribonucleotide
  modified_base 94: mod_base = OTHER; note = 2'-O-methyl ribonucleotide
  modified_base 95: mod_base = OTHER; note = 2'-O-methyl ribonucleotide
  modified_base 96: mod_base = OTHER; note = 2'-O-methyl ribonucleotide
  modified_base 97: mod_base = OTHER; note = 2'-O-methyl ribonucleotide
  modified_base 98: mod_base = OTHER; note = 2'-O-methyl ribonucleotide
  modified_base 99: mod_base = OTHER; note = 2'-O-methyl ribonucleotide
  modified_base 100: mod_base = OTHER; note = 2'-O-methyl ribonucleotide
  modified_base 101: mod_base = OTHER; note = uniform ribonucleotides (A, C, G, inosine or U), deoxynucleotides (A, G, C, inosine or T), ribonebularine, 2'-O-methylnebularine or deoxynebularine
  modified_base 102: mod_base = OTHER; note = uniform ribonucleotides (A, C, G, inosine or U), deoxynucleotides (A, G, C, inosine or T), ribonebularine, 2'-O-methylnebularine or deoxynebularine
  modified_base 103: mod_base = OTHER; note = uniform ribonucleotides (A, C, G, inosine or U), deoxynucleotides (A, G, C, inosine or T), ribonebularine, 2'-O-methylnebularine or deoxynebularine
  modified_base 1..4: mod_base = OTHER; note = phosphorothioate linkage
  modified_base 97..100: mod_base = OTHER; note = phosphorothioate linkage
  misc_feature 1..100: note = RNA
  misc_feature 101..103: note = Optionally DNA or RNA
caggttccatgggatgctctgttttagagctagaaatagcaagttaaaataaggctagtccgttatcaacttgaaaaagtggcaccgagtcggtgcttttnnn

SEQ ID NO: 1798 - DNA, 103 bp, synthetic construct; identical to SEQ ID NO: 1795
  source 1..103: mol_type = other DNA
  modified_base 1: mod_base = OTHER; note = 2'-O-methyl ribonucleotide
  modified_base 2: mod_base = OTHER; note = 2'-O-methyl ribonucleotide
  modified_base 3: mod_base = OTHER; note = 2'-O-methyl ribonucleotide
  modified_base 21: mod_base = OTHER; note = 2'-O-methyl ribonucleotide
  modified_base 28: mod_base = OTHER; note = 2'-O-methyl ribonucleotide
  modified_base 29: mod_base = OTHER; note = 2'-O-methyl ribonucleotide
  modified_base 30: mod_base = OTHER; note = 2'-O-methyl ribonucleotide
  modified_base 31: mod_base = OTHER; note = 2'-O-methyl ribonucleotide
  modified_base 32: mod_base = OTHER; note = 2'-O-methyl ribonucleotide
  modified_base 34: mod_base = OTHER; note = 2'-O-methyl ribonucleotide
  modified_base 35: mod_base = OTHER; note = 2'-O-methyl ribonucleotide
  modified_base 36: mod_base = OTHER; note = 2'-O-methyl ribonucleotide
  modified_base 37: mod_base = OTHER; note = 2'-O-methyl ribonucleotide
  modified_base 38: mod_base = OTHER; note = 2'-O-methyl ribonucleotide
  modified_base 39: mod_base = OTHER; note = 2'-O-methyl ribonucleotide
  modified_base 40: mod_base = OTHER; note = 2'-O-methyl ribonucleotide
  modified_base 41: mod_base = OTHER; note = 2'-O-methyl ribonucleotide
  modified_base 42: mod_base = OTHER; note = 2'-O-methyl ribonucleotide
  modified_base 46: mod_base = OTHER; note = 2'-O-methyl ribonucleotide
  modified_base 48: mod_base = OTHER; note = 2'-O-methyl ribonucleotide
  modified_base 50: mod_base = OTHER; note = 2'-O-methyl ribonucleotide
  modified_base 52: mod_base = OTHER; note = 2'-O-methyl ribonucleotide
  modified_base 53: mod_base = OTHER; note = 2'-O-methyl ribonucleotide
  modified_base 54: mod_base = OTHER; note = 2'-O-methyl ribonucleotide
  modified_base 57: mod_base = OTHER; note = 2'-O-methyl ribonucleotide
  modified_base 61: mod_base = OTHER; note = 2'-O-methyl ribonucleotide
  modified_base 66: mod_base = OTHER; note = 2'-O-methyl ribonucleotide
  modified_base 67: mod_base = OTHER; note = 2'-O-methyl ribonucleotide
  modified_base 70: mod_base = OTHER; note = 2'-O-methyl ribonucleotide
  modified_base 71: mod_base = OTHER; note = 2'-O-methyl ribonucleotide
  modified_base 72: mod_base = OTHER; note = 2'-O-methyl ribonucleotide
  modified_base 74: mod_base = OTHER; note = 2'-O-methyl ribonucleotide
  modified_base 75: mod_base = OTHER; note = 2'-O-methyl ribonucleotide
  modified_base 76: mod_base = OTHER; note = 2'-O-methyl ribonucleotide
  modified_base 77: mod_base = OTHER; note = 2'-O-methyl ribonucleotide
  modified_base 78: mod_base = OTHER; note = 2'-O-methyl ribonucleotide
  modified_base 79: mod_base = OTHER; note = 2'-O-methyl ribonucleotide
  modified_base 80: mod_base = OTHER; note = 2'-O-methyl ribonucleotide
  modified_base 82: mod_base = OTHER; note = 2'-O-methyl ribonucleotide
  modified_base 83: mod_base = OTHER; note = 2'-O-methyl ribonucleotide
  modified_base 84: mod_base = OTHER; note = 2'-O-methyl ribonucleotide
  modified_base 85: mod_base = OTHER; note = 2'-O-methyl ribonucleotide
  modified_base 86: mod_base = OTHER; note = 2'-O-methyl ribonucleotide
  modified_base 87: mod_base = OTHER; note = 2'-O-methyl ribonucleotide
  modified_base 89: mod_base = OTHER; note = 2'-O-methyl ribonucleotide
  modified_base 92: mod_base = OTHER; note = 2'-O-methyl ribonucleotide
  modified_base 93: mod_base = OTHER; note = 2'-O-methyl ribonucleotide
  modified_base 94: mod_base = OTHER; note = 2'-O-methyl ribonucleotide
  modified_base 95: mod_base = OTHER; note = 2'-O-methyl ribonucleotide
  modified_base 96: mod_base = OTHER; note = 2'-O-methyl ribonucleotide
  modified_base 97: mod_base = OTHER; note = 2'-O-methyl ribonucleotide
  modified_base 98: mod_base = OTHER; note = 2'-O-methyl ribonucleotide
  modified_base 99: mod_base = OTHER; note = 2'-O-methyl ribonucleotide
  modified_base 100: mod_base = OTHER; note = 2'-O-methyl ribonucleotide
  modified_base 101: mod_base = OTHER; note = uniform ribonucleotides (A, C, G, inosine or U), deoxynucleotides (A, G, C, inosine or T), ribonebularine, 2'-O-methylnebularine or deoxynebularine
  modified_base 102: mod_base = OTHER; note = uniform ribonucleotides (A, C, G, inosine or U), deoxynucleotides (A, G, C, inosine or T), ribonebularine, 2'-O-methylnebularine or deoxynebularine
  modified_base 103: mod_base = OTHER; note = uniform ribonucleotides (A, C, G, inosine or U), deoxynucleotides (A, G, C, inosine or T), ribonebularine, 2'-O-methylnebularine or deoxynebularine
  modified_base 1..4: mod_base = OTHER; note = phosphorothioate linkage
  modified_base 64..65: mod_base = OTHER; note = phosphorothioate linkage
  modified_base 97..100: mod_base = OTHER; note = phosphorothioate linkage
  misc_feature 1..100: note = RNA
  misc_feature 101..103: note = Optionally DNA or RNA

SEQ ID NO: 1799 - DNA, 103 bp, synthetic construct; identical to SEQ ID NO: 1796
  source 1..103: mol_type = other DNA
  modified_base 1: mod_base = OTHER; note = 2'-O-methyl ribonucleotide
  modified_base 2: mod_base = OTHER; note = 2'-O-methyl ribonucleotide
  modified_base 3: mod_base = OTHER; note = 2'-O-methyl ribonucleotide
  modified_base 21: mod_base = OTHER; note = 2'-O-methyl ribonucleotide
  modified_base 28: mod_base = OTHER; note = 2'-O-methyl ribonucleotide
  modified_base 29: mod_base = OTHER; note = 2'-O-methyl ribonucleotide
  modified_base 30: mod_base = OTHER; note = 2'-O-methyl ribonucleotide
  modified_base 31: mod_base = OTHER; note = 2'-O-methyl ribonucleotide
  modified_base 32: mod_base = OTHER; note = 2'-O-methyl ribonucleotide
  modified_base 34: mod_base = OTHER; note = 2'-O-methyl ribonucleotide
  modified_base 35: mod_base = OTHER; note = 2'-O-methyl ribonucleotide
  modified_base 36: mod_base = OTHER; note = 2'-O-methyl ribonucleotide
  modified_base 37: mod_base = OTHER; note = 2'-O-methyl ribonucleotide
  modified_base 38: mod_base = OTHER; note = 2'-O-methyl ribonucleotide
  modified_base 39: mod_base = OTHER; note = 2'-O-methyl ribonucleotide
  modified_base 40: mod_base = OTHER; note = 2'-O-methyl ribonucleotide
  modified_base 41: mod_base = OTHER; note = 2'-O-methyl ribonucleotide
  modified_base 42: mod_base = OTHER; note = 2'-O-methyl ribonucleotide
  modified_base 46: mod_base = OTHER; note = 2'-O-methyl ribonucleotide
  modified_base 48: mod_base = OTHER; note = 2'-O-methyl ribonucleotide
  modified_base 50: mod_base = OTHER; note = 2'-O-methyl ribonucleotide
  modified_base 52: mod_base = OTHER; note = 2'-O-methyl ribonucleotide
  modified_base 53: mod_base = OTHER; note = 2'-O-methyl ribonucleotide
  modified_base 54: mod_base = OTHER; note = 2'-O-methyl ribonucleotide
  modified_base 57: mod_base = OTHER; note = 2'-O-methyl ribonucleotide
  modified_base 61: mod_base = OTHER; note = 2'-O-methyl ribonucleotide
  modified_base 66: mod_base = OTHER; note = 2'-O-methyl ribonucleotide
  modified_base 67: mod_base = OTHER; note = 2'-O-methyl ribonucleotide
  modified_base 70: mod_base = OTHER; note = 2'-O-methyl ribonucleotide
  modified_base 71: mod_base = OTHER; note = 2'-O-methyl ribonucleotide
  modified_base 72: mod_base = OTHER; note = 2'-O-methyl ribonucleotide
  modified_base 74: mod_base = OTHER; note = 2'-O-methyl ribonucleotide
  modified_base 75: mod_base = OTHER; note = 2'-O-methyl ribonucleotide
  modified_base 76: mod_base = OTHER; note = 2'-O-methyl ribonucleotide
  modified_base 77: mod_base = OTHER; note = 2'-O-methyl ribonucleotide
  modified_base 78: mod_base = OTHER; note = 2'-O-methyl ribonucleotide
  modified_base 79: mod_base = OTHER; note = 2'-O-methyl ribonucleotide
  modified_base 80: mod_base = OTHER; note = 2'-O-methyl ribonucleotide
  modified_base 82: mod_base = OTHER; note = 2'-O-methyl ribonucleotide
  modified_base 83: mod_base = OTHER; note = 2'-O-methyl ribonucleotide
  modified_base 84: mod_base = OTHER; note = 2'-O-methyl ribonucleotide
  modified_base 85: mod_base = OTHER; note = 2'-O-methyl ribonucleotide
  modified_base 86: mod_base = OTHER; note = 2'-O-methyl ribonucleotide
  modified_base 87: mod_base = OTHER; note = 2'-O-methyl ribonucleotide
  modified_base 89: mod_base = OTHER; note = 2'-O-methyl ribonucleotide
  modified_base 92: mod_base = OTHER; note = 2'-O-methyl ribonucleotide
  modified_base 93: mod_base = OTHER; note = 2'-O-methyl ribonucleotide
  modified_base 94: mod_base = OTHER; note = 2'-O-methyl ribonucleotide
  modified_base 95: mod_base = OTHER; note = 2'-O-methyl ribonucleotide
  modified_base 96: mod_base = OTHER; note = 2'-O-methyl ribonucleotide
  modified_base 97: mod_base = OTHER; note = 2'-O-methyl ribonucleotide
  modified_base 98: mod_base = OTHER; note = 2'-O-methyl ribonucleotide
  modified_base 99: mod_base = OTHER; note = 2'-O-methyl ribonucleotide
  modified_base 100: mod_base = OTHER; note = 2'-O-methyl ribonucleotide
  modified_base 101: mod_base = OTHER; note = uniform ribonucleotides (A, C, G, inosine or U), deoxynucleotides (A, G, C, inosine or T), ribonebularine, 2'-O-methylnebularine or deoxynebularine
  modified_base 102: mod_base = OTHER; note = uniform ribonucleotides (A, C, G, inosine or U), deoxynucleotides (A, G, C, inosine or T), ribonebularine, 2'-O-methylnebularine or deoxynebularine
  modified_base 103: mod_base = OTHER; note = uniform ribonucleotides (A, C, G, inosine or U), deoxynucleotides (A, G, C, inosine or T), ribonebularine, 2'-O-methylnebularine or deoxynebularine
  modified_base 1..4: mod_base = OTHER; note = phosphorothioate linkage
  modified_base 64..65: mod_base = OTHER; note = phosphorothioate linkage
  modified_base 97..100: mod_base = OTHER; note = phosphorothioate linkage
  misc_feature 1..100: note = RNA
  misc_feature 101..103: note = Optionally DNA or RNA

SEQ ID NO: 1800 - DNA, 103 bp, synthetic construct; identical to SEQ ID NO: 1797
  source 1..103: mol_type = other DNA
  modified_base 1: mod_base = OTHER; note = 2'-O-methyl ribonucleotide
  modified_base 2: mod_base = OTHER; note = 2'-O-methyl ribonucleotide
  modified_base 3: mod_base = OTHER; note = 2'-O-methyl ribonucleotide
  modified_base 21: mod_base = OTHER; note = 2'-O-methyl ribonucleotide
  modified_base 28: mod_base = OTHER; note = 2'-O-methyl ribonucleotide
  modified_base 29: mod_base = OTHER; note = 2'-O-methyl ribonucleotide
  modified_base 30: mod_base = OTHER; note = 2'-O-methyl ribonucleotide
  modified_base 31: mod_base = OTHER; note = 2'-O-methyl ribonucleotide
  modified_base 32: mod_base = OTHER; note = 2'-O-methyl ribonucleotide
  modified_base 34: mod_base = OTHER; note = 2'-O-methyl ribonucleotide
  modified_base 35: mod_base = OTHER; note = 2'-O-methyl ribonucleotide
  modified_base 36: mod_base = OTHER; note = 2'-O-methyl ribonucleotide
  modified_base 37: mod_base = OTHER; note = 2'-O-methyl ribonucleotide
  modified_base 38: mod_base = OTHER; note = 2'-O-methyl ribonucleotide
  modified_base 39: mod_base = OTHER; note = 2'-O-methyl ribonucleotide
  modified_base 40: mod_base = OTHER; note = 2'-O-methyl ribonucleotide
  modified_base 41: mod_base = OTHER; note = 2'-O-methyl ribonucleotide
  modified_base 42: mod_base = OTHER; note = 2'-O-methyl ribonucleotide
  modified_base 46: mod_base = OTHER; note = 2'-O-methyl ribonucleotide
  modified_base 48: mod_base = OTHER; note = 2'-O-methyl ribonucleotide
  modified_base 50: mod_base = OTHER; note = 2'-O-methyl ribonucleotide
  modified_base 52: mod_base = OTHER; note = 2'-O-methyl ribonucleotide
  modified_base 53: mod_base = OTHER; note = 2'-O-methyl ribonucleotide
  modified_base 54: mod_base = OTHER; note = 2'-O-methyl ribonucleotide
  modified_base 55: mod_base = OTHER; note = 2'-O-methyl ribonucleotide
  modified_base 56: mod_base = OTHER; note = 2'-O-methyl ribonucleotide
  modified_base 57: mod_base = OTHER; note = 2'-O-methyl ribonucleotide
  modified_base 60: mod_base = OTHER; note = 2'-O-methyl ribonucleotide
  modified_base 61: mod_base = OTHER; note = 2'-O-methyl ribonucleotide
  modified_base 66: mod_base = OTHER; note = 2'-O-methyl ribonucleotide
  modified_base 67: mod_base = OTHER; note = 2'-O-methyl ribonucleotide
  modified_base 70: mod_base = OTHER; note = 2'-O-methyl ribonucleotide
  modified_base 71: mod_base = OTHER; note = 2'-O-methyl ribonucleotide
  modified_base 72: mod_base = OTHER; note = 2'-O-methyl ribonucleotide
  modified_base 74: mod_base = OTHER; note = 2'-O-methyl ribonucleotide
  modified_base 75: mod_base = OTHER; note = 2'-O-methyl ribonucleotide
  modified_base 76: mod_base = OTHER; note = 2'-O-methyl ribonucleotide
  modified_base 77: mod_base = OTHER; note = 2'-O-methyl ribonucleotide
  modified_base 78: mod_base = OTHER; note = 2'-O-methyl ribonucleotide
  modified_base 79: mod_base = OTHER; note = 2'-O-methyl ribonucleotide
  modified_base 80: mod_base = OTHER; note = 2'-O-methyl ribonucleotide
  modified_base 81: mod_base = OTHER; note = 2'-O-methyl ribonucleotide
  modified_base 83: mod_base = OTHER; note = 2'-O-methyl ribonucleotide
  modified_base 84: mod_base = OTHER; note = 2'-O-methyl ribonucleotide
  modified_base 85: mod_base = OTHER; note = 2'-O-methyl ribonucleotide
  modified_base 86: mod_base = OTHER; note = 2'-O-methyl ribonucleotide
  modified_base 87: mod_base = OTHER; note = 2'-O-methyl ribonucleotide
  modified_base 88: mod_base = OTHER; note = 2'-O-methyl ribonucleotide
  modified_base 89: mod_base = OTHER; note = 2'-O-methyl ribonucleotide
  modified_base 90: mod_base = OTHER; note = 2'-O-methyl ribonucleotide
  modified_base 91: mod_base = OTHER; note = 2'-O-methyl ribonucleotide
  modified_base 92: mod_base = OTHER; note = 2'-O-methyl ribonucleotide
  modified_base 93: mod_base = OTHER; note = 2'-O-methyl ribonucleotide
  modified_base 94: mod_base = OTHER; note = 2'-O-methyl ribonucleotide
  modified_base 95: mod_base = OTHER; note = 2'-O-methyl ribonucleotide
  modified_base 96: mod_base = OTHER; note = 2'-O-methyl ribonucleotide
  modified_base 97: mod_base = OTHER; note = 2'-O-methyl ribonucleotide
  modified_base 98: mod_base = OTHER; note = 2'-O-methyl ribonucleotide
  modified_base 99: mod_base = OTHER; note = 2'-O-methyl ribonucleotide
  modified_base 100: mod_base = OTHER; note = 2'-O-methyl ribonucleotide
  modified_base 101: mod_base = OTHER; note = uniform ribonucleotides (A, C, G, inosine or U), deoxynucleotides (A, G, C, inosine or T), ribonebularine, 2'-O-methylnebularine or deoxynebularine
  modified_base 102: mod_base = OTHER; note = uniform ribonucleotides (A, C, G, inosine or U), deoxynucleotides (A, G, C, inosine or T), ribonebularine, 2'-O-methylnebularine or deoxynebularine
  modified_base 103: mod_base = OTHER; note = uniform ribonucleotides (A, C, G, inosine or U), deoxynucleotides (A, G, C, inosine or T), ribonebularine, 2'-O-methylnebularine or deoxynebularine
  modified_base 1..4: mod_base = OTHER; note = phosphorothioate linkage
  modified_base 64..65: mod_base = OTHER; note = phosphorothioate linkage
  modified_base 97..100: mod_base = OTHER; note = phosphorothioate linkage
  misc_feature 1..100: note = RNA
  misc_feature 101..103: note = Optionally DNA or RNA

SEQ ID NO: 1801 - DNA, 103 bp, synthetic construct; identical to SEQ ID NO: 1797
  source 1..103: mol_type = other DNA
  modified_base 101: mod_base = OTHER; note = uniform ribonucleotides (A, C, G, inosine or U), deoxynucleotides (A, G, C, inosine or T), ribonebularine, 2'-O-methylnebularine or deoxynebularine
  modified_base 102: mod_base = OTHER; note = uniform ribonucleotides (A, C, G, inosine or U), deoxynucleotides (A, G, C, inosine or T), ribonebularine, 2'-O-methylnebularine or deoxynebularine
  modified_base 103: mod_base = OTHER; note = uniform ribonucleotides (A, C, G, inosine or U), deoxynucleotides (A, G, C, inosine or T), ribonebularine, 2'-O-methylnebularine or deoxynebularine
  misc_feature 1..100: note = RNA
  misc_feature 101..103: note = Optionally DNA or RNA

SEQ ID NO: 1802 - DNA, 103 bp, synthetic construct; identical to SEQ ID NO: 1795
  source 1..103: mol_type = other DNA
  modified_base 1: mod_base = OTHER; note = 2'-O-methyl ribonucleotide
  modified_base 2: mod_base = OTHER; note = 2'-O-methyl ribonucleotide
  modified_base 3: mod_base = OTHER; note = 2'-O-methyl ribonucleotide
  modified_base 21: mod_base = OTHER; note = 2'-O-methyl ribonucleotide
  modified_base 28: mod_base = OTHER; note = 2'-O-methyl ribonucleotide
  modified_base 29: mod_base = OTHER; note = 2'-O-methyl ribonucleotide
  modified_base 30: mod_base = OTHER; note = 2'-O-methyl ribonucleotide
  modified_base 31: mod_base = OTHER; note = 2'-O-methyl ribonucleotide
  modified_base 32: mod_base = OTHER; note = 2'-O-methyl ribonucleotide
  modified_base 34: mod_base = OTHER; note = 2'-O-methyl ribonucleotide
  modified_base 35: mod_base = OTHER; note = 2'-O-methyl ribonucleotide
  modified_base 36: mod_base = OTHER; note = 2'-O-methyl ribonucleotide
  modified_base 37: mod_base = OTHER; note = 2'-O-methyl ribonucleotide
  modified_base 38: mod_base = OTHER; note = 2'-O-methyl ribonucleotide
  modified_base 39: mod_base = OTHER; note = 2'-O-methyl ribonucleotide
  modified_base 40: mod_base = OTHER; note = 2'-O-methyl ribonucleotide
  modified_base 41: mod_base = OTHER; note = 2'-O-methyl ribonucleotide
  modified_base 42: mod_base = OTHER; note = 2'-O-methyl ribonucleotide
  modified_base 46: mod_base = OTHER; note = 2'-O-methyl ribonucleotide
  modified_base 48: mod_base = OTHER; note = 2'-O-methyl ribonucleotide
  modified_base 50: mod_base = OTHER; note = 2'-O-methyl ribonucleotide
  modified_base 52: mod_base = OTHER; note = 2'-O-methyl ribonucleotide
  modified_base 53: mod_base = OTHER; note = 2'-O-methyl ribonucleotide
  modified_base 54: mod_base = OTHER; note = 2'-O-methyl ribonucleotide
  modified_base 57: mod_base = OTHER; note = 2'-O-methyl ribonucleotide
  modified_base 61: mod_base = OTHER; note = 2'-O-methyl ribonucleotide
  modified_base 66: mod_base = OTHER; note = 2'-O-methyl ribonucleotide
  modified_base 67: mod_base = OTHER; note = 2'-O-methyl ribonucleotide
  modified_base 70: mod_base = OTHER; note = 2'-O-methyl ribonucleotide
  modified_base 71: mod_base = OTHER; note = 2'-O-methyl ribonucleotide
  modified_base 72: mod_base = OTHER; note = 2'-O-methyl ribonucleotide
  modified_base 74: mod_base = OTHER; note = 2'-O-methyl ribonucleotide
  modified_base 75: mod_base = OTHER; note = 2'-O-methyl ribonucleotide
  modified_base 76: mod_base = OTHER; note = 2'-O-methyl ribonucleotide
  modified_base 77: mod_base = OTHER; note = 2'-O-methyl ribonucleotide
  modified_base 78: mod_base = OTHER; note = 2'-O-methyl ribonucleotide
  modified_base 79: mod_base = OTHER; note = 2'-O-methyl ribonucleotide
  modified_base 80: mod_base = OTHER; note = 2'-O-methyl ribonucleotide
  modified_base 82: mod_base = OTHER; note = 2'-O-methyl ribonucleotide
  modified_base 83: mod_base = OTHER; note = 2'-O-methyl ribonucleotide
  modified_base 84: mod_base = OTHER; note = 2'-O-methyl ribonucleotide
  modified_base 85: mod_base = OTHER; note = 2'-O-methyl ribonucleotide
  modified_base 86: mod_base = OTHER; note = 2'-O-methyl ribonucleotide
  modified_base 87: mod_base = OTHER; note = 2'-O-methyl ribonucleotide
  modified_base 89: mod_base = OTHER; note = 2'-O-methyl ribonucleotide
  modified_base 92: mod_base = OTHER; note = 2'-O-methyl ribonucleotide
  modified_base 93: mod_base = OTHER; note = 2'-O-methyl ribonucleotide
  modified_base 94: mod_base = OTHER; note = 2'-O-methyl ribonucleotide
  modified_base 95: mod_base = OTHER; note = 2'-O-methyl ribonucleotide
  modified_base 96: mod_base = OTHER; note = 2'-O-methyl ribonucleotide
  modified_base 97: mod_base = OTHER; note = 2'-O-methyl ribonucleotide
  modified_base 98: mod_base = OTHER; note = 2'-O-methyl ribonucleotide
  modified_base 99: mod_base = OTHER; note = 2'-O-methyl ribonucleotide
  modified_base 100: mod_base = OTHER; note = 2'-O-methyl ribonucleotide
  modified_base 101: mod_base = OTHER; note = uniform ribonucleotides (A, C, G, inosine or U), deoxynucleotides (A, G, C, inosine or T), ribonebularine, 2'-O-methylnebularine or deoxynebularine
  modified_base 102: mod_base = OTHER; note = uniform ribonucleotides (A, C, G, inosine or U), deoxynucleotides (A, G, C, inosine or T), ribonebularine, 2'-O-methylnebularine or deoxynebularine
  modified_base 103: mod_base = OTHER; note = uniform ribonucleotides (A, C, G, inosine or U), deoxynucleotides (A, G, C, inosine or T), ribonebularine, 2'-O-methylnebularine or deoxynebularine
  modified_base 1..4: mod_base = OTHER; note = phosphorothioate linkage
  modified_base 45..46: mod_base = OTHER; note = phosphorothioate linkage
  modified_base 97..100: mod_base = OTHER; note = phosphorothioate linkage
  misc_feature 1..100: note = RNA
  misc_feature 101..103: note = Optionally DNA or RNA

SEQ ID NO: 1803 - DNA, 103 bp, synthetic construct; identical to SEQ ID NO: 1796
  source 1..103: mol_type = other DNA
  modified_base 1: mod_base = OTHER; note = 2'-O-methyl ribonucleotide
  modified_base 2: mod_base = OTHER; note = 2'-O-methyl ribonucleotide
  modified_base 3: mod_base = OTHER; note = 2'-O-methyl ribonucleotide
  modified_base 21: mod_base = OTHER; note = 2'-O-methyl ribonucleotide
  modified_base 28: mod_base = OTHER; note = 2'-O-methyl ribonucleotide
  modified_base 29: mod_base = OTHER; note = 2'-O-methyl ribonucleotide
  modified_base 30: mod_base = OTHER; note = 2'-O-methyl ribonucleotide
  modified_base 31: mod_base = OTHER; note = 2'-O-methyl ribonucleotide
  modified_base 32: mod_base = OTHER; note = 2'-O-methyl ribonucleotide
  modified_base 34: mod_base = OTHER; note = 2'-O-methyl ribonucleotide
  modified_base 35: mod_base = OTHER; note = 2'-O-methyl ribonucleotide
  modified_base 36: mod_base = OTHER; note = 2'-O-methyl ribonucleotide
  modified_base 37: mod_base = OTHER; note = 2'-O-methyl ribonucleotide
  modified_base 38: mod_base = OTHER; note = 2'-O-methyl ribonucleotide
  modified_base 39: mod_base = OTHER; note = 2'-O-methyl ribonucleotide
  modified_base 40: mod_base = OTHER; note = 2'-O-methyl ribonucleotide
  modified_base 41: mod_base = OTHER; note = 2'-O-methyl ribonucleotide
  modified_base 42: mod_base = OTHER; note = 2'-O-methyl ribonucleotide
  modified_base 46: mod_base = OTHER; note = 2'-O-methyl ribonucleotide
  modified_base 48: mod_base = OTHER; note = 2'-O-methyl ribonucleotide
  modified_base 50: mod_base = OTHER; note = 2'-O-methyl ribonucleotide
  modified_base 52: mod_base = OTHER; note = 2'-O-methyl ribonucleotide
  modified_base 53: mod_base = OTHER; note = 2'-O-methyl ribonucleotide
  modified_base 54: mod_base = OTHER; note = 2'-O-methyl ribonucleotide
  modified_base 57: mod_base = OTHER; note = 2'-O-methyl ribonucleotide
  modified_base 61: mod_base = OTHER; note = 2'-O-methyl ribonucleotide
  modified_base 66: mod_base = OTHER; note = 2'-O-methyl ribonucleotide
  modified_base 67: mod_base = OTHER; note = 2'-O-methyl ribonucleotide
  modified_base 70: mod_base = OTHER; note = 2'-O-methyl ribonucleotide
  modified_base 71: mod_base = OTHER; note = 2'-O-methyl ribonucleotide
  modified_base 72: mod_base = OTHER; note = 2'-O-methyl ribonucleotide
  modified_base 74: mod_base = OTHER; note = 2'-O-methyl ribonucleotide
  modified_base 75: mod_base = OTHER; note = 2'-O-methyl ribonucleotide
  modified_base 76: mod_base = OTHER; note = 2'-O-methyl ribonucleotide
  modified_base 77: mod_base = OTHER; note = 2'-O-methyl ribonucleotide
  modified_base 78: mod_base = OTHER; note = 2'-O-methyl ribonucleotide
  modified_base 79: mod_base = OTHER; note = 2'-O-methyl ribonucleotide
  modified_base 80: mod_base = OTHER; note = 2'-O-methyl ribonucleotide
  modified_base 82: mod_base = OTHER; note = 2'-O-methyl ribonucleotide
  modified_base 83: mod_base = OTHER; note = 2'-O-methyl ribonucleotide
  modified_base 84: mod_base = OTHER; note = 2'-O-methyl ribonucleotide
  modified_base 85: mod_base = OTHER; note = 2'-O-methyl ribonucleotide
  modified_base 86: mod_base = OTHER; note = 2'-O-methyl ribonucleotide
  modified_base 87: mod_base = OTHER; note = 2'-O-methyl ribonucleotide
  modified_base 89: mod_base = OTHER; note = 2'-O-methyl ribonucleotide
  modified_base 92: mod_base = OTHER; note = 2'-O-methyl ribonucleotide
  modified_base 93: mod_base = OTHER; note = 2'-O-methyl ribonucleotide
  modified_base 94: mod_base = OTHER; note = 2'-O-methyl ribonucleotide
  modified_base 95: mod_base = OTHER; note = 2'-O-methyl ribonucleotide
  modified_base 96: mod_base = OTHER; note = 2'-O-methyl ribonucleotide
  modified_base 97: mod_base = OTHER; note = 2'-O-methyl ribonucleotide
  modified_base 98: mod_base = OTHER; note = 2'-O-methyl ribonucleotide
  modified_base 99: mod_base = OTHER; note = 2'-O-methyl ribonucleotide
  modified_base 100: mod_base = OTHER; note = 2'-O-methyl ribonucleotide
  modified_base 101: mod_base = OTHER; note = uniform ribonucleotides (A, C, G, inosine or U), deoxynucleotides (A, G, C, inosine or T), ribonebularine, 2'-O-methylnebularine or deoxynebularine
  modified_base 102: mod_base = OTHER; note = uniform ribonucleotides (A, C, G, inosine or U), deoxynucleotides (A, G, C, inosine or T), ribonebularine, 2'-O-methylnebularine or deoxynebularine
  modified_base 103: mod_base = OTHER; note = uniform ribonucleotides (A, C, G, inosine or U), deoxynucleotides (A, G, C, inosine or T), ribonebularine, 2'-O-methylnebularine or deoxynebularine
  modified_base 1..4: mod_base = OTHER; note = phosphorothioate linkage
  modified_base 45..46: mod_base = OTHER; note = phosphorothioate linkage
  modified_base 97..100: mod_base = OTHER; note = phosphorothioate linkage
  misc_feature 1..100: note = RNA
  misc_feature 101..103: note = Optionally DNA or RNA

SEQ ID NO: 1804 - DNA, 103 bp, synthetic construct; identical to SEQ ID NO: 1797
  source 1..103: mol_type = other DNA
  modified_base 1: mod_base = OTHER; note = 2'-O-methyl ribonucleotide
  modified_base 2: mod_base = OTHER; note = 2'-O-methyl ribonucleotide
  modified_base 3: mod_base = OTHER; note = 2'-O-methyl ribonucleotide
  modified_base 21: mod_base = OTHER; note = 2'-O-methyl ribonucleotide
  modified_base 28: mod_base = OTHER; note = 2'-O-methyl ribonucleotide
  modified_base 29: mod_base = OTHER; note = 2'-O-methyl ribonucleotide
  modified_base 30: mod_base = OTHER; note = 2'-O-methyl ribonucleotide
  modified_base 31: mod_base = OTHER; note = 2'-O-methyl ribonucleotide
  modified_base 32: mod_base = OTHER; note = 2'-O-methyl ribonucleotide
  modified_base 34: mod_base = OTHER; note = 2'-O-methyl ribonucleotide
  modified_base 35: mod_base = OTHER; note = 2'-O-methyl ribonucleotide
  modified_base 36: mod_base = OTHER; note = 2'-O-methyl ribonucleotide
  modified_base 37: mod_base = OTHER; note = 2'-O-methyl ribonucleotide
  modified_base 38: mod_base = OTHER; note = 2'-O-methyl ribonucleotide
  modified_base 39: mod_base = OTHER; note = 2'-O-methyl ribonucleotide
  modified_base 40: mod_base = OTHER; note = 2'-O-methyl ribonucleotide
  modified_base 41: mod_base = OTHER; note = 2'-O-methyl ribonucleotide
  modified_base 42: mod_base = OTHER; note = 2'-O-methyl ribonucleotide
  modified_base 46: mod_base = OTHER; note = 2'-O-methyl ribonucleotide
  modified_base 48: mod_base = OTHER; note = 2'-O-methyl ribonucleotide
  modified_base 50: mod_base = OTHER; note = 2'-O-methyl ribonucleotide
  modified_base 52: mod_base = OTHER; note = 2'-O-methyl ribonucleotide
  modified_base 53: mod_base = OTHER; note = 2'-O-methyl ribonucleotide
  modified_base 54: mod_base = OTHER; note = 2'-O-methyl ribonucleotide
  modified_base 55: mod_base = OTHER; note = 2'-O-methyl ribonucleotide
  modified_base 56: mod_base = OTHER; note = 2'-O-methyl ribonucleotide
  modified_base 57: mod_base = OTHER; note = 2'-O-methyl ribonucleotide
  modified_base 60: mod_base = OTHER; note = 2'-O-methyl ribonucleotide
  modified_base 61: mod_base = OTHER; note = 2'-O-methyl ribonucleotide
  modified_base 66: mod_base = OTHER; note = 2'-O-methyl ribonucleotide
  modified_base 67: mod_base = OTHER; note = 2'-O-methyl ribonucleotide
  modified_base 70: mod_base = OTHER; note = 2'-O-methyl ribonucleotide
  modified_base 71: mod_base = OTHER; note = 2'-O-methyl ribonucleotide
  modified_base 72: mod_base = OTHER; note = 2'-O-methyl ribonucleotide
  modified_base 74: mod_base = OTHER; note = 2'-O-methyl ribonucleotide
  modified_base 75: mod_base = OTHER; note = 2'-O-methyl ribonucleotide
  modified_base 76: mod_base = OTHER; note = 2'-O-methyl ribonucleotide
  modified_base 77: mod_base = OTHER; note = 2'-O-methyl ribonucleotide
  modified_base 78: mod_base = OTHER; note = 2'-O-methyl ribonucleotide
  modified_base 79: mod_base = OTHER; note = 2'-O-methyl ribonucleotide
  modified_base 80: mod_base = OTHER; note = 2'-O-methyl ribonucleotide
  modified_base 81: mod_base = OTHER; note = 2'-O-methyl ribonucleotide
  modified_base 83: mod_base = OTHER; note = 2'-O-methyl ribonucleotide
  modified_base 84: mod_base = OTHER; note = 2'-O-methyl ribonucleotide
  modified_base 85: mod_base = OTHER; note = 2'-O-methyl ribonucleotide
  modified_base 86: mod_base = OTHER; note = 2'-O-methyl ribonucleotide
  modified_base 87: mod_base = OTHER; note = 2'-O-methyl ribonucleotide
  modified_base 88: mod_base = OTHER; note = 2'-O-methyl ribonucleotide
  modified_base 89: mod_base = OTHER; note = 2'-O-methyl ribonucleotide
  modified_base 90: mod_base = OTHER; note = 2'-O-methyl ribonucleotide
  modified_base 91: mod_base = OTHER; note = 2'-O-methyl ribonucleotide
  modified_base 92: mod_base = OTHER; note = 2'-O-methyl ribonucleotide
  modified_base 93: mod_base = OTHER; note = 2'-O-methyl ribonucleotide
  modified_base 94: mod_base = OTHER; note = 2'-O-methyl ribonucleotide
  modified_base 95: mod_base = OTHER; note = 2'-O-methyl ribonucleotide
  modified_base 96: mod_base = OTHER; note = 2'-O-methyl ribonucleotide
  modified_base 97: mod_base = OTHER; note = 2'-O-methyl ribonucleotide
  modified_base 98: mod_base = OTHER; note = 2'-O-methyl ribonucleotide
  modified_base 99: mod_base = OTHER; note = 2'-O-methyl ribonucleotide
  modified_base 100: mod_base = OTHER; note = 2'-O-methyl ribonucleotide
  modified_base 101: mod_base = OTHER; note = uniform ribonucleotides (A, C, G, inosine or U), deoxynucleotides (A, G, C, inosine or T), ribonebularine, 2'-O-methylnebularine or deoxynebularine
  modified_base 102: mod_base = OTHER; note = uniform ribonucleotides (A, C, G, inosine or U), deoxynucleotides (A, G, C, inosine or T), ribonebularine, 2'-O-methylnebularine or deoxynebularine
  modified_base 103: mod_base = OTHER; note = uniform ribonucleotides (A, C, G, inosine or U), deoxynucleotides (A, G, C, inosine or T), ribonebularine, 2'-O-methylnebularine or deoxynebularine
  modified_base 1..4: mod_base = OTHER; note = phosphorothioate linkage
  modified_base 45..46: mod_base = OTHER; note = phosphorothioate linkage
  modified_base 97..100: mod_base = OTHER; note = phosphorothioate linkage
  misc_feature 1..100: note = RNA
  misc_feature 101..103: note = Optionally DNA or RNA

SEQ ID NO: 1805 - DNA, 103 bp, synthetic construct; identical to SEQ ID NO: 1795
  source 1..103: mol_type = other DNA
  modified_base 1: mod_base = OTHER; note = 2'-O-methyl ribonucleotide
  modified_base 2: mod_base = OTHER; note = 2'-O-methyl ribonucleotide
  modified_base 3: mod_base = OTHER; note = 2'-O-methyl ribonucleotide
  modified_base 21: mod_base = OTHER; note = 2'-O-methyl ribonucleotide
  modified_base 28: mod_base = OTHER; note = 2'-O-methyl ribonucleotide
  modified_base 29: mod_base = OTHER; note = 2'-O-methyl ribonucleotide
  modified_base 30: mod_base = OTHER; note = 2'-O-methyl ribonucleotide
  modified_base 31: mod_base = OTHER; note = 2'-O-methyl ribonucleotide
  modified_base 32: mod_base = OTHER; note = 2'-O-methyl ribonucleotide
  modified_base 34: mod_base = OTHER; note = 2'-O-methyl ribonucleotide
  modified_base 35: mod_base = OTHER; note = 2'-O-methyl ribonucleotide
  modified_base 36: mod_base = OTHER; note = 2'-O-methyl ribonucleotide
  modified_base 37: mod_base = OTHER; note = 2'-O-methyl ribonucleotide
  modified_base 38: mod_base = OTHER; note = 2'-O-methyl ribonucleotide
  modified_base 39: mod_base = OTHER; note = 2'-O-methyl ribonucleotide
  modified_base 40: mod_base = OTHER; note = 2'-O-methyl ribonucleotide
  modified_base 41: mod_base = OTHER; note = 2'-O-methyl ribonucleotide
  modified_base 42: mod_base = OTHER; note = 2'-O-methyl ribonucleotide
  modified_base 46: mod_base = OTHER; note = 2'-O-methyl ribonucleotide
  modified_base 48: mod_base = OTHER; note = 2'-O-methyl ribonucleotide
  modified_base 50: mod_base = OTHER; note = 2'-O-methyl ribonucleotide
  modified_base 52: mod_base = OTHER; note = 2'-O-methyl ribonucleotide
  modified_base 53: mod_base = OTHER; note = 2'-O-methyl ribonucleotide
  modified_base 54: mod_base = OTHER; note = 2'-O-methyl ribonucleotide
  modified_base 57: mod_base = OTHER; note = 2'-O-methyl ribonucleotide
  modified_base 61: mod_base = OTHER; note = 2'-O-methyl ribonucleotide
  modified_base 66: mod_base = OTHER; note = 2'-O-methyl ribonucleotide
  modified_base 67: mod_base = OTHER; note = 2'-O-methyl ribonucleotide
  modified_base 70: mod_base = OTHER; note = 2'-O-methyl ribonucleotide
  modified_base 71: mod_base = OTHER; note = 2'-O-methyl ribonucleotide
  modified_base 72: mod_base = OTHER; note = 2'-O-methyl ribonucleotide
  modified_base 74: mod_base = OTHER; note = 2'-O-methyl ribonucleotide
  modified_base 75: mod_base = OTHER; note = 2'-O-methyl ribonucleotide
  modified_base 76: mod_base = OTHER; note = 2'-O-methyl ribonucleotide
  modified_base 77: mod_base = OTHER; note = 2'-O-methyl ribonucleotide
  modified_base 78: mod_base = OTHER; note = 2'-O-methyl ribonucleotide
  modified_base 79: mod_base = OTHER; note = 2'-O-methyl ribonucleotide
  modified_base 80: mod_base = OTHER; note = 2'-O-methyl ribonucleotide
  modified_base 82: mod_base = OTHER; note = 2'-O-methyl ribonucleotide
  modified_base 83: mod_base = OTHER; note = 2'-O-methyl ribonucleotide
  modified_base 84: mod_base = OTHER; note = 2'-O-methyl ribonucleotide
  modified_base 85: mod_base = OTHER; note = 2'-O-methyl ribonucleotide
  modified_base 86: mod_base = OTHER; note = 2'-O-methyl ribonucleotide
  modified_base 87: mod_base = OTHER; note = 2'-O-methyl ribonucleotide
  modified_base 89: mod_base = OTHER; note = 2'-O-methyl ribonucleotide
  modified_base 92: mod_base = OTHER; note = 2'-O-methyl ribonucleotide
  modified_base 93: mod_base = OTHER; note = 2'-O-methyl ribonucleotide
  modified_base 94: mod_base = OTHER; note = 2'-O-methyl ribonucleotide
  modified_base 95: mod_base = OTHER; note = 2'-O-methyl ribonucleotide
  modified_base 96: mod_base = OTHER; note = 2'-O-methyl ribonucleotide
  modified_base 97: mod_base = OTHER; note = 2'-O-methyl ribonucleotide
  modified_base 98: mod_base = OTHER; note = 2'-O-methyl ribonucleotide
  modified_base 99: mod_base = OTHER; note = 2'-O-methyl ribonucleotide
  modified_base 100: mod_base = OTHER; note = 2'-O-methyl ribonucleotide
  modified_base 101: mod_base = OTHER; note = uniform ribonucleotides (A, C, G, inosine or U), deoxynucleotides (A, G, C, inosine or T), ribonebularine, 2'-O-methylnebularine or deoxynebularine
  modified_base 102: mod_base = OTHER; note = uniform ribonucleotides (A, C, G, inosine or U), deoxynucleotides (A, G, C, inosine or T), ribonebularine, 2'-O-methylnebularine or deoxynebularine
  modified_base 103: mod_base = OTHER; note = uniform ribonucleotides (A, C, G, inosine or U), deoxynucleotides (A, G, C, inosine or T), ribonebularine, 2'-O-methylnebularine or deoxynebularine
  modified_base 1..4: mod_base = OTHER; note = phosphorothioate linkage
  modified_base 25..26: mod_base = OTHER; note = phosphorothioate linkage
  modified_base 97..100: mod_base = OTHER; note = phosphorothioate linkage
  misc_feature 1..100: note = RNA
  misc_feature 101..103: note = Optionally DNA or RNA

SEQ ID NO: 1806 - DNA, 103 bp, synthetic construct; identical to SEQ ID NO: 1796
  source 1..103: mol_type = other DNA
  modified_base 1: mod_base = OTHER; note = 2'-O-methyl ribonucleotide
  modified_base 2: mod_base = OTHER; note = 2'-O-methyl ribonucleotide
  modified_base 3: mod_base = OTHER; note = 2'-O-methyl ribonucleotide
  modified_base 21: mod_base = OTHER; note = 2'-O-methyl ribonucleotide
  modified_base 28: mod_base = OTHER; note = 2'-O-methyl ribonucleotide
  modified_base 29: mod_base = OTHER; note = 2'-O-methyl ribonucleotide
  modified_base 30: mod_base = OTHER; note = 2'-O-methyl ribonucleotide
  modified_base 31: mod_base = OTHER; note = 2'-O-methyl ribonucleotide
  modified_base 32: mod_base = OTHER; note = 2'-O-methyl ribonucleotide
  modified_base 34: mod_base = OTHER; note = 2'-O-methyl ribonucleotide
  modified_base 35: mod_base = OTHER; note = 2'-O-methyl ribonucleotide
  modified_base 36: mod_base = OTHER; note = 2'-O-methyl ribonucleotide
  modified_base 37: mod_base = OTHER; note = 2'-O-methyl ribonucleotide
  modified_base 38: mod_base = OTHER; note = 2'-O-methyl ribonucleotide
  modified_base 39: mod_base = OTHER; note = 2'-O-methyl ribonucleotide
  modified_base 40: mod_base = OTHER; note = 2'-O-methyl ribonucleotide
  modified_base 41: mod_base = OTHER; note = 2'-O-methyl ribonucleotide
  modified_base 42: mod_base = OTHER; note = 2'-O-methyl ribonucleotide
  modified_base 46: mod_base = OTHER; note = 2'-O-methyl ribonucleotide
  modified_base 48: mod_base = OTHER; note = 2'-O-methyl ribonucleotide
  modified_base 50: mod_base = OTHER; note = 2'-O-methyl ribonucleotide
  modified_base 52: mod_base = OTHER; note = 2'-O-methyl ribonucleotide
  modified_base 53: mod_base = OTHER; note = 2'-O-methyl ribonucleotide
  modified_base 54: mod_base = OTHER; note = 2'-O-methyl ribonucleotide
  modified_base 57: mod_base = OTHER; note = 2'-O-methyl ribonucleotide
  modified_base 61: mod_base = OTHER; note = 2'-O-methyl ribonucleotide
  modified_base 66: mod_base = OTHER; note = 2'-O-methyl ribonucleotide
  modified_base 67: mod_base = OTHER; note = 2'-O-methyl ribonucleotide
  modified_base 70: mod_base = OTHER; note = 2'-O-methyl ribonucleotide
  modified_base 71: mod_base = OTHER; note = 2'-O-methyl ribonucleotide
  modified_base 72: mod_base = OTHER; note = 2'-O-methyl ribonucleotide
  modified_base 74: mod_base = OTHER; note = 2'-O-methyl ribonucleotide
  modified_base 75: mod_base = OTHER; note = 2'-O-methyl ribonucleotide
  modified_base 76: mod_base = OTHER; note = 2'-O-methyl ribonucleotide
  modified_base 77: mod_base = OTHER; note = 2'-O-methyl ribonucleotide
  modified_base 78: mod_base = OTHER; note = 2'-O-methyl ribonucleotide
  modified_base 79: mod_base = OTHER; note = 2'-O-methyl ribonucleotide
  modified_base 80: mod_base = OTHER; note = 2'-O-methyl ribonucleotide
  modified_base 82: mod_base = OTHER; note = 2'-O-methyl ribonucleotide
  modified_base 83: mod_base = OTHER; note = 2'-O-methyl ribonucleotide
  modified_base 84: mod_base = OTHER; note = 2'-O-methyl ribonucleotide
  modified_base 85: mod_base = OTHER; note = 2'-O-methyl ribonucleotide
  modified_base 86: mod_base = OTHER; note = 2'-O-methyl ribonucleotide
  modified_base 87: mod_base = OTHER; note = 2'-O-methyl ribonucleotide
  modified_base 89: mod_base = OTHER; note = 2'-O-methyl ribonucleotide
  modified_base 92: mod_base = OTHER; note = 2'-O-methyl ribonucleotide
  modified_base 93: mod_base = OTHER; note = 2'-O-methyl ribonucleotide
  modified_base 94: mod_base = OTHER; note = 2'-O-methyl ribonucleotide
  modified_base 95: mod_base = OTHER; note = 2'-O-methyl ribonucleotide
  modified_base 96: mod_base = OTHER; note = 2'-O-methyl ribonucleotide
  modified_base 97: mod_base = OTHER; note = 2'-O-methyl ribonucleotide
  modified_base 98: mod_base = OTHER; note = 2'-O-methyl ribonucleotide
  modified_base 99: mod_base = OTHER; note = 2'-O-methyl ribonucleotide
  modified_base 100: mod_base = OTHER; note = 2'-O-methyl ribonucleotide
  modified_base 101: mod_base = OTHER; note = uniform ribonucleotides (A, C, G, inosine or U), deoxynucleotides (A, G, C, inosine or T), ribonebularine, 2'-O-methylnebularine or deoxynebularine
  modified_base 102: mod_base = OTHER; note = uniform ribonucleotides (A, C, G, inosine or U), deoxynucleotides (A, G, C, inosine or T), ribonebularine, 2'-O-methylnebularine or deoxynebularine
  modified_base 103: mod_base = OTHER; note = uniform ribonucleotides (A, C, G, inosine or U), deoxynucleotides (A, G, C, inosine or T), ribonebularine, 2'-O-methylnebularine or deoxynebularine
  modified_base 1..4: mod_base = OTHER; note = phosphorothioate linkage
  modified_base 25..26: mod_base = OTHER; note = phosphorothioate linkage
  modified_base 97..100: mod_base = OTHER; note = phosphorothioate linkage
  misc_feature 1..100: note = RNA
  misc_feature 101..103: note = Optionally DNA or RNA

SEQ ID NO: 1807 - DNA, 103 bp, synthetic construct; identical to SEQ ID NO: 1797
  source 1..103: mol_type = other DNA
  modified_base 1: mod_base = OTHER; note = 2'-O-methyl ribonucleotide
  modified_base 2: mod_base = OTHER; note = 2'-O-methyl ribonucleotide
  modified_base 3: mod_base = OTHER; note = 2'-O-methyl ribonucleotide
  modified_base 21: mod_base = OTHER; note = 2'-O-methyl ribonucleotide
  modified_base 28: mod_base = OTHER; note = 2'-O-methyl ribonucleotide
  modified_base 29: mod_base = OTHER; note = 2'-O-methyl ribonucleotide
  modified_base 30: mod_base = OTHER; note = 2'-O-methyl ribonucleotide
  modified_base 31: mod_base = OTHER; note = 2'-O-methyl ribonucleotide
  modified_base 32: mod_base = OTHER; note = 2'-O-methyl ribonucleotide
  modified_base 34: mod_base = OTHER; note = 2'-O-methyl ribonucleotide
  modified_base 35: mod_base = OTHER; note = 2'-O-methyl ribonucleotide
  modified_base 36: mod_base = OTHER; note = 2'-O-methyl ribonucleotide
  modified_base 37: mod_base = OTHER; note = 2'-O-methyl ribonucleotide
  modified_base 38: mod_base = OTHER; note = 2'-O-methyl ribonucleotide
  modified_base 39: mod_base = OTHER; note = 2'-O-methyl ribonucleotide
  modified_base 40: mod_base = OTHER; note = 2'-O-methyl ribonucleotide
  modified_base 41: mod_base = OTHER; note = 2'-O-methyl ribonucleotide
  modified_base 42: mod_base = OTHER; note = 2'-O-methyl ribonucleotide
  modified_base 46: mod_base = OTHER; note = 2'-O-methyl ribonucleotide
  modified_base 48: mod_base = OTHER; note = 2'-O-methyl ribonucleotide
  modified_base 50: mod_base = OTHER; note = 2'-O-methyl ribonucleotide
  modified_base 52: mod_base = OTHER; note = 2'-O-methyl ribonucleotide
  modified_base 53: mod_base = OTHER; note = 2'-O-methyl ribonucleotide
  modified_base 54: mod_base = OTHER; note = 2'-O-methyl ribonucleotide
  modified_base 55: mod_base = OTHER; note = 2'-O-methyl ribonucleotide
  modified_base 56: mod_base = OTHER; note = 2'-O-methyl ribonucleotide
  modified_base 57: mod_base = OTHER; note = 2'-O-methyl ribonucleotide
  modified_base 60: mod_base = OTHER; note = 2'-O-methyl ribonucleotide
  modified_base 61: mod_base = OTHER; note = 2'-O-methyl ribonucleotide
  modified_base 66: mod_base = OTHER; note = 2'-O-methyl ribonucleotide
  modified_base 67: mod_base = OTHER; note = 2'-O-methyl ribonucleotide
  modified_base 70: mod_base = OTHER; note = 2'-O-methyl ribonucleotide
  modified_base 71: mod_base = OTHER; note = 2'-O-methyl ribonucleotide
  modified_base 72: mod_base = OTHER; note = 2'-O-methyl ribonucleotide
  modified_base 74: mod_base = OTHER; note = 2'-O-methyl ribonucleotide
  modified_base 75: mod_base = OTHER; note = 2'-O-methyl ribonucleotide
  modified_base 76: mod_base = OTHER; note = 2'-O-methyl ribonucleotide
  modified_base 77: mod_base = OTHER; note = 2'-O-methyl ribonucleotide
  modified_base 78: mod_base = OTHER; note = 2'-O-methyl ribonucleotide
  modified_base 79: mod_base = OTHER; note = 2'-O-methyl ribonucleotide
  modified_base 80: mod_base = OTHER; note = 2'-O-methyl ribonucleotide
  modified_base 81: mod_base = OTHER; note = 2'-O-methyl ribonucleotide
  modified_base 83: mod_base = OTHER; note = 2'-O-methyl ribonucleotide
  modified_base 84: mod_base = OTHER; note = 2'-O-methyl ribonucleotide
  modified_base 85: mod_base = OTHER; note = 2'-O-methyl ribonucleotide
  modified_base 86: mod_base = OTHER; note = 2'-O-methyl ribonucleotide
  modified_base 87: mod_base = OTHER; note = 2'-O-methyl ribonucleotide
  modified_base 88: mod_base = OTHER; note = 2'-O-methyl ribonucleotide
  modified_base 89: mod_base = OTHER; note = 2'-O-methyl ribonucleotide
  modified_base 90: mod_base = OTHER; note = 2'-O-methyl ribonucleotide
  modified_base 91: mod_base = OTHER; note = 2'-O-methyl ribonucleotide
  modified_base 92: mod_base = OTHER; note = 2'-O-methyl ribonucleotide
  modified_base 93: mod_base = OTHER; note = 2'-O-methyl ribonucleotide
  modified_base 94: mod_base = OTHER; note = 2'-O-methyl ribonucleotide
  modified_base 95: mod_base = OTHER; note = 2'-O-methyl ribonucleotide
  modified_base 96: mod_base = OTHER; note = 2'-O-methyl ribonucleotide
  modified_base 97: mod_base = OTHER; note = 2'-O-methyl ribonucleotide
  modified_base 98: mod_base = OTHER; note = 2'-O-methyl ribonucleotide
  modified_base 99: mod_base = OTHER; note = 2'-O-methyl ribonucleotide
  modified_base 100: mod_base = OTHER; note = 2'-O-methyl ribonucleotide
  modified_base 101: mod_base = OTHER; note = uniform ribonucleotides (A, C, G, inosine or U), deoxynucleotides (A, G, C, inosine or T), ribonebularine, 2'-O-methylnebularine or deoxynebularine
  modified_base 102: mod_base = OTHER; note = uniform ribonucleotides (A, C, G, inosine or U), deoxynucleotides (A, G, C, inosine or T), ribonebularine, 2'-O-methylnebularine or deoxynebularine
  modified_base 103: mod_base = OTHER; note = uniform ribonucleotides (A, C, G, inosine or U), deoxynucleotides (A, G, C, inosine or T), ribonebularine, 2'-O-methylnebularine or deoxynebularine
  modified_base 1..4: mod_base = OTHER; note = phosphorothioate linkage
  modified_base 25..26: mod_base = OTHER; note = phosphorothioate linkage
  modified_base 97..100: mod_base = OTHER; note = phosphorothioate linkage
  misc_feature 1..100: note = RNA
  misc_feature 101..103: note = Optionally DNA or RNA

SEQ ID NO: 1808 - DNA, 103 bp, synthetic construct; identical to SEQ ID NO: 1795
  source 1..103: mol_type = other DNA
  modified_base 1: mod_base = OTHER; note = 2'-O-methyl ribonucleotide
  modified_base 2: mod_base = OTHER; note = 2'-O-methyl ribonucleotide
  modified_base 3: mod_base = OTHER; note = 2'-O-methyl ribonucleotide
  modified_base 21: mod_base = OTHER; note = 2'-O-methyl ribonucleotide
  modified_base 28: mod_base = OTHER; note = 2'-O-methyl ribonucleotide
  modified_base 29: mod_base = OTHER; note = 2'-O-methyl ribonucleotide
  modified_base 30: mod_base = OTHER; note = 2'-O-methyl ribonucleotide
  modified_base 31: mod_base = OTHER; note = 2'-O-methyl ribonucleotide
  modified_base 32: mod_base = OTHER; note = 2'-O-methyl ribonucleotide
  modified_base 34: mod_base = OTHER; note = 2'-O-methyl ribonucleotide
  modified_base 35: mod_base = OTHER; note = 2'-O-methyl ribonucleotide
  modified_base 36: mod_base = OTHER; note = 2'-O-methyl ribonucleotide
  modified_base 37: mod_base = OTHER; note = 2'-O-methyl ribonucleotide
  modified_base 38: mod_base = OTHER; note = 2'-O-methyl ribonucleotide
  modified_base 39: mod_base = OTHER; note = 2'-O-methyl ribonucleotide
  modified_base 40: mod_base = OTHER; note = 2'-O-methyl ribonucleotide
  modified_base 41: mod_base = OTHER; note = 2'-O-methyl ribonucleotide
  modified_base 42: mod_base = OTHER; note = 2'-O-methyl ribonucleotide
  modified_base 46: mod_base = OTHER; note = 2'-O-methyl ribonucleotide
  modified_base 48: mod_base = OTHER; note = 2'-O-methyl ribonucleotide
  modified_base 50: mod_base = OTHER; note = 2'-O-methyl ribonucleotide
  modified_base 52: mod_base = OTHER; note = 2'-O-methyl ribonucleotide
  modified_base 53: mod_base = OTHER; note = 2'-O-methyl ribonucleotide
  modified_base 54: mod_base = OTHER; note = 2'-O-methyl ribonucleotide
  modified_base 57: mod_base = OTHER; note = 2'-O-methyl ribonucleotide
  modified_base 61: mod_base = OTHER; note = 2'-O-methyl ribonucleotide
  modified_base 66: mod_base = OTHER; note = 2'-O-methyl ribonucleotide
  modified_base 67: mod_base = OTHER; note = 2'-O-methyl ribonucleotide
  modified_base 70: mod_base = OTHER; note = 2'-O-methyl ribonucleotide
  modified_base 71: mod_base = OTHER; note = 2'-O-methyl ribonucleotide
  modified_base 72: mod_base = OTHER; note = 2'-O-methyl ribonucleotide
  modified_base 74: mod_base = OTHER; note = 2'-O-methyl ribonucleotide
  modified_base 75: mod_base = OTHER; note = 2'-O-methyl ribonucleotide
  modified_base 76: mod_base = OTHER; note = 2'-O-methyl ribonucleotide
  modified_base 77: mod_base = OTHER; note = 2'-O-methyl ribonucleotide
  modified_base 78: mod_base = OTHER; note = 2'-O-methyl ribonucleotide
  modified_base 79: mod_base = OTHER; note = 2'-O-methyl ribonucleotide
  modified_base 80: mod_base = OTHER; note = 2'-O-methyl ribonucleotide
  modified_base 82: mod_base = OTHER; note = 2'-O-methyl ribonucleotide
  modified_base 83: mod_base = OTHER; note = 2'-O-methyl ribonucleotide
  modified_base 84: mod_base = OTHER; note = 2'-O-methyl ribonucleotide
  modified_base 85: mod_base = OTHER; note = 2'-O-methyl ribonucleotide
  modified_base 86: mod_base = OTHER; note = 2'-O-methyl ribonucleotide
  modified_base 87: mod_base = OTHER; note = 2'-O-methyl ribonucleotide
  modified_base 89: mod_base = OTHER; note = 2'-O-methyl ribonucleotide
  modified_base 92: mod_base = OTHER; note = 2'-O-methyl ribonucleotide
  modified_base 93: mod_base = OTHER; note = 2'-O-methyl ribonucleotide
  modified_base 94: mod_base = OTHER; note = 2'-O-methyl ribonucleotide
  modified_base 95: mod_base = OTHER; note = 2'-O-methyl ribonucleotide
  modified_base 96: mod_base = OTHER; note = 2'-O-methyl ribonucleotide
  modified_base 97: mod_base = OTHER; note = 2'-O-methyl ribonucleotide
  modified_base 98: mod_base = OTHER; note = 2'-O-methyl ribonucleotide
  modified_base 99: mod_base = OTHER; note = 2'-O-methyl ribonucleotide
  modified_base 100: mod_base = OTHER; note = 2'-O-methyl ribonucleotide
  modified_base 101: mod_base = OTHER; note = uniform ribonucleotides (A, C, G, inosine or U), deoxynucleotides (A, G, C, inosine or T), ribonebularine, 2'-O-methylnebularine or deoxynebularine
  modified_base 102: mod_base = OTHER; note = uniform ribonucleotides (A, C, G, inosine or U), deoxynucleotides (A, G, C, inosine or T), ribonebularine, 2'-O-methylnebularine or deoxynebularine
  modified_base 103: mod_base = OTHER; note = uniform ribonucleotides (A, C, G, inosine or U), deoxynucleotides (A, G, C, inosine or T), ribonebularine, 2'-O-methylnebularine or deoxynebularine
  modified_base 1..4: mod_base = OTHER; note = phosphorothioate linkage
  modified_base 45..46: mod_base = OTHER; note = phosphorothioate linkage
  modified_base 64..65: mod_base = OTHER; note = phosphorothioate linkage
  modified_base 97..100: mod_base = OTHER; note = phosphorothioate linkage
  misc_feature 1..100: note = RNA
  misc_feature 101..103: note = Optionally DNA or RNA

SEQ ID NO: 1809 - DNA, 103 bp, synthetic construct; identical to SEQ ID NO: 1796
  source 1..103: mol_type = other DNA
  modified_base 1: mod_base = OTHER; note = 2'-O-methyl ribonucleotide
  modified_base 2: mod_base = OTHER; note = 2'-O-methyl ribonucleotide
  modified_base 3: mod_base = OTHER; note = 2'-O-methyl ribonucleotide
  modified_base 21: mod_base = OTHER; note = 2'-O-methyl ribonucleotide
  modified_base 28: mod_base = OTHER; note = 2'-O-methyl ribonucleotide
  modified_base 29: mod_base = OTHER; note = 2'-O-methyl ribonucleotide
  modified_base 30: mod_base = OTHER; note = 2'-O-methyl ribonucleotide
  modified_base 31: mod_base = OTHER; note = 2'-O-methyl ribonucleotide
  modified_base 32: mod_base = OTHER; note = 2'-O-methyl ribonucleotide
  modified_base 34: mod_base = OTHER; note = 2'-O-methyl ribonucleotide
  modified_base 35: mod_base = OTHER; note = 2'-O-methyl ribonucleotide
  modified_base 36: mod_base = OTHER; note = 2'-O-methyl ribonucleotide
  modified_base 37: mod_base = OTHER; note = 2'-O-methyl ribonucleotide
  modified_base 38: mod_base = OTHER; note = 2'-O-methyl ribonucleotide
  modified_base 39: mod_base = OTHER; note = 2'-O-methyl ribonucleotide
  modified_base 40: mod_base = OTHER; note = 2'-O-methyl ribonucleotide
  modified_base 41: mod_base = OTHER; note = 2'-O-methyl ribonucleotide
  modified_base 42: mod_base = OTHER; note = 2'-O-methyl ribonucleotide
  modified_base 46: mod_base = OTHER; note = 2'-O-methyl ribonucleotide
  modified_base 48: mod_base = OTHER; note = 2'-O-methyl ribonucleotide
  modified_base 50: mod_base = OTHER; note = 2'-O-methyl ribonucleotide
  modified_base 52: mod_base = OTHER; note = 2'-O-methyl ribonucleotide
  modified_base 53: mod_base = OTHER; note = 2'-O-methyl ribonucleotide
  modified_base 54: mod_base = OTHER; note = 2'-O-methyl ribonucleotide
  modified_base 57: mod_base = OTHER; note = 2'-O-methyl ribonucleotide
  modified_base 61: mod_base = OTHER; note = 2'-O-methyl ribonucleotide
  modified_base 66: mod_base = OTHER; note = 2'-O-methyl ribonucleotide
  modified_base 67: mod_base = OTHER; note = 2'-O-methyl ribonucleotide
  modified_base 70: mod_base = OTHER; note = 2'-O-methyl ribonucleotide
  modified_base 71: mod_base = OTHER; note = 2'-O-methyl ribonucleotide
  modified_base 72: mod_base = OTHER; note = 2'-O-methyl ribonucleotide
  modified_base 74: mod_base = OTHER; note = 2'-O-methyl ribonucleotide
  modified_base 75: mod_base = OTHER; note = 2'-O-methyl ribonucleotide
  modified_base 76: mod_base = OTHER; note = 2'-O-methyl ribonucleotide
  modified_base 77: mod_base = OTHER; note = 2'-O-methyl ribonucleotide
  modified_base 78: mod_base = OTHER; note = 2'-O-methyl ribonucleotide
  modified_base 79: mod_base = OTHER; note = 2'-O-methyl ribonucleotide
  modified_base 80: mod_base = OTHER; note = 2'-O-methyl ribonucleotide
  modified_base 82: mod_base = OTHER; note = 2'-O-methyl ribonucleotide
  modified_base 83: mod_base = OTHER; note = 2'-O-methyl ribonucleotide
  modified_base 84: mod_base = OTHER; note = 2'-O-methyl ribonucleotide
  modified_base 85: mod_base = OTHER; note = 2'-O-methyl ribonucleotide
  modified_base 86: mod_base = OTHER; note = 2'-O-methyl ribonucleotide
  modified_base 87: mod_base = OTHER; note = 2'-O-methyl ribonucleotide
  modified_base 89: mod_base = OTHER; note = 2'-O-methyl ribonucleotide
  modified_base 92: mod_base = OTHER; note = 2'-O-methyl ribonucleotide
  modified_base 93: mod_base = OTHER; note = 2'-O-methyl ribonucleotide
  modified_base 94: mod_base = OTHER; note = 2'-O-methyl ribonucleotide
  modified_base 95: mod_base = OTHER; note = 2'-O-methyl ribonucleotide
  modified_base 96: mod_base = OTHER; note = 2'-O-methyl ribonucleotide
  modified_base 97: mod_base = OTHER; note = 2'-O-methyl ribonucleotide
  modified_base 98: mod_base = OTHER; note = 2'-O-methyl ribonucleotide
  modified_base 99: mod_base = OTHER; note = 2'-O-methyl ribonucleotide
  modified_base 100: mod_base = OTHER; note = 2'-O-methyl ribonucleotide
  modified_base 101: mod_base = OTHER; note = uniform ribonucleotides (A, C, G, inosine or U), deoxynucleotides (A, G, C, inosine or T), ribonebularine, 2'-O-methylnebularine or deoxynebularine
  modified_base 102: mod_base = OTHER; note = uniform ribonucleotides (A, C, G, inosine or U), deoxynucleotides (A, G, C, inosine or T), ribonebularine, 2'-O-methylnebularine or deoxynebularine
  modified_base 103: mod_base = OTHER; note = uniform ribonucleotides (A, C, G, inosine or U), deoxynucleotides (A, G, C, inosine or T), ribonebularine, 2'-O-methylnebularine or deoxynebularine
  modified_base 1..4: mod_base = OTHER; note = phosphorothioate linkage
  modified_base 45..46: mod_base = OTHER; note = phosphorothioate linkage
  modified_base 64..65: mod_base = OTHER; note = phosphorothioate linkage
  modified_base 97..100: mod_base = OTHER; note = phosphorothioate linkage
  misc_feature 1..100: note = RNA
  misc_feature 101..103: note = Optionally DNA or RNA

SEQ ID NO: 1810 - DNA, 103 bp, synthetic construct; identical to SEQ ID NO: 1797
  source 1..103: mol_type = other DNA
  modified_base 1: mod_base = OTHER; note = 2'-O-methyl ribonucleotide
  modified_base 2: mod_base = OTHER; note = 2'-O-methyl ribonucleotide
  modified_base 3: mod_base = OTHER; note = 2'-O-methyl ribonucleotide
  modified_base 21: mod_base = OTHER; note = 2'-O-methyl ribonucleotide
  modified_base 28: mod_base = OTHER; note = 2'-O-methyl ribonucleotide
  modified_base 29: mod_base = OTHER; note = 2'-O-methyl ribonucleotide
  modified_base 30: mod_base = OTHER; note = 2'-O-methyl ribonucleotide
  modified_base 31: mod_base = OTHER; note = 2'-O-methyl ribonucleotide
  modified_base 32: mod_base = OTHER; note = 2'-O-methyl ribonucleotide
  modified_base 34: mod_base = OTHER; note = 2'-O-methyl ribonucleotide
  modified_base 35: mod_base = OTHER; note = 2'-O-methyl ribonucleotide
  modified_base 36: mod_base = OTHER; note = 2'-O-methyl ribonucleotide
  modified_base 37: mod_base = OTHER; note = 2'-O-methyl ribonucleotide
  modified_base 38: mod_base = OTHER; note = 2'-O-methyl ribonucleotide
  modified_base 39: mod_base = OTHER; note = 2'-O-methyl ribonucleotide
  modified_base 40: mod_base = OTHER; note = 2'-O-methyl ribonucleotide
  modified_base 41: mod_base = OTHER; note = 2'-O-methyl ribonucleotide
  modified_base 42: mod_base = OTHER; note = 2'-O-methyl ribonucleotide
  modified_base 46: mod_base = OTHER; note = 2'-O-methyl ribonucleotide
  modified_base 48: mod_base = OTHER; note = 2'-O-methyl ribonucleotide
  modified_base 50: mod_base = OTHER; note = 2'-O-methyl ribonucleotide
  modified_base 52: mod_base = OTHER; note = 2'-O-methyl ribonucleotide
  modified_base 53: mod_base = OTHER; note = 2'-O-methyl ribonucleotide
  modified_base 54: mod_base = OTHER; note = 2'-O-methyl ribonucleotide
  modified_base 55: mod_base = OTHER; note = 2'-O-methyl ribonucleotide
  modified_base 56: mod_base = OTHER; note = 2'-O-methyl ribonucleotide
  modified_base 57: mod_base = OTHER; note = 2'-O-methyl ribonucleotide
  modified_base 60: mod_base = OTHER; note = 2'-O-methyl ribonucleotide
  modified_base 61: mod_base = OTHER; note = 2'-O-methyl ribonucleotide
  modified_base 66: mod_base = OTHER; note = 2'-O-methyl ribonucleotide
  modified_base 67: mod_base = OTHER; note = 2'-O-methyl ribonucleotide
  modified_base 70: mod_base = OTHER; note = 2'-O-methyl ribonucleotide
  modified_base 71: mod_base = OTHER; note = 2'-O-methyl ribonucleotide
  modified_base 72: mod_base = OTHER; note = 2'-O-methyl ribonucleotide
  modified_base 74: mod_base = OTHER; note = 2'-O-methyl ribonucleotide
  modified_base 75: mod_base = OTHER; note = 2'-O-methyl ribonucleotide
  modified_base 76: mod_base = OTHER; note = 2'-O-methyl ribonucleotide
  modified_base 77: mod_base = OTHER; note = 2'-O-methyl ribonucleotide
  modified_base 78: mod_base = OTHER; note = 2'-O-methyl ribonucleotide
  modified_base 79: mod_base = OTHER; note = 2'-O-methyl ribonucleotide
  modified_base 80: mod_base = OTHER; note = 2'-O-methyl ribonucleotide
  modified_base 81: mod_base = OTHER; note = 2'-O-methyl ribonucleotide
  modified_base 83: mod_base = OTHER; note = 2'-O-methyl ribonucleotide
  modified_base 84: mod_base = OTHER; note = 2'-O-methyl ribonucleotide
  modified_base 85: mod_base = OTHER; note = 2'-O-methyl ribonucleotide
  modified_base 86: mod_base = OTHER; note = 2'-O-methyl ribonucleotide
  modified_base 87: mod_base = OTHER; note = 2'-O-methyl ribonucleotide
  modified_base 88: mod_base = OTHER; note = 2'-O-methyl ribonucleotide
  modified_base 89: mod_base = OTHER; note = 2'-O-methyl ribonucleotide
  modified_base 90: mod_base = OTHER; note = 2'-O-methyl ribonucleotide
  modified_base 91: mod_base = OTHER; note = 2'-O-methyl ribonucleotide
  modified_base 92: mod_base = OTHER; note = 2'-O-methyl ribonucleotide
  modified_base 93: mod_base = OTHER; note = 2'-O-methyl ribonucleotide
  modified_base 94: mod_base = OTHER; note = 2'-O-methyl ribonucleotide
  modified_base 95: mod_base = OTHER; note = 2'-O-methyl ribonucleotide
  modified_base 96: mod_base = OTHER; note = 2'-O-methyl ribonucleotide
  modified_base 97: mod_base = OTHER; note = 2'-O-methyl ribonucleotide
  modified_base 98: mod_base = OTHER; note = 2'-O-methyl ribonucleotide
  modified_base 99: mod_base = OTHER; note = 2'-O-methyl ribonucleotide
  modified_base 100: mod_base = OTHER; note = 2'-O-methyl ribonucleotide
  modified_base 101: mod_base = OTHER; note = uniform ribonucleotides (A, C, G, inosine or U), deoxynucleotides (A, G, C, inosine or T), ribonebularine, 2'-O-methylnebularine or deoxynebularine
  modified_base 102: mod_base = OTHER; note = uniform ribonucleotides (A, C, G, inosine or U), deoxynucleotides (A, G, C, inosine or T), ribonebularine, 2'-O-methylnebularine or deoxynebularine
  modified_base 103: mod_base = OTHER; note = uniform ribonucleotides (A, C, G, inosine or U), deoxynucleotides (A, G, C, inosine or T), ribonebularine, 2'-O-methylnebularine or deoxynebularine
  modified_base 1..4: mod_base = OTHER; note = phosphorothioate linkage
  modified_base 45..46: mod_base = OTHER; note = phosphorothioate linkage
  modified_base 64..65: mod_base = OTHER; note = phosphorothioate linkage
  modified_base 97..100: mod_base = OTHER; note = phosphorothioate linkage
  misc_feature 1..100: note = RNA
  misc_feature 101..103: note = Optionally DNA or RNA

SEQ ID NO: 1811 - DNA, 103 bp, synthetic construct; identical to SEQ ID NO: 1795
  source 1..103: mol_type = other DNA
  modified_base 1: mod_base = OTHER; note = 2'-O-methyl ribonucleotide
  modified_base 2: mod_base = OTHER; note = 2'-O-methyl ribonucleotide
  modified_base 3: mod_base = OTHER; note = 2'-O-methyl ribonucleotide
  modified_base 21: mod_base = OTHER; note = 2'-O-methyl ribonucleotide
  modified_base 28: mod_base = OTHER; note = 2'-O-methyl ribonucleotide
  modified_base 29: mod_base = OTHER; note = 2'-O-methyl ribonucleotide
  modified_base 30: mod_base = OTHER; note = 2'-O-methyl ribonucleotide
  modified_base 31: mod_base = OTHER; note = 2'-O-methyl ribonucleotide
  modified_base 32: mod_base = OTHER; note = 2'-O-methyl ribonucleotide
  modified_base 34: mod_base = OTHER; note = 2'-O-methyl ribonucleotide
  modified_base 35: mod_base = OTHER; note = 2'-O-methyl ribonucleotide
  modified_base 36: mod_base = OTHER; note = 2'-O-methyl ribonucleotide
  modified_base 37: mod_base = OTHER; note = 2'-O-methyl ribonucleotide
  modified_base 38: mod_base = OTHER; note = 2'-O-methyl ribonucleotide
  modified_base 39: mod_base = OTHER; note = 2'-O-methyl ribonucleotide
  modified_base 40: mod_base = OTHER; note = 2'-O-methyl ribonucleotide
  modified_base 41: mod_base = OTHER; note = 2'-O-methyl ribonucleotide
  modified_base 42: mod_base = OTHER; note = 2'-O-methyl ribonucleotide
  modified_base 46: mod_base = OTHER; note = 2'-O-methyl ribonucleotide
  modified_base 48: mod_base = OTHER; note = 2'-O-methyl ribonucleotide
  modified_base 50: mod_base = OTHER; note = 2'-O-methyl ribonucleotide
  modified_base 52: mod_base = OTHER; note = 2'-O-methyl ribonucleotide
  modified_base 53: mod_base = OTHER; note = 2'-O-methyl ribonucleotide
  modified_base 54: mod_base = OTHER; note = 2'-O-methyl ribonucleotide
  modified_base 57: mod_base = OTHER; note = 2'-O-methyl ribonucleotide
  modified_base 61: mod_base = OTHER; note = 2'-O-methyl ribonucleotide
  modified_base 66: mod_base = OTHER; note = 2'-O-methyl ribonucleotide
  modified_base 67: mod_base = OTHER; note = 2'-O-methyl ribonucleotide
  modified_base 70: mod_base = OTHER; note = 2'-O-methyl ribonucleotide
  modified_base 71: mod_base = OTHER; note = 2'-O-methyl ribonucleotide
  modified_base 72: mod_base = OTHER; note = 2'-O-methyl ribonucleotide
  modified_base 74: mod_base = OTHER; note = 2'-O-methyl ribonucleotide
  modified_base 75: mod_base = OTHER; note = 2'-O-methyl ribonucleotide
  modified_base 76: mod_base = OTHER; note = 2'-O-methyl ribonucleotide
  modified_base 77: mod_base = OTHER; note = 2'-O-methyl ribonucleotide
  modified_base 78: mod_base = OTHER; note = 2'-O-methyl ribonucleotide
  modified_base 79: mod_base = OTHER; note = 2'-O-methyl ribonucleotide
  modified_base 80: mod_base = OTHER; note = 2'-O-methyl ribonucleotide
  modified_base 82: mod_base = OTHER; note = 2'-O-methyl ribonucleotide
  modified_base 83: mod_base = OTHER; note = 2'-O-methyl ribonucleotide
  modified_base 84: mod_base = OTHER; note = 2'-O-methyl ribonucleotide
  modified_base 85: mod_base = OTHER; note = 2'-O-methyl ribonucleotide
  modified_base 86: mod_base = OTHER; note = 2'-O-methyl ribonucleotide
  modified_base 87: mod_base = OTHER; note = 2'-O-methyl ribonucleotide
  modified_base 89: mod_base = OTHER; note = 2'-O-methyl ribonucleotide
  modified_base 92: mod_base = OTHER; note = 2'-O-methyl ribonucleotide
  modified_base 93: mod_base = OTHER; note = 2'-O-methyl ribonucleotide
  modified_base 94: mod_base = OTHER; note = 2'-O-methyl ribonucleotide
  modified_base 95: mod_base = OTHER; note = 2'-O-methyl ribonucleotide
  modified_base 96: mod_base = OTHER; note = 2'-O-methyl ribonucleotide
  modified_base 97: mod_base = OTHER; note = 2'-O-methyl ribonucleotide
  modified_base 98: mod_base = OTHER; note = 2'-O-methyl ribonucleotide
  modified_base 99: mod_base = OTHER; note = 2'-O-methyl ribonucleotide
  modified_base 100: mod_base = OTHER; note = 2'-O-methyl ribonucleotide
  modified_base 101: mod_base = OTHER; note = uniform ribonucleotides (A, C, G, inosine or U), deoxynucleotides (A, G, C, inosine or T), ribonebularine, 2'-O-methylnebularine or deoxynebularine
  modified_base 102: mod_base = OTHER; note = uniform ribonucleotides (A, C, G, inosine or U), deoxynucleotides (A, G, C, inosine or T), ribonebularine, 2'-O-methylnebularine or deoxynebularine
  modified_base 103: mod_base = OTHER; note = uniform ribonucleotides (A, C, G, inosine or U), deoxynucleotides (A, G, C, inosine or T), ribonebularine, 2'-O-methylnebularine or deoxynebularine
  modified_base 1..4: mod_base = OTHER; note = phosphorothioate linkage
  modified_base 25..26: mod_base = OTHER; note = phosphorothioate linkage
  modified_base 45..46: mod_base = OTHER; note = phosphorothioate linkage
  modified_base 97..100: mod_base = OTHER; note = phosphorothioate linkage
  misc_feature 1..100: note = RNA
  misc_feature 101..103: note = Optionally DNA or RNA

SEQ ID NO: 1812 - DNA, 103 bp, synthetic construct; identical to SEQ ID NO: 1796
  source 1..103: mol_type = other DNA
  modified_base 1: mod_base = OTHER; note = 2'-O-methyl ribonucleotide
  modified_base 2: mod_base = OTHER; note = 2'-O-methyl ribonucleotide
  modified_base 3: mod_base = OTHER; note = 2'-O-methyl ribonucleotide
  modified_base 21: mod_base = OTHER; note = 2'-O-methyl ribonucleotide
  modified_base 28: mod_base = OTHER; note = 2'-O-methyl ribonucleotide
  modified_base 29: mod_base = OTHER; note = 2'-O-methyl ribonucleotide
  modified_base 30: mod_base = OTHER; note = 2'-O-methyl ribonucleotide
  modified_base 31: mod_base = OTHER; note = 2'-O-methyl ribonucleotide
  modified_base 32: mod_base = OTHER; note = 2'-O-methyl ribonucleotide
  modified_base 34: mod_base = OTHER; note = 2'-O-methyl ribonucleotide
  modified_base 35: mod_base = OTHER; note = 2'-O-methyl ribonucleotide
  modified_base 36: mod_base = OTHER; note = 2'-O-methyl ribonucleotide
  modified_base 37: mod_base = OTHER; note = 2'-O-methyl ribonucleotide
  modified_base 38: mod_base = OTHER; note = 2'-O-methyl ribonucleotide
  modified_base 39: mod_base = OTHER; note = 2'-O-methyl ribonucleotide
  modified_base 40: mod_base = OTHER; note = 2'-O-methyl ribonucleotide
  modified_base 41: mod_base = OTHER; note = 2'-O-methyl ribonucleotide
  modified_base 42: mod_base = OTHER; note = 2'-O-methyl ribonucleotide
  modified_base 46: mod_base = OTHER; note = 2'-O-methyl ribonucleotide
  modified_base 48: mod_base = OTHER; note = 2'-O-methyl ribonucleotide
  modified_base 50: mod_base = OTHER; note = 2'-O-methyl ribonucleotide
  modified_base 52: mod_base = OTHER; note = 2'-O-methyl ribonucleotide
  modified_base 53: mod_base = OTHER; note = 2'-O-methyl ribonucleotide
  modified_base 54: mod_base = OTHER; note = 2'-O-methyl ribonucleotide
  modified_base 57: mod_base = OTHER; note = 2'-O-methyl ribonucleotide
  modified_base 61: mod_base = OTHER; note = 2'-O-methyl ribonucleotide
  modified_base 66: mod_base = OTHER; note = 2'-O-methyl ribonucleotide
  modified_base 67: mod_base = OTHER; note = 2'-O-methyl ribonucleotide
  modified_base 70: mod_base = OTHER; note = 2'-O-methyl ribonucleotide
  modified_base 71: mod_base = OTHER; note = 2'-O-methyl ribonucleotide
  modified_base 72: mod_base = OTHER; note = 2'-O-methyl ribonucleotide
  modified_base 74: mod_base = OTHER; note = 2'-O-methyl ribonucleotide
  modified_base 75: mod_base = OTHER; note = 2'-O-methyl ribonucleotide
  modified_base 76: mod_base = OTHER; note = 2'-O-methyl ribonucleotide
  modified_base 77: mod_base = OTHER; note = 2'-O-methyl ribonucleotide
  modified_base 78: mod_base = OTHER; note = 2'-O-methyl ribonucleotide
  modified_base 79: mod_base = OTHER; note = 2'-O-methyl ribonucleotide
  modified_base 80: mod_base = OTHER; note = 2'-O-methyl ribonucleotide
  modified_base 82: mod_base = OTHER; note = 2'-O-methyl ribonucleotide
  modified_base 83: mod_base = OTHER; note = 2'-O-methyl ribonucleotide
  modified_base 84: mod_base = OTHER; note = 2'-O-methyl ribonucleotide
  modified_base 85: mod_base = OTHER; note = 2'-O-methyl ribonucleotide
  modified_base 86: mod_base = OTHER; note = 2'-O-methyl ribonucleotide
  modified_base 87: mod_base = OTHER; note = 2'-O-methyl ribonucleotide
  modified_base 89: mod_base = OTHER; note = 2'-O-methyl ribonucleotide
  modified_base 92: mod_base = OTHER; note = 2'-O-methyl ribonucleotide
  modified_base 93: mod_base = OTHER; note = 2'-O-methyl ribonucleotide
  modified_base 94: mod_base = OTHER; note = 2'-O-methyl ribonucleotide
  modified_base 95: mod_base = OTHER; note = 2'-O-methyl ribonucleotide
  modified_base 96: mod_base = OTHER; note = 2'-O-methyl ribonucleotide
  modified_base 97: mod_base = OTHER; note = 2'-O-methyl ribonucleotide
  modified_base 98: mod_base = OTHER; note = 2'-O-methyl ribonucleotide
  modified_base 99: mod_base = OTHER; note = 2'-O-methyl ribonucleotide
  modified_base 100: mod_base = OTHER; note = 2'-O-methyl ribonucleotide
  modified_base 101: mod_base = OTHER; note = uniform ribonucleotides (A, C, G, inosine or U), deoxynucleotides (A, G, C, inosine or T), ribonebularine, 2'-O-methylnebularine or deoxynebularine
  modified_base 102: mod_base = OTHER; note = uniform ribonucleotides (A, C, G, inosine or U), deoxynucleotides (A, G, C, inosine or T), ribonebularine, 2'-O-methylnebularine or deoxynebularine
  modified_base 103: mod_base = OTHER; note = uniform ribonucleotides (A, C, G, inosine or U), deoxynucleotides (A, G, C, inosine or T), ribonebularine, 2'-O-methylnebularine or deoxynebularine
  modified_base 1..4: mod_base = OTHER; note = phosphorothioate linkage
  modified_base 25..26: mod_base = OTHER; note = phosphorothioate linkage
  modified_base 45..46: mod_base = OTHER; note = phosphorothioate linkage
  modified_base 97..100: mod_base = OTHER; note = phosphorothioate linkage
  misc_feature 1..100: note = RNA
  misc_feature 101..103: note = Optionally DNA or RNA

SEQ ID NO: 1813 - DNA, 103 bp, synthetic construct; identical to SEQ ID NO: 1797
  source 1..103: mol_type = other DNA
  modified_base 1: mod_base = OTHER; note = 2'-O-methyl ribonucleotide
  modified_base 2: mod_base = OTHER; note = 2'-O-methyl ribonucleotide
  modified_base 3: mod_base = OTHER; note = 2'-O-methyl ribonucleotide
  modified_base 21: mod_base = OTHER; note = 2'-O-methyl ribonucleotide
  modified_base 28: mod_base = OTHER; note = 2'-O-methyl ribonucleotide
  modified_base 29: mod_base = OTHER; note = 2'-O-methyl ribonucleotide
  modified_base 30: mod_base = OTHER; note = 2'-O-methyl ribonucleotide
  modified_base 31: mod_base = OTHER; note = 2'-O-methyl ribonucleotide
  modified_base 32: mod_base = OTHER; note = 2'-O-methyl ribonucleotide
  modified_base 34: mod_base = OTHER; note = 2'-O-methyl ribonucleotide
  modified_base 35: mod_base = OTHER; note = 2'-O-methyl ribonucleotide
  modified_base 36: mod_base = OTHER; note = 2'-O-methyl ribonucleotide
  modified_base 37: mod_base = OTHER; note = 2'-O-methyl ribonucleotide
  modified_base 38: mod_base = OTHER; note = 2'-O-methyl ribonucleotide
  modified_base 39: mod_base = OTHER; note = 2'-O-methyl ribonucleotide
  modified_base 40: mod_base = OTHER; note = 2'-O-methyl ribonucleotide
  modified_base 41: mod_base = OTHER; note = 2'-O-methyl ribonucleotide
  modified_base 42: mod_base = OTHER; note = 2'-O-methyl ribonucleotide
  modified_base 46: mod_base = OTHER; note = 2'-O-methyl ribonucleotide
  modified_base 48: mod_base = OTHER; note = 2'-O-methyl ribonucleotide
  modified_base 50: mod_base = OTHER; note = 2'-O-methyl ribonucleotide
  modified_base 52: mod_base = OTHER; note = 2'-O-methyl ribonucleotide
  modified_base 53: mod_base = OTHER; note = 2'-O-methyl ribonucleotide
  modified_base 54: mod_base = OTHER; note = 2'-O-methyl ribonucleotide
  modified_base 55: mod_base = OTHER; note = 2'-O-methyl ribonucleotide
  modified_base 56: mod_base = OTHER; note = 2'-O-methyl ribonucleotide
  modified_base 57: mod_base = OTHER; note = 2'-O-methyl ribonucleotide
  modified_base 60: mod_base = OTHER; note = 2'-O-methyl ribonucleotide
  modified_base 61: mod_base = OTHER; note = 2'-O-methyl ribonucleotide
  modified_base 66: mod_base = OTHER; note = 2'-O-methyl ribonucleotide
  modified_base 67: mod_base = OTHER; note = 2'-O-methyl ribonucleotide
  modified_base 70: mod_base = OTHER; note = 2'-O-methyl ribonucleotide
  modified_base 71: mod_base = OTHER; note = 2'-O-methyl ribonucleotide
  modified_base 72: mod_base = OTHER; note = 2'-O-methyl ribonucleotide
  modified_base 74: mod_base = OTHER; note = 2'-O-methyl ribonucleotide
  modified_base 75: mod_base = OTHER; note = 2'-O-methyl ribonucleotide
  modified_base 76: mod_base = OTHER; note = 2'-O-methyl ribonucleotide
  modified_base 77: mod_base = OTHER; note = 2'-O-methyl ribonucleotide
  modified_base 78: mod_base = OTHER; note = 2'-O-methyl ribonucleotide
  modified_base 79: mod_base = OTHER; note = 2'-O-methyl ribonucleotide
  modified_base 80: mod_base = OTHER; note = 2'-O-methyl ribonucleotide
  modified_base 81: mod_base = OTHER; note = 2'-O-methyl ribonucleotide
  modified_base 83: mod_base = OTHER; note = 2'-O-methyl ribonucleotide
  modified_base 84: mod_base = OTHER; note = 2'-O-methyl ribonucleotide
  modified_base 85: mod_base = OTHER; note = 2'-O-methyl ribonucleotide
  modified_base 86: mod_base = OTHER; note = 2'-O-methyl ribonucleotide
  modified_base 87: mod_base = OTHER; note = 2'-O-methyl ribonucleotide
  modified_base 88: mod_base = OTHER; note = 2'-O-methyl ribonucleotide
  modified_base 89: mod_base = OTHER; note = 2'-O-methyl ribonucleotide
  modified_base 90: mod_base = OTHER; note = 2'-O-methyl ribonucleotide
  modified_base 91: mod_base = OTHER; note = 2'-O-methyl ribonucleotide
  modified_base 92: mod_base = OTHER; note = 2'-O-methyl ribonucleotide
  modified_base 93: mod_base = OTHER; note = 2'-O-methyl ribonucleotide
  modified_base 94: mod_base = OTHER; note = 2'-O-methyl ribonucleotide
  modified_base 95: mod_base = OTHER; note = 2'-O-methyl ribonucleotide
  modified_base 96: mod_base = OTHER; note = 2'-O-methyl ribonucleotide
  modified_base 97: mod_base = OTHER; note = 2'-O-methyl ribonucleotide
  modified_base 98: mod_base = OTHER; note = 2'-O-methyl ribonucleotide
  modified_base 99: mod_base = OTHER; note = 2'-O-methyl ribonucleotide
  modified_base 100: mod_base = OTHER; note = 2'-O-methyl ribonucleotide
  modified_base 101: mod_base = OTHER; note = uniform ribonucleotides (A, C, G, inosine or U), deoxynucleotides (A, G, C, inosine or T), ribonebularine, 2'-O-methylnebularine or deoxynebularine
  modified_base 102: mod_base = OTHER; note = uniform ribonucleotides (A, C, G, inosine or U), deoxynucleotides (A, G, C, inosine or T), ribonebularine, 2'-O-methylnebularine or deoxynebularine
  modified_base 103: mod_base = OTHER; note = uniform ribonucleotides (A, C, G, inosine or U), deoxynucleotides (A, G, C, inosine or T), ribonebularine, 2'-O-methylnebularine or deoxynebularine
  modified_base 1..4: mod_base = OTHER; note = phosphorothioate linkage
  modified_base 25..26: mod_base = OTHER; note = phosphorothioate linkage
  modified_base 45..46: mod_base = OTHER; note = phosphorothioate linkage
  modified_base 97..100: mod_base = OTHER; note = phosphorothioate linkage
  misc_feature 1..100: note = RNA
  misc_feature 101..103: note = Optionally DNA or RNA

SEQ ID NO: 1814 - DNA, 103 bp, synthetic construct; identical to SEQ ID NO: 1797
  source 1..103: mol_type = other DNA
  modified_base 1: mod_base = OTHER; note = 2'-O-methyl ribonucleotide
  modified_base 2: mod_base = OTHER; note = 2'-O-methyl ribonucleotide
  modified_base 3: mod_base = OTHER; note = 2'-O-methyl ribonucleotide
  modified_base 21: mod_base = OTHER; note = 2'-O-methyl ribonucleotide
  modified_base 28: mod_base = OTHER; note = 2'-O-methyl ribonucleotide
  modified_base 29: mod_base = OTHER; note = 2'-O-methyl ribonucleotide
  modified_base 30: mod_base = OTHER; note = 2'-O-methyl ribonucleotide
  modified_base 31: mod_base = OTHER; note = 2'-O-methyl ribonucleotide
  modified_base 32: mod_base = OTHER; note = 2'-O-methyl ribonucleotide
  modified_base 33: mod_base = OTHER; note = 2'-O-methyl ribonucleotide
  modified_base 34: mod_base = OTHER; note = 2'-O-methyl ribonucleotide
  modified_base 35: mod_base = OTHER; note = 2'-O-methyl ribonucleotide
  modified_base 36: mod_base = OTHER; note = 2'-O-methyl ribonucleotide
  modified_base 37: mod_base = OTHER; note = 2'-O-methyl ribonucleotide
  modified_base 38: mod_base = OTHER; note = 2'-O-methyl ribonucleotide
  modified_base 39: mod_base = OTHER; note = 2'-O-methyl ribonucleotide
  modified_base 40: mod_base = OTHER; note = 2'-O-methyl ribonucleotide
  modified_base 41: mod_base = OTHER; note = 2'-O-methyl ribonucleotide
  modified_base 42: mod_base = OTHER; note = 2'-O-methyl ribonucleotide
  modified_base 46: mod_base = OTHER; note = 2'-O-methyl ribonucleotide
  modified_base 48: mod_base = OTHER; note = 2'-O-methyl ribonucleotide
  modified_base 50: mod_base = OTHER; note = 2'-O-methyl ribonucleotide
  modified_base 52: mod_base = OTHER; note = 2'-O-methyl ribonucleotide
  modified_base 53: mod_base = OTHER; note = 2'-O-methyl ribonucleotide
  modified_base 54: mod_base = OTHER; note = 2'-O-methyl ribonucleotide
  modified_base 55: mod_base = OTHER; note = 2'-O-methyl ribonucleotide
  modified_base 56: mod_base = OTHER; note = 2'-O-methyl ribonucleotide
  modified_base 57: mod_base = OTHER; note = 2'-O-methyl ribonucleotide
  modified_base 60: mod_base = OTHER; note = 2'-O-methyl ribonucleotide
  modified_base 61: mod_base = OTHER; note = 2'-O-methyl ribonucleotide
  modified_base 66: mod_base = OTHER; note = 2'-O-methyl ribonucleotide
  modified_base 67: mod_base = OTHER; note = 2'-O-methyl ribonucleotide
  modified_base 70: mod_base = OTHER; note = 2'-O-methyl ribonucleotide
  modified_base 71: mod_base = OTHER; note = 2'-O-methyl ribonucleotide
  modified_base 72: mod_base = OTHER; note = 2'-O-methyl ribonucleotide
  modified_base 74: mod_base = OTHER; note = 2'-O-methyl ribonucleotide
  modified_base 75: mod_base = OTHER; note = 2'-O-methyl ribonucleotide
  modified_base 76: mod_base = OTHER; note = 2'-O-methyl ribonucleotide
  modified_base 77: mod_base = OTHER; note = 2'-O-methyl ribonucleotide
  modified_base 78: mod_base = OTHER; note = 2'-O-methyl ribonucleotide
  modified_base 79: mod_base = OTHER; note = 2'-O-methyl ribonucleotide
  modified_base 80: mod_base = OTHER; note = 2'-O-methyl ribonucleotide
  modified_base 82: mod_base = OTHER; note = 2'-O-methyl ribonucleotide
  modified_base 83: mod_base = OTHER; note = 2'-O-methyl ribonucleotide
  modified_base 84: mod_base = OTHER; note = 2'-O-methyl ribonucleotide
  modified_base 85: mod_base = OTHER; note = 2'-O-methyl ribonucleotide
  modified_base 86: mod_base = OTHER; note = 2'-O-methyl ribonucleotide
  modified_base 87: mod_base = OTHER; note = 2'-O-methyl ribonucleotide
  modified_base 89: mod_base = OTHER; note = 2'-O-methyl ribonucleotide
  modified_base 92: mod_base = OTHER; note = 2'-O-methyl ribonucleotide
  modified_base 93: mod_base = OTHER; note = 2'-O-methyl ribonucleotide
  modified_base 94: mod_base = OTHER; note = 2'-O-methyl ribonucleotide
  modified_base 95: mod_base = OTHER; note = 2'-O-methyl ribonucleotide
  modified_base 96: mod_base = OTHER; note = 2'-O-methyl ribonucleotide
  modified_base 97: mod_base = OTHER; note = 2'-O-methyl ribonucleotide
  modified_base 98: mod_base = OTHER; note = 2'-O-methyl ribonucleotide
  modified_base 99: mod_base = OTHER; note = 2'-O-methyl ribonucleotide
  modified_base 100: mod_base = OTHER; note = 2'-O-methyl ribonucleotide
  modified_base 101: mod_base = OTHER; note = uniform ribonucleotides (A, C, G, inosine or U), deoxynucleotides (A, G, C, inosine or T), ribonebularine, 2'-O-methylnebularine or deoxynebularine
  modified_base 102: mod_base = OTHER; note = uniform ribonucleotides (A, C, G, inosine or U), deoxynucleotides (A, G, C, inosine or T), ribonebularine, 2'-O-methylnebularine or deoxynebularine
  modified_base 103: mod_base = OTHER; note = uniform ribonucleotides (A, C, G, inosine or U), deoxynucleotides (A, G, C, inosine or T), ribonebularine, 2'-O-methylnebularine or deoxynebularine
  modified_base 1..4: mod_base = OTHER; note = phosphorothioate linkage
  modified_base 25..26: mod_base = OTHER; note = phosphorothioate linkage
  modified_base 45..46: mod_base = OTHER; note = phosphorothioate linkage
  modified_base 97..100: mod_base = OTHER; note = phosphorothioate linkage
  misc_feature 1..100: note = RNA
  misc_feature 101..103: note = Optionally DNA or RNA

SEQ ID NO: 1815 - DNA, 103 bp, synthetic construct; identical to SEQ ID NO: 1795
  source 1..103: mol_type = other DNA
  modified_base 1: mod_base = OTHER; note = 2'-O-methyl ribonucleotide
  modified_base 2: mod_base = OTHER; note = 2'-O-methyl ribonucleotide
  modified_base 3: mod_base = OTHER; note = 2'-O-methyl ribonucleotide
  modified_base 21: mod_base = OTHER; note = 2'-O-methyl ribonucleotide
  modified_base 28: mod_base = OTHER; note = 2'-O-methyl ribonucleotide
  modified_base 29: mod_base = OTHER; note = 2'-O-methyl ribonucleotide
  modified_base 30: mod_base = OTHER; note = 2'-O-methyl ribonucleotide
  modified_base 31: mod_base = OTHER; note = 2'-O-methyl ribonucleotide
  modified_base 32: mod_base = OTHER; note = 2'-O-methyl ribonucleotide
  modified_base 34: mod_base = OTHER; note = 2'-O-methyl ribonucleotide
  modified_base 35: mod_base = OTHER; note = 2'-O-methyl ribonucleotide
  modified_base 36: mod_base = OTHER; note = 2'-O-methyl ribonucleotide
  modified_base 37: mod_base = OTHER; note = 2'-O-methyl ribonucleotide
  modified_base 38: mod_base = OTHER; note = 2'-O-methyl ribonucleotide
  modified_base 39: mod_base = OTHER; note = 2'-O-methyl ribonucleotide
  modified_base 40: mod_base = OTHER; note = 2'-O-methyl ribonucleotide
  modified_base 41: mod_base = OTHER; note = 2'-O-methyl ribonucleotide
  modified_base 42: mod_base = OTHER; note = 2'-O-methyl ribonucleotide
  modified_base 46: mod_base = OTHER; note = 2'-O-methyl ribonucleotide
  modified_base 48: mod_base = OTHER; note = 2'-O-methyl ribonucleotide
  modified_base 50: mod_base = OTHER; note = 2'-O-methyl ribonucleotide
  modified_base 52: mod_base = OTHER; note = 2'-O-methyl ribonucleotide
  modified_base 53: mod_base = OTHER; note = 2'-O-methyl ribonucleotide
  modified_base 54: mod_base = OTHER; note = 2'-O-methyl ribonucleotide
  modified_base 57: mod_base = OTHER; note = 2'-O-methyl ribonucleotide
  modified_base 61: mod_base = OTHER; note = 2'-O-methyl ribonucleotide
  modified_base 66: mod_base = OTHER; note = 2'-O-methyl ribonucleotide
  modified_base 67: mod_base = OTHER; note = 2'-O-methyl ribonucleotide
  modified_base 70: mod_base = OTHER; note = 2'-O-methyl ribonucleotide
  modified_base 71: mod_base = OTHER; note = 2'-O-methyl ribonucleotide
  modified_base 72: mod_base = OTHER; note = 2'-O-methyl ribonucleotide
  modified_base 74: mod_base = OTHER; note = 2'-O-methyl ribonucleotide
  modified_base 75: mod_base = OTHER; note = 2'-O-methyl ribonucleotide
  modified_base 76: mod_base = OTHER; note = 2'-O-methyl ribonucleotide
  modified_base 77: mod_base = OTHER; note = 2'-O-methyl ribonucleotide
  modified_base 78: mod_base = OTHER; note = 2'-O-methyl ribonucleotide
  modified_base 79: mod_base = OTHER; note = 2'-O-methyl ribonucleotide
  modified_base 80: mod_base = OTHER; note = 2'-O-methyl ribonucleotide
  modified_base 82: mod_base = OTHER; note = 2'-O-methyl ribonucleotide
  modified_base 83: mod_base = OTHER; note = 2'-O-methyl ribonucleotide
  modified_base 84: mod_base = OTHER; note = 2'-O-methyl ribonucleotide
  modified_base 85: mod_base = OTHER; note = 2'-O-methyl ribonucleotide
  modified_base 86: mod_base = OTHER; note = 2'-O-methyl ribonucleotide
  modified_base 87: mod_base = OTHER; note = 2'-O-methyl ribonucleotide
  modified_base 89: mod_base = OTHER; note = 2'-O-methyl ribonucleotide
  modified_base 92: mod_base = OTHER; note = 2'-O-methyl ribonucleotide
  modified_base 93: mod_base = OTHER; note = 2'-O-methyl ribonucleotide
  modified_base 94: mod_base = OTHER; note = 2'-O-methyl ribonucleotide
  modified_base 95: mod_base = OTHER; note = 2'-O-methyl ribonucleotide
  modified_base 96: mod_base = OTHER; note = 2'-O-methyl ribonucleotide
  modified_base 97: mod_base = OTHER; note = 2'-O-methyl ribonucleotide
  modified_base 98: mod_base = OTHER; note = 2'-O-methyl ribonucleotide
  modified_base 99: mod_base = OTHER; note = 2'-O-methyl ribonucleotide
  modified_base 100: mod_base = OTHER; note = 2'-O-methyl ribonucleotide
  modified_base 101: mod_base = OTHER; note = uniform ribonucleotides (A, C, G, inosine or U), deoxynucleotides (A, G, C, inosine or T), ribonebularine, 2'-O-methylnebularine or deoxynebularine
  modified_base 102: mod_base = OTHER; note = uniform ribonucleotides (A, C, G, inosine or U), deoxynucleotides (A, G, C, inosine or T), ribonebularine, 2'-O-methylnebularine or deoxynebularine
  modified_base 103: mod_base = OTHER; note = uniform ribonucleotides (A, C, G, inosine or U), deoxynucleotides (A, G, C, inosine or T), ribonebularine, 2'-O-methylnebularine or deoxynebularine
  modified_base 1..4: mod_base = OTHER; note = phosphorothioate linkage
  modified_base 25..26: mod_base = OTHER; note = phosphorothioate linkage
  modified_base 64..65: mod_base = OTHER; note = phosphorothioate linkage
  modified_base 97..100: mod_base = OTHER; note = phosphorothioate linkage
  misc_feature 1..100: note = RNA
  misc_feature 101..103: note = Optionally DNA or RNA

SEQ ID NO: 1816 - DNA, 103 bp, synthetic construct; identical to SEQ ID NO: 1796
  source 1..103: mol_type = other DNA
  modified_base 1: mod_base = OTHER; note = 2'-O-methyl ribonucleotide
  modified_base 2: mod_base = OTHER; note = 2'-O-methyl ribonucleotide
  modified_base 3: mod_base = OTHER; note = 2'-O-methyl ribonucleotide
  modified_base 21: mod_base = OTHER; note = 2'-O-methyl ribonucleotide
  modified_base 28: mod_base = OTHER; note = 2'-O-methyl ribonucleotide
  modified_base 29: mod_base = OTHER; note = 2'-O-methyl ribonucleotide
  modified_base 30: mod_base = OTHER; note = 2'-O-methyl ribonucleotide
  modified_base 31: mod_base = OTHER; note = 2'-O-methyl ribonucleotide
  modified_base 32: mod_base = OTHER; note = 2'-O-methyl ribonucleotide
  modified_base 34: mod_base = OTHER; note = 2'-O-methyl ribonucleotide
  modified_base 35: mod_base = OTHER; note = 2'-O-methyl ribonucleotide
  modified_base 36: mod_base = OTHER; note = 2'-O-methyl ribonucleotide
  modified_base 37: mod_base = OTHER; note = 2'-O-methyl ribonucleotide
  modified_base 38: mod_base = OTHER; note = 2'-O-methyl ribonucleotide
  modified_base 39: mod_base = OTHER; note = 2'-O-methyl ribonucleotide
  modified_base 40: mod_base = OTHER; note = 2'-O-methyl ribonucleotide
  modified_base 41: mod_base = OTHER; note = 2'-O-methyl ribonucleotide
  modified_base 42: mod_base = OTHER; note = 2'-O-methyl ribonucleotide
  modified_base 46: mod_base = OTHER; note = 2'-O-methyl ribonucleotide
  modified_base 48: mod_base = OTHER; note = 2'-O-methyl ribonucleotide
  modified_base 50: mod_base = OTHER; note = 2'-O-methyl ribonucleotide
  modified_base 52: mod_base = OTHER; note = 2'-O-methyl ribonucleotide
  modified_base 53: mod_base = OTHER; note = 2'-O-methyl ribonucleotide
  modified_base 54: mod_base = OTHER; note = 2'-O-methyl ribonucleotide
  modified_base 57: mod_base = OTHER; note = 2'-O-methyl ribonucleotide
  modified_base 61: mod_base = OTHER; note = 2'-O-methyl ribonucleotide
  modified_base 66: mod_base = OTHER; note = 2'-O-methyl ribonucleotide
  modified_base 67: mod_base = OTHER; note = 2'-O-methyl ribonucleotide
  modified_base 70: mod_base = OTHER; note = 2'-O-methyl ribonucleotide
  modified_base 71: mod_base = OTHER; note = 2'-O-methyl ribonucleotide
  modified_base 72: mod_base = OTHER; note = 2'-O-methyl ribonucleotide
  modified_base 74: mod_base = OTHER; note = 2'-O-methyl ribonucleotide
  modified_base 75: mod_base = OTHER; note = 2'-O-methyl ribonucleotide
  modified_base 76: mod_base = OTHER; note = 2'-O-methyl ribonucleotide
  modified_base 77: mod_base = OTHER; note = 2'-O-methyl ribonucleotide
  modified_base 78: mod_base = OTHER; note = 2'-O-methyl ribonucleotide
  modified_base 79: mod_base = OTHER; note = 2'-O-methyl ribonucleotide
  modified_base 80: mod_base = OTHER; note = 2'-O-methyl ribonucleotide
  modified_base 82: mod_base = OTHER; note = 2'-O-methyl ribonucleotide
  modified_base 83: mod_base = OTHER; note = 2'-O-methyl ribonucleotide
  modified_base 84: mod_base = OTHER; note = 2'-O-methyl ribonucleotide
  modified_base 85: mod_base = OTHER; note = 2'-O-methyl ribonucleotide
  modified_base 86: mod_base = OTHER; note = 2'-O-methyl ribonucleotide
  modified_base 87: mod_base = OTHER; note = 2'-O-methyl ribonucleotide
  modified_base 89: mod_base = OTHER; note = 2'-O-methyl ribonucleotide
  modified_base 92: mod_base = OTHER; note = 2'-O-methyl ribonucleotide
  modified_base 93: mod_base = OTHER; note = 2'-O-methyl ribonucleotide
  modified_base 94: mod_base = OTHER; note = 2'-O-methyl ribonucleotide
  modified_base 95: mod_base = OTHER; note = 2'-O-methyl ribonucleotide
  modified_base 96: mod_base = OTHER; note = 2'-O-methyl ribonucleotide
  modified_base 97: mod_base = OTHER; note = 2'-O-methyl ribonucleotide
  modified_base 98: mod_base = OTHER; note = 2'-O-methyl ribonucleotide
  modified_base 99: mod_base = OTHER; note = 2'-O-methyl ribonucleotide
  modified_base 100: mod_base = OTHER; note = 2'-O-methyl ribonucleotide
  modified_base 101: mod_base = OTHER; note = uniform ribonucleotides (A, C, G, inosine or U), deoxynucleotides (A, G, C, inosine or T), ribonebularine, 2'-O-methylnebularine or deoxynebularine
  modified_base 102: mod_base = OTHER; note = uniform ribonucleotides (A, C, G, inosine or U), deoxynucleotides (A, G, C, inosine or T), ribonebularine, 2'-O-methylnebularine or deoxynebularine
  modified_base 103: mod_base = OTHER; note = uniform ribonucleotides (A, C, G, inosine or U), deoxynucleotides (A, G, C, inosine or T), ribonebularine, 2'-O-methylnebularine or deoxynebularine
  modified_base 1..4: mod_base = OTHER; note = phosphorothioate linkage
  modified_base 25..26: mod_base = OTHER; note = phosphorothioate linkage
  modified_base 64..65: mod_base = OTHER; note = phosphorothioate linkage
  modified_base 97..100: mod_base = OTHER; note = phosphorothioate linkage
  misc_feature 1..100: note = RNA
  misc_feature 101..103: note = Optionally DNA or RNA

SEQ ID NO: 1817 - DNA, 103 bp, synthetic construct; identical to SEQ ID NO: 1797
  source 1..103: mol_type = other DNA
  modified_base 1: mod_base = OTHER; note = 2'-O-methyl ribonucleotide
  modified_base 2: mod_base = OTHER; note = 2'-O-methyl ribonucleotide
  modified_base 3: mod_base = OTHER; note = 2'-O-methyl ribonucleotide
  modified_base 21: mod_base = OTHER; note = 2'-O-methyl ribonucleotide
  modified_base 28: mod_base = OTHER; note = 2'-O-methyl ribonucleotide
  modified_base 29: mod_base = OTHER; note = 2'-O-methyl ribonucleotide
  modified_base 30: mod_base = OTHER; note = 2'-O-methyl ribonucleotide
  modified_base 31: mod_base = OTHER; note = 2'-O-methyl ribonucleotide
  modified_base 32: mod_base = OTHER; note = 2'-O-methyl ribonucleotide
  modified_base 34: mod_base = OTHER; note = 2'-O-methyl ribonucleotide
  modified_base 35: mod_base = OTHER; note = 2'-O-methyl ribonucleotide
  modified_base 36: mod_base = OTHER; note = 2'-O-methyl ribonucleotide
  modified_base 37: mod_base = OTHER; note = 2'-O-methyl ribonucleotide
  modified_base 38: mod_base = OTHER; note = 2'-O-methyl ribonucleotide
  modified_base 39: mod_base = OTHER; note = 2'-O-methyl ribonucleotide
  modified_base 40: mod_base = OTHER; note = 2'-O-methyl ribonucleotide
  modified_base 41: mod_base = OTHER; note = 2'-O-methyl ribonucleotide
  modified_base 42: mod_base = OTHER; note = 2'-O-methyl ribonucleotide
  modified_base 46: mod_base = OTHER; note = 2'-O-methyl ribonucleotide
  modified_base 48: mod_base = OTHER; note = 2'-O-methyl ribonucleotide
  modified_base 50: mod_base = OTHER; note = 2'-O-methyl ribonucleotide
  modified_base 52: mod_base = OTHER; note = 2'-O-methyl ribonucleotide
  modified_base 53: mod_base = OTHER; note = 2'-O-methyl ribonucleotide
  modified_base 54: mod_base = OTHER; note = 2'-O-methyl ribonucleotide
  modified_base 55: mod_base = OTHER; note = 2'-O-methyl ribonucleotide
  modified_base 56: mod_base = OTHER; note = 2'-O-methyl ribonucleotide
  modified_base 57: mod_base = OTHER; note = 2'-O-methyl ribonucleotide
  modified_base 60: mod_base = OTHER; note = 2'-O-methyl ribonucleotide
  modified_base 61: mod_base = OTHER; note = 2'-O-methyl ribonucleotide
  modified_base 66: mod_base = OTHER; note = 2'-O-methyl ribonucleotide
  modified_base 67: mod_base = OTHER; note = 2'-O-methyl ribonucleotide
  modified_base 70: mod_base = OTHER; note = 2'-O-methyl ribonucleotide
  modified_base 71: mod_base = OTHER; note = 2'-O-methyl ribonucleotide
  modified_base 72: mod_base = OTHER; note = 2'-O-methyl ribonucleotide
  modified_base 74: mod_base = OTHER; note = 2'-O-methyl ribonucleotide
  modified_base 75: mod_base = OTHER; note = 2'-O-methyl ribonucleotide
  modified_base 76: mod_base = OTHER; note = 2'-O-methyl ribonucleotide
  modified_base 77: mod_base = OTHER; note = 2'-O-methyl ribonucleotide
  modified_base 78: mod_base = OTHER; note = 2'-O-methyl ribonucleotide
  modified_base 79: mod_base = OTHER; note = 2'-O-methyl ribonucleotide
  modified_base 80: mod_base = OTHER; note = 2'-O-methyl ribonucleotide
  modified_base 81: mod_base = OTHER; note = 2'-O-methyl ribonucleotide
  modified_base 83: mod_base = OTHER; note = 2'-O-methyl ribonucleotide
  modified_base 84: mod_base = OTHER; note = 2'-O-methyl ribonucleotide
  modified_base 85: mod_base = OTHER; note = 2'-O-methyl ribonucleotide
  modified_base 86: mod_base = OTHER; note = 2'-O-methyl ribonucleotide
  modified_base 87: mod_base = OTHER; note = 2'-O-methyl ribonucleotide
  modified_base 88: mod_base = OTHER; note = 2'-O-methyl ribonucleotide
  modified_base 89: mod_base = OTHER; note = 2'-O-methyl ribonucleotide
  modified_base 90: mod_base = OTHER; note = 2'-O-methyl ribonucleotide
  modified_base 91: mod_base = OTHER; note = 2'-O-methyl ribonucleotide
  modified_base 92: mod_base = OTHER; note = 2'-O-methyl ribonucleotide
  modified_base 93: mod_base = OTHER; note = 2'-O-methyl ribonucleotide
  modified_base 94: mod_base = OTHER; note = 2'-O-methyl ribonucleotide
  modified_base 95: mod_base = OTHER; note = 2'-O-methyl ribonucleotide
  modified_base 96: mod_base = OTHER; note = 2'-O-methyl ribonucleotide
  modified_base 97: mod_base = OTHER; note = 2'-O-methyl ribonucleotide
  modified_base 98: mod_base = OTHER; note = 2'-O-methyl ribonucleotide
  modified_base 99: mod_base = OTHER; note = 2'-O-methyl ribonucleotide
  modified_base 100: mod_base = OTHER; note = 2'-O-methyl ribonucleotide
  modified_base 101: mod_base = OTHER; note = uniform ribonucleotides (A, C, G, inosine or U), deoxynucleotides (A, G, C, inosine or T), ribonebularine, 2'-O-methylnebularine or deoxynebularine
  modified_base 102: mod_base = OTHER; note = uniform ribonucleotides (A, C, G, inosine or U), deoxynucleotides (A, G, C, inosine or T), ribonebularine, 2'-O-methylnebularine or deoxynebularine
  modified_base 103: mod_base = OTHER; note = uniform ribonucleotides (A, C, G, inosine or U), deoxynucleotides (A, G, C, inosine or T), ribonebularine, 2'-O-methylnebularine or deoxynebularine
  modified_base 1..4: mod_base = OTHER; note = phosphorothioate linkage
  modified_base 25..26: mod_base = OTHER; note = phosphorothioate linkage
  modified_base 64..65: mod_base = OTHER; note = phosphorothioate linkage
  modified_base 97..100: mod_base = OTHER; note = phosphorothioate linkage
  misc_feature 1..100: note = RNA
  misc_feature 101..103: note = Optionally DNA or RNA

SEQ ID NO: 1818 - DNA, 103 bp, synthetic construct; identical to SEQ ID NO: 1795
  source 1..103: mol_type = other DNA
  modified_base 1: mod_base = OTHER; note = 2'-O-methyl ribonucleotide
  modified_base 2: mod_base = OTHER; note = 2'-O-methyl ribonucleotide
  modified_base 3: mod_base = OTHER; note = 2'-O-methyl ribonucleotide
  modified_base 21: mod_base = OTHER; note = 2'-O-methyl ribonucleotide
  modified_base 28: mod_base = OTHER; note = 2'-O-methyl ribonucleotide
  modified_base 29: mod_base = OTHER; note = 2'-O-methyl ribonucleotide
  modified_base 30: mod_base = OTHER; note = 2'-O-methyl ribonucleotide
  modified_base 31: mod_base = OTHER; note = 2'-O-methyl ribonucleotide
  modified_base 32: mod_base = OTHER; note = 2'-O-methyl ribonucleotide
  modified_base 34: mod_base = OTHER; note = 2'-O-methyl ribonucleotide
  modified_base 35: mod_base = OTHER; note = 2'-O-methyl ribonucleotide
  modified_base 36: mod_base = OTHER; note = 2'-O-methyl ribonucleotide
  modified_base 37: mod_base = OTHER; note = 2'-O-methyl ribonucleotide
  modified_base 38: mod_base = OTHER; note = 2'-O-methyl ribonucleotide
  modified_base 39: mod_base = OTHER; note = 2'-O-methyl ribonucleotide
  modified_base 40: mod_base = OTHER; note = 2'-O-methyl ribonucleotide
  modified_base 41: mod_base = OTHER; note = 2'-O-methyl ribonucleotide
  modified_base 42: mod_base = OTHER; note = 2'-O-methyl ribonucleotide
  modified_base 46: mod_base = OTHER; note = 2'-O-methyl ribonucleotide
  modified_base 48: mod_base = OTHER; note = 2'-O-methyl ribonucleotide
  modified_base 50: mod_base = OTHER; note = 2'-O-methyl ribonucleotide
  modified_base 52: mod_base = OTHER; note = 2'-O-methyl ribonucleotide
  modified_base 53: mod_base = OTHER; note = 2'-O-methyl ribonucleotide
  modified_base 54: mod_base = OTHER; note = 2'-O-methyl ribonucleotide
  modified_base 57: mod_base = OTHER; note = 2'-O-methyl ribonucleotide
  modified_base 61: mod_base = OTHER; note = 2'-O-methyl ribonucleotide
  modified_base 66: mod_base = OTHER; note = 2'-O-methyl ribonucleotide
  modified_base 67: mod_base = OTHER; note = 2'-O-methyl ribonucleotide
  modified_base 70: mod_base = OTHER; note = 2'-O-methyl ribonucleotide
  modified_base 71: mod_base = OTHER; note = 2'-O-methyl ribonucleotide
  modified_base 72: mod_base = OTHER; note = 2'-O-methyl ribonucleotide
  modified_base 74: mod_base = OTHER; note = 2'-O-methyl ribonucleotide
  modified_base 75: mod_base = OTHER; note = 2'-O-methyl ribonucleotide
  modified_base 76: mod_base = OTHER; note = 2'-O-methyl ribonucleotide
  modified_base 77: mod_base = OTHER; note = 2'-O-methyl ribonucleotide
  modified_base 78: mod_base = OTHER; note = 2'-O-methyl ribonucleotide
  modified_base 79: mod_base = OTHER; note = 2'-O-methyl ribonucleotide
  modified_base 80: mod_base = OTHER; note = 2'-O-methyl ribonucleotide
  modified_base 82: mod_base = OTHER; note = 2'-O-methyl ribonucleotide
  modified_base 83: mod_base = OTHER; note = 2'-O-methyl ribonucleotide
  modified_base 84: mod_base = OTHER; note = 2'-O-methyl ribonucleotide
  modified_base 85: mod_base = OTHER; note = 2'-O-methyl ribonucleotide
  modified_base 86: mod_base = OTHER; note = 2'-O-methyl ribonucleotide
  modified_base 87: mod_base = OTHER; note = 2'-O-methyl ribonucleotide
  modified_base 89: mod_base = OTHER; note = 2'-O-methyl ribonucleotide
  modified_base 92: mod_base = OTHER; note = 2'-O-methyl ribonucleotide
  modified_base 93: mod_base = OTHER; note = 2'-O-methyl ribonucleotide
  modified_base 94: mod_base = OTHER; note = 2'-O-methyl ribonucleotide
  modified_base 95: mod_base = OTHER; note = 2'-O-methyl ribonucleotide
  modified_base 96: mod_base = OTHER; note = 2'-O-methyl ribonucleotide
  modified_base 97: mod_base = OTHER; note = 2'-O-methyl ribonucleotide
  modified_base 98: mod_base = OTHER; note = 2'-O-methyl ribonucleotide
  modified_base 99: mod_base = OTHER; note = 2'-O-methyl ribonucleotide
  modified_base 100: mod_base = OTHER; note = 2'-O-methyl ribonucleotide
  modified_base 101: mod_base = OTHER; note = uniform ribonucleotides (A, C, G, inosine or U), deoxynucleotides (A, G, C, inosine or T), ribonebularine, 2'-O-methylnebularine or deoxynebularine
  modified_base 102: mod_base = OTHER; note = uniform ribonucleotides (A, C, G, inosine or U), deoxynucleotides (A, G, C, inosine or T), ribonebularine, 2'-O-methylnebularine or deoxynebularine
  modified_base 103: mod_base = OTHER; note = uniform ribonucleotides (A, C, G, inosine or U), deoxynucleotides (A, G, C, inosine or T), ribonebularine, 2'-O-methylnebularine or deoxynebularine
  modified_base 1..4: mod_base = OTHER; note = phosphorothioate linkage
  modified_base 25..26: mod_base = OTHER; note = phosphorothioate linkage
  modified_base 45..46: mod_base = OTHER; note = phosphorothioate linkage
  modified_base 64..65: mod_base = OTHER; note = phosphorothioate linkage
  modified_base 97..100: mod_base = OTHER; note = phosphorothioate linkage
  misc_feature 1..100: note = RNA
  misc_feature 101..103: note = Optionally DNA or RNA

SEQ ID NO: 1819 - DNA, 103 bp, synthetic construct; identical to SEQ ID NO: 1796
  source 1..103: mol_type = other DNA
  modified_base 1: mod_base = OTHER; note = 2'-O-methyl ribonucleotide
  modified_base 2: mod_base = OTHER; note = 2'-O-methyl ribonucleotide
  modified_base 3: mod_base = OTHER; note = 2'-O-methyl ribonucleotide
  modified_base 21: mod_base = OTHER; note = 2'-O-methyl ribonucleotide
  modified_base 28: mod_base = OTHER; note = 2'-O-methyl ribonucleotide
  modified_base 29: mod_base = OTHER; note = 2'-O-methyl ribonucleotide
  modified_base 30: mod_base = OTHER; note = 2'-O-methyl ribonucleotide
  modified_base 31: mod_base = OTHER; note = 2'-O-methyl ribonucleotide
  modified_base 32: mod_base = OTHER; note = 2'-O-methyl ribonucleotide
  modified_base 34: mod_base = OTHER; note = 2'-O-methyl ribonucleotide
  modified_base 35: mod_base = OTHER; note = 2'-O-methyl ribonucleotide
  modified_base 36: mod_base = OTHER; note = 2'-O-methyl ribonucleotide
  modified_base 37: mod_base = OTHER; note = 2'-O-methyl ribonucleotide
  modified_base 38: mod_base = OTHER; note = 2'-O-methyl ribonucleotide
  modified_base 39: mod_base = OTHER; note = 2'-O-methyl ribonucleotide
  modified_base 40: mod_base = OTHER; note = 2'-O-methyl ribonucleotide
  modified_base 41: mod_base = OTHER; note = 2'-O-methyl ribonucleotide
  modified_base 42: mod_base = OTHER; note = 2'-O-methyl ribonucleotide
  modified_base 46: mod_base = OTHER; note = 2'-O-methyl ribonucleotide
  modified_base 48: mod_base = OTHER; note = 2'-O-methyl ribonucleotide
  modified_base 50: mod_base = OTHER; note = 2'-O-methyl ribonucleotide
  modified_base 52: mod_base = OTHER; note = 2'-O-methyl ribonucleotide
  modified_base 53: mod_base = OTHER; note = 2'-O-methyl ribonucleotide
  modified_base 54: mod_base = OTHER; note = 2'-O-methyl ribonucleotide
  modified_base 57: mod_base = OTHER; note = 2'-O-methyl ribonucleotide
  modified_base 61: mod_base = OTHER; note = 2'-O-methyl ribonucleotide
  modified_base 66: mod_base = OTHER; note = 2'-O-methyl ribonucleotide
  modified_base 67: mod_base = OTHER; note = 2'-O-methyl ribonucleotide
  modified_base 70: mod_base = OTHER; note = 2'-O-methyl ribonucleotide
  modified_base 71: mod_base = OTHER; note = 2'-O-methyl ribonucleotide
  modified_base 72: mod_base = OTHER; note = 2'-O-methyl ribonucleotide
  modified_base 74: mod_base = OTHER; note = 2'-O-methyl ribonucleotide
  modified_base 75: mod_base = OTHER; note = 2'-O-methyl ribonucleotide
  modified_base 76: mod_base = OTHER; note = 2'-O-methyl ribonucleotide
  modified_base 77: mod_base = OTHER; note = 2'-O-methyl ribonucleotide
  modified_base 78: mod_base = OTHER; note = 2'-O-methyl ribonucleotide
  modified_base 79: mod_base = OTHER; note = 2'-O-methyl ribonucleotide
  modified_base 80: mod_base = OTHER; note = 2'-O-methyl ribonucleotide
  modified_base 82: mod_base = OTHER; note = 2'-O-methyl ribonucleotide
  modified_base 83: mod_base = OTHER; note = 2'-O-methyl ribonucleotide
  modified_base 84: mod_base = OTHER; note = 2'-O-methyl ribonucleotide
  modified_base 85: mod_base = OTHER; note = 2'-O-methyl ribonucleotide
  modified_base 86: mod_base = OTHER; note = 2'-O-methyl ribonucleotide
  modified_base 87: mod_base = OTHER; note = 2'-O-methyl ribonucleotide
  modified_base 89: mod_base = OTHER; note = 2'-O-methyl ribonucleotide
  modified_base 92: mod_base = OTHER; note = 2'-O-methyl ribonucleotide
  modified_base 93: mod_base = OTHER; note = 2'-O-methyl ribonucleotide
  modified_base 94: mod_base = OTHER; note = 2'-O-methyl ribonucleotide
  modified_base 95: mod_base = OTHER; note = 2'-O-methyl ribonucleotide
  modified_base 96: mod_base = OTHER; note = 2'-O-methyl ribonucleotide
  modified_base 97: mod_base = OTHER; note = 2'-O-methyl ribonucleotide
  modified_base 98: mod_base = OTHER; note = 2'-O-methyl ribonucleotide
  modified_base 99: mod_base = OTHER; note = 2'-O-methyl ribonucleotide
  modified_base 100: mod_base = OTHER; note = 2'-O-methyl ribonucleotide
  modified_base 101: mod_base = OTHER; note = uniform ribonucleotides (A, C, G, inosine or U), deoxynucleotides (A, G, C, inosine or T), ribonebularine, 2'-O-methylnebularine or deoxynebularine
  modified_base 102: mod_base = OTHER; note = uniform ribonucleotides (A, C, G, inosine or U), deoxynucleotides (A, G, C, inosine or T), ribonebularine, 2'-O-methylnebularine or deoxynebularine
  modified_base 103: mod_base = OTHER; note = uniform ribonucleotides (A, C, G, inosine or U), deoxynucleotides (A, G, C, inosine or T), ribonebularine, 2'-O-methylnebularine or deoxynebularine
  modified_base 1..4: mod_base = OTHER; note = phosphorothioate linkage
  modified_base 25..26: mod_base = OTHER; note = phosphorothioate linkage
  modified_base 45..46: mod_base = OTHER; note = phosphorothioate linkage
  modified_base 64..65: mod_base = OTHER; note = phosphorothioate linkage
  modified_base 97..100: mod_base = OTHER; note = phosphorothioate linkage
  misc_feature 1..100: note = RNA
  misc_feature 101..103: note = Optionally DNA or RNA

SEQ ID NO: 1820 - DNA, 103 bp, synthetic construct; identical to SEQ ID NO: 1797
  source 1..103: mol_type = other DNA
  modified_base 1: mod_base = OTHER; note = 2'-O-methyl ribonucleotide
  modified_base 2: mod_base = OTHER; note = 2'-O-methyl ribonucleotide
  modified_base 3: mod_base = OTHER; note = 2'-O-methyl ribonucleotide
  modified_base 21: mod_base = OTHER; note = 2'-O-methyl ribonucleotide
  modified_base 28: mod_base = OTHER; note = 2'-O-methyl ribonucleotide
  modified_base 29: mod_base = OTHER; note = 2'-O-methyl ribonucleotide
  modified_base 30: mod_base = OTHER; note = 2'-O-methyl ribonucleotide
  modified_base 31: mod_base = OTHER; note = 2'-O-methyl ribonucleotide
  modified_base 32: mod_base = OTHER; note = 2'-O-methyl ribonucleotide
  modified_base 34: mod_base = OTHER; note = 2'-O-methyl ribonucleotide
  modified_base 35: mod_base = OTHER; note = 2'-O-methyl ribonucleotide
  modified_base 36: mod_base = OTHER; note = 2'-O-methyl ribonucleotide
  modified_base 37: mod_base = OTHER; note = 2'-O-methyl ribonucleotide
  modified_base 38: mod_base = OTHER; note = 2'-O-methyl ribonucleotide
  modified_base 39: mod_base = OTHER; note = 2'-O-methyl ribonucleotide
  modified_base 40: mod_base = OTHER; note = 2'-O-methyl ribonucleotide
  modified_base 41: mod_base = OTHER; note = 2'-O-methyl ribonucleotide
  modified_base 42: mod_base = OTHER; note = 2'-O-methyl ribonucleotide
  modified_base 46: mod_base = OTHER; note = 2'-O-methyl ribonucleotide
  modified_base 48: mod_base = OTHER; note = 2'-O-methyl ribonucleotide
  modified_base 50: mod_base = OTHER; note = 2'-O-methyl ribonucleotide
  modified_base 52: mod_base = OTHER; note = 2'-O-methyl ribonucleotide
  modified_base 53: mod_base = OTHER; note = 2'-O-methyl ribonucleotide
  modified_base 54: mod_base = OTHER; note = 2'-O-methyl ribonucleotide
  modified_base 55: mod_base = OTHER; note = 2'-O-methyl ribonucleotide
  modified_base 56: mod_base = OTHER; note = 2'-O-methyl ribonucleotide
  modified_base 57: mod_base = OTHER; note = 2'-O-methyl ribonucleotide
  modified_base 60: mod_base = OTHER; note = 2'-O-methyl ribonucleotide
  modified_base 61: mod_base = OTHER; note = 2'-O-methyl ribonucleotide
  modified_base 66: mod_base = OTHER; note = 2'-O-methyl ribonucleotide
  modified_base 67: mod_base = OTHER; note = 2'-O-methyl ribonucleotide
  modified_base 70: mod_base = OTHER; note = 2'-O-methyl ribonucleotide
  modified_base 71: mod_base = OTHER; note = 2'-O-methyl ribonucleotide
  modified_base 72: mod_base = OTHER; note = 2'-O-methyl ribonucleotide
  modified_base 74: mod_base = OTHER; note = 2'-O-methyl ribonucleotide
  modified_base 75: mod_base = OTHER; note = 2'-O-methyl ribonucleotide
  modified_base 76: mod_base = OTHER; note = 2'-O-methyl ribonucleotide
  modified_base 77: mod_base = OTHER; note = 2'-O-methyl ribonucleotide
  modified_base 78: mod_base = OTHER; note = 2'-O-methyl ribonucleotide
  modified_base 79: mod_base = OTHER; note = 2'-O-methyl ribonucleotide
  modified_base 80: mod_base = OTHER; note = 2'-O-methyl ribonucleotide
  modified_base 81: mod_base = OTHER; note = 2'-O-methyl ribonucleotide
  modified_base 83: mod_base = OTHER; note = 2'-O-methyl ribonucleotide
  modified_base 84: mod_base = OTHER; note = 2'-O-methyl ribonucleotide
  modified_base 85: mod_base = OTHER; note = 2'-O-methyl ribonucleotide
  modified_base 86: mod_base = OTHER; note = 2'-O-methyl ribonucleotide
  modified_base 87: mod_base = OTHER; note = 2'-O-methyl ribonucleotide
  modified_base 88: mod_base = OTHER; note = 2'-O-methyl ribonucleotide
  modified_base 89: mod_base = OTHER; note = 2'-O-methyl ribonucleotide
  modified_base 90: mod_base = OTHER; note = 2'-O-methyl ribonucleotide
  modified_base 91: mod_base = OTHER; note = 2'-O-methyl ribonucleotide
  modified_base 92: mod_base = OTHER; note = 2'-O-methyl ribonucleotide
  modified_base 93: mod_base = OTHER; note = 2'-O-methyl ribonucleotide
  modified_base 94: mod_base = OTHER; note = 2'-O-methyl ribonucleotide
  modified_base 95: mod_base = OTHER; note = 2'-O-methyl ribonucleotide
  modified_base 96: mod_base = OTHER; note = 2'-O-methyl ribonucleotide
  modified_base 97: mod_base = OTHER; note = 2'-O-methyl ribonucleotide
  modified_base 98: mod_base = OTHER; note = 2'-O-methyl ribonucleotide
  modified_base 99: mod_base = OTHER; note = 2'-O-methyl ribonucleotide
  modified_base 100: mod_base = OTHER; note = 2'-O-methyl ribonucleotide
  modified_base 101: mod_base = OTHER; note = uniform ribonucleotides (A, C, G, inosine or U), deoxynucleotides (A, G, C, inosine or T), ribonebularine, 2'-O-methylnebularine or deoxynebularine
  modified_base 102: mod_base = OTHER; note = uniform ribonucleotides (A, C, G, inosine or U), deoxynucleotides (A, G, C, inosine or T), ribonebularine, 2'-O-methylnebularine or deoxynebularine
  modified_base 103: mod_base = OTHER; note = uniform ribonucleotides (A, C, G, inosine or U), deoxynucleotides (A, G, C, inosine or T), ribonebularine, 2'-O-methylnebularine or deoxynebularine
  modified_base 1..4: mod_base = OTHER; note = phosphorothioate linkage
  modified_base 25..26: mod_base = OTHER; note = phosphorothioate linkage
  modified_base 45..46: mod_base = OTHER; note = phosphorothioate linkage
  modified_base 64..65: mod_base = OTHER; note = phosphorothioate linkage
  modified_base 97..100: mod_base = OTHER; note = phosphorothioate linkage
  misc_feature 1..100: note = RNA
  misc_feature 101..103: note = Optionally DNA or RNA

SEQ ID NO: 1821 - DNA, 103 bp, synthetic construct; identical to SEQ ID NO: 1797
  source 1..103: mol_type = other DNA
  modified_base 1: mod_base = OTHER; note = 2'-O-methyl ribonucleotide
  modified_base 2: mod_base = OTHER; note = 2'-O-methyl ribonucleotide
  modified_base 3: mod_base = OTHER; note = 2'-O-methyl ribonucleotide
  modified_base 21: mod_base = OTHER; note = 2'-O-methyl ribonucleotide
  modified_base 28: mod_base = OTHER; note = 2'-O-methyl ribonucleotide
  modified_base 29: mod_base = OTHER; note = 2'-O-methyl ribonucleotide
  modified_base 30: mod_base = OTHER; note = 2'-O-methyl ribonucleotide
  modified_base 31: mod_base = OTHER; note = 2'-O-methyl ribonucleotide
  modified_base 32: mod_base = OTHER; note = 2'-O-methyl ribonucleotide
  modified_base 34: mod_base = OTHER; note = 2'-O-methyl ribonucleotide
  modified_base 35: mod_base = OTHER; note = 2'-O-methyl ribonucleotide
  modified_base 36: mod_base = OTHER; note = 2'-O-methyl ribonucleotide
  modified_base 37: mod_base = OTHER; note = 2'-O-methyl ribonucleotide
  modified_base 38: mod_base = OTHER; note = 2'-O-methyl ribonucleotide
  modified_base 39: mod_base = OTHER; note = 2'-O-methyl ribonucleotide
  modified_base 40: mod_base = OTHER; note = 2'-O-methyl ribonucleotide
  modified_base 41: mod_base = OTHER; note = 2'-O-methyl ribonucleotide
  modified_base 42: mod_base = OTHER; note = 2'-O-methyl ribonucleotide
  modified_base 46: mod_base = OTHER; note = 2'-O-methyl ribonucleotide
  modified_base 48: mod_base = OTHER; note = 2'-O-methyl ribonucleotide
  modified_base 50: mod_base = OTHER; note = 2'-O-methyl ribonucleotide
  modified_base 52: mod_base = OTHER; note = 2'-O-methyl ribonucleotide
  modified_base 53: mod_base = OTHER; note = 2'-O-methyl ribonucleotide
  modified_base 54: mod_base = OTHER; note = 2'-O-methyl ribonucleotide
  modified_base 57: mod_base = OTHER; note = 2'-O-methyl ribonucleotide
  modified_base 61: mod_base = OTHER; note = 2'-O-methyl ribonucleotide
  modified_base 66: mod_base = OTHER; note = 2'-O-methyl ribonucleotide
  modified_base 67: mod_base = OTHER; note = 2'-O-methyl ribonucleotide
  modified_base 70: mod_base = OTHER; note = 2'-O-methyl ribonucleotide
  modified_base 71: mod_base = OTHER; note = 2'-O-methyl ribonucleotide
  modified_base 72: mod_base = OTHER; note = 2'-O-methyl ribonucleotide
  modified_base 74: mod_base = OTHER; note = 2'-O-methyl ribonucleotide
  modified_base 75: mod_base = OTHER; note = 2'-O-methyl ribonucleotide
  modified_base 76: mod_base = OTHER; note = 2'-O-methyl ribonucleotide
  modified_base 77: mod_base = OTHER; note = 2'-O-methyl ribonucleotide
  modified_base 78: mod_base = OTHER; note = 2'-O-methyl ribonucleotide
  modified_base 79: mod_base = OTHER; note = 2'-O-methyl ribonucleotide
  modified_base 80: mod_base = OTHER; note = 2'-O-methyl ribonucleotide
  modified_base 82: mod_base = OTHER; note = 2'-O-methyl ribonucleotide
  modified_base 83: mod_base = OTHER; note = 2'-O-methyl ribonucleotide
  modified_base 84: mod_base = OTHER; note = 2'-O-methyl ribonucleotide
  modified_base 85: mod_base = OTHER; note = 2'-O-methyl ribonucleotide
  modified_base 86: mod_base = OTHER; note = 2'-O-methyl ribonucleotide
  modified_base 87: mod_base = OTHER; note = 2'-O-methyl ribonucleotide
  modified_base 89: mod_base = OTHER; note = 2'-O-methyl ribonucleotide
  modified_base 92: mod_base = OTHER; note = 2'-O-methyl ribonucleotide
  modified_base 93: mod_base = OTHER; note = 2'-O-methyl ribonucleotide
  modified_base 94: mod_base = OTHER; note = 2'-O-methyl ribonucleotide
  modified_base 95: mod_base = OTHER; note = 2'-O-methyl ribonucleotide
  modified_base 96: mod_base = OTHER; note = 2'-O-methyl ribonucleotide
  modified_base 97: mod_base = OTHER; note = 2'-O-methyl ribonucleotide
  modified_base 98: mod_base = OTHER; note = 2'-O-methyl ribonucleotide
  modified_base 99: mod_base = OTHER; note = 2'-O-methyl ribonucleotide
  modified_base 100: mod_base = OTHER; note = 2'-O-methyl ribonucleotide
  modified_base 101: mod_base = OTHER; note = uniform ribonucleotides (A, C, G, inosine or U), deoxynucleotides (A, G, C, inosine or T), ribonebularine, 2'-O-methylnebularine or deoxynebularine
  modified_base 102: mod_base = OTHER; note = uniform ribonucleotides (A, C, G, inosine or U), deoxynucleotides (A, G, C, inosine or T), ribonebularine, 2'-O-methylnebularine or deoxynebularine
  modified_base 103: mod_base = OTHER; note = uniform ribonucleotides (A, C, G, inosine or U), deoxynucleotides (A, G, C, inosine or T), ribonebularine, 2'-O-methylnebularine or deoxynebularine
  modified_base 1..3: mod_base = OTHER; note = phosphorothioate linkage
  modified_base 97..100: mod_base = OTHER; note = phosphorothioate linkage
  misc_feature 1..100: note = RNA
  misc_feature 101..103: note = Optionally DNA or RNA

SEQ ID NO: 1822 - DNA, 103 bp, synthetic construct; identical to SEQ ID NO: 1795
  source 1..103: mol_type = other DNA
  modified_base 1: mod_base = OTHER; note = 2'-O-methyl ribonucleotide
  modified_base 2: mod_base = OTHER; note = 2'-O-methyl ribonucleotide
  modified_base 3: mod_base = OTHER; note = 2'-O-methyl ribonucleotide
  modified_base 21: mod_base = OTHER; note = 2'-O-methyl ribonucleotide
  modified_base 28: mod_base = OTHER; note = 2'-O-methyl ribonucleotide
  modified_base 29: mod_base = OTHER; note = 2'-O-methyl ribonucleotide
  modified_base 30: mod_base = OTHER; note = 2'-O-methyl ribonucleotide
  modified_base 31: mod_base = OTHER; note = 2'-O-methyl ribonucleotide
  modified_base 32: mod_base = OTHER; note = 2'-O-methyl ribonucleotide
  modified_base 34: mod_base = OTHER; note = 2'-O-methyl ribonucleotide
  modified_base 35: mod_base = OTHER; note = 2'-O-methyl ribonucleotide
  modified_base 36: mod_base = OTHER; note = 2'-O-methyl ribonucleotide
  modified_base 37: mod_base = OTHER; note = 2'-O-methyl ribonucleotide
  modified_base 38: mod_base = OTHER; note = 2'-O-methyl ribonucleotide
  modified_base 39: mod_base = OTHER; note = 2'-O-methyl ribonucleotide
  modified_base 40: mod_base = OTHER; note = 2'-O-methyl ribonucleotide
  modified_base 41: mod_base = OTHER; note = 2'-O-methyl ribonucleotide
  modified_base 42: mod_base = OTHER; note = 2'-O-methyl ribonucleotide
  modified_base 46: mod_base = OTHER; note = 2'-O-methyl ribonucleotide
  modified_base 48: mod_base = OTHER; note = 2'-O-methyl ribonucleotide
  modified_base 50: mod_base = OTHER; note = 2'-O-methyl ribonucleotide
  modified_base 52: mod_base = OTHER; note = 2'-O-methyl ribonucleotide
  modified_base 53: mod_base = OTHER; note = 2'-O-methyl ribonucleotide
  modified_base 54: mod_base = OTHER; note = 2'-O-methyl ribonucleotide
  modified_base 57: mod_base = OTHER; note = 2'-O-methyl ribonucleotide
  modified_base 61: mod_base = OTHER; note = 2'-O-methyl ribonucleotide
  modified_base 66: mod_base = OTHER; note = 2'-O-methyl ribonucleotide
  modified_base 67: mod_base = OTHER; note = 2'-O-methyl ribonucleotide
  modified_base 70: mod_base = OTHER; note = 2'-O-methyl ribonucleotide
  modified_base 71: mod_base = OTHER; note = 2'-O-methyl ribonucleotide
  modified_base 72: mod_base = OTHER; note = 2'-O-methyl ribonucleotide
  modified_base 74: mod_base = OTHER; note = 2'-O-methyl ribonucleotide
  modified_base 75: mod_base = OTHER; note = 2'-O-methyl ribonucleotide
  modified_base 76: mod_base = OTHER; note = 2'-O-methyl ribonucleotide
  modified_base 77: mod_base = OTHER; note = 2'-O-methyl ribonucleotide
  modified_base 78: mod_base = OTHER; note = 2'-O-methyl ribonucleotide
  modified_base 79: mod_base = OTHER; note = 2'-O-methyl ribonucleotide
  modified_base 80: mod_base = OTHER; note = 2'-O-methyl ribonucleotide
  modified_base 82: mod_base = OTHER; note = 2'-O-methyl ribonucleotide
  modified_base 83: mod_base = OTHER; note = 2'-O-methyl ribonucleotide
  modified_base 84: mod_base = OTHER; note = 2'-O-methyl ribonucleotide
  modified_base 85: mod_base = OTHER; note = 2'-O-methyl ribonucleotide
  modified_base 86: mod_base = OTHER; note = 2'-O-methyl ribonucleotide
  modified_base 87: mod_base = OTHER; note = 2'-O-methyl ribonucleotide
  modified_base 89: mod_base = OTHER; note = 2'-O-methyl ribonucleotide
  modified_base 92: mod_base = OTHER; note = 2'-O-methyl ribonucleotide
  modified_base 93: mod_base = OTHER; note = 2'-O-methyl ribonucleotide
  modified_base 94: mod_base = OTHER; note = 2'-O-methyl ribonucleotide
  modified_base 95: mod_base = OTHER; note = 2'-O-methyl ribonucleotide
  modified_base 96: mod_base = OTHER; note = 2'-O-methyl ribonucleotide
  modified_base 97: mod_base = OTHER; note = 2'-O-methyl ribonucleotide
  modified_base 98: mod_base = OTHER; note = 2'-O-methyl ribonucleotide
  modified_base 99: mod_base = OTHER; note = 2'-O-methyl ribonucleotide
  modified_base 100: mod_base = OTHER; note = 2'-O-methyl ribonucleotide
  modified_base 101: mod_base = OTHER; note = uniform ribonucleotides (A, C, G, inosine or U), deoxynucleotides (A, G, C, inosine or T), ribonebularine, 2'-O-methylnebularine or deoxynebularine
  modified_base 102: mod_base = OTHER; note = uniform ribonucleotides (A, C, G, inosine or U), deoxynucleotides (A, G, C, inosine or T), ribonebularine, 2'-O-methylnebularine or deoxynebularine
  modified_base 103: mod_base = OTHER; note = uniform ribonucleotides (A, C, G, inosine or U), deoxynucleotides (A, G, C, inosine or T), ribonebularine, 2'-O-methylnebularine or deoxynebularine
  modified_base 1..3: mod_base = OTHER; note = phosphorothioate linkage
  modified_base 97..100: mod_base = OTHER; note = phosphorothioate linkage
  misc_feature 1..100: note = RNA
  misc_feature 101..103: note = Optionally DNA or RNA

SEQ ID NO: 1823 - DNA, 103 bp, synthetic construct; identical to SEQ ID NO: 1796
  source 1..103: mol_type = other DNA
  modified_base 1: mod_base = OTHER; note = 2'-O-methyl ribonucleotide
  modified_base 2: mod_base = OTHER; note = 2'-O-methyl ribonucleotide
  modified_base 3: mod_base = OTHER; note = 2'-O-methyl ribonucleotide
  modified_base 21: mod_base = OTHER; note = 2'-O-methyl ribonucleotide
  modified_base 28: mod_base = OTHER; note = 2'-O-methyl ribonucleotide
  modified_base 29: mod_base = OTHER; note = 2'-O-methyl ribonucleotide
  modified_base 30: mod_base = OTHER; note = 2'-O-methyl ribonucleotide
  modified_base 31: mod_base = OTHER; note = 2'-O-methyl ribonucleotide
  modified_base 32: mod_base = OTHER; note = 2'-O-methyl ribonucleotide
  modified_base 34: mod_base = OTHER; note = 2'-O-methyl ribonucleotide
  modified_base 35: mod_base = OTHER; note = 2'-O-methyl ribonucleotide
  modified_base 36: mod_base = OTHER; note = 2'-O-methyl ribonucleotide
  modified_base 37: mod_base = OTHER; note = 2'-O-methyl ribonucleotide
  modified_base 38: mod_base = OTHER; note = 2'-O-methyl ribonucleotide
  modified_base 39: mod_base = OTHER; note = 2'-O-methyl ribonucleotide
  modified_base 40: mod_base = OTHER; note = 2'-O-methyl ribonucleotide
  modified_base 41: mod_base = OTHER; note = 2'-O-methyl ribonucleotide
  modified_base 42: mod_base = OTHER; note = 2'-O-methyl ribonucleotide
  modified_base 46: mod_base = OTHER; note = 2'-O-methyl ribonucleotide
  modified_base 48: mod_base = OTHER; note = 2'-O-methyl ribonucleotide
  modified_base 50: mod_base = OTHER; note = 2'-O-methyl ribonucleotide
  modified_base 52: mod_base = OTHER; note = 2'-O-methyl ribonucleotide
  modified_base 53: mod_base = OTHER; note = 2'-O-methyl ribonucleotide
  modified_base 54: mod_base = OTHER; note = 2'-O-methyl ribonucleotide
  modified_base 57: mod_base = OTHER; note = 2'-O-methyl ribonucleotide
  modified_base 61: mod_base = OTHER; note = 2'-O-methyl ribonucleotide
  modified_base 66: mod_base = OTHER; note = 2'-O-methyl ribonucleotide
  modified_base 67: mod_base = OTHER; note = 2'-O-methyl ribonucleotide
  modified_base 70: mod_base = OTHER; note = 2'-O-methyl ribonucleotide
  modified_base 71: mod_base = OTHER; note = 2'-O-methyl ribonucleotide
  modified_base 72: mod_base = OTHER; note = 2'-O-methyl ribonucleotide
  modified_base 74: mod_base = OTHER; note = 2'-O-methyl ribonucleotide
  modified_base 75: mod_base = OTHER; note = 2'-O-methyl ribonucleotide
  modified_base 76: mod_base = OTHER; note = 2'-O-methyl ribonucleotide
  modified_base 77: mod_base = OTHER; note = 2'-O-methyl ribonucleotide
  modified_base 78: mod_base = OTHER; note = 2'-O-methyl ribonucleotide
  modified_base 79: mod_base = OTHER; note = 2'-O-methyl ribonucleotide
  modified_base 80: mod_base = OTHER; note = 2'-O-methyl ribonucleotide
  modified_base 82: mod_base = OTHER; note = 2'-O-methyl ribonucleotide
  modified_base 83: mod_base = OTHER; note = 2'-O-methyl ribonucleotide
  modified_base 84: mod_base = OTHER; note = 2'-O-methyl ribonucleotide
  modified_base 85: mod_base = OTHER; note = 2'-O-methyl ribonucleotide
  modified_base 86: mod_base = OTHER; note = 2'-O-methyl ribonucleotide
  modified_base 87: mod_base = OTHER; note = 2'-O-methyl ribonucleotide
  modified_base 89: mod_base = OTHER; note = 2'-O-methyl ribonucleotide
  modified_base 92: mod_base = OTHER; note = 2'-O-methyl ribonucleotide
  modified_base 93: mod_base = OTHER; note = 2'-O-methyl ribonucleotide
  modified_base 94: mod_base = OTHER; note = 2'-O-methyl ribonucleotide
  modified_base 95: mod_base = OTHER; note = 2'-O-methyl ribonucleotide
  modified_base 96: mod_base = OTHER; note = 2'-O-methyl ribonucleotide
  modified_base 97: mod_base = OTHER; note = 2'-O-methyl ribonucleotide
  modified_base 98: mod_base = OTHER; note = 2'-O-methyl ribonucleotide
  modified_base 99: mod_base = OTHER; note = 2'-O-methyl ribonucleotide
  modified_base 100: mod_base = OTHER; note = 2'-O-methyl ribonucleotide
  modified_base 101: mod_base = OTHER; note = uniform ribonucleotides (A, C, G, inosine or U), deoxynucleotides (A, G, C, inosine or T), ribonebularine, 2'-O-methylnebularine or deoxynebularine
  modified_base 102: mod_base = OTHER; note = uniform ribonucleotides (A, C, G, inosine or U), deoxynucleotides (A, G, C, inosine or T), ribonebularine, 2'-O-methylnebularine or deoxynebularine
  modified_base 103: mod_base = OTHER; note = uniform ribonucleotides (A, C, G, inosine or U), deoxynucleotides (A, G, C, inosine or T), ribonebularine, 2'-O-methylnebularine or deoxynebularine
  modified_base 1..3: mod_base = OTHER; note = phosphorothioate linkage
  modified_base 97..100: mod_base = OTHER; note = phosphorothioate linkage
  misc_feature 1..100: note = RNA
  misc_feature 101..103: note = Optionally DNA or RNA

SEQ ID NO: 1824 - DNA, 103 bp, synthetic construct; identical to SEQ ID NO: 1795
  source 1..103: mol_type = other DNA
  modified_base 1: mod_base = OTHER; note = 2'-O-methyl ribonucleotide
  modified_base 2: mod_base = OTHER; note = 2'-O-methyl ribonucleotide
  modified_base 3: mod_base = OTHER; note = 2'-O-methyl ribonucleotide
  modified_base 21: mod_base = OTHER; note = 2'-O-methyl ribonucleotide
  modified_base 28: mod_base = OTHER; note = 2'-O-methyl ribonucleotide
  modified_base 29: mod_base = OTHER; note = 2'-O-methyl ribonucleotide
  modified_base 30: mod_base = OTHER; note = 2'-O-methyl ribonucleotide
  modified_base 31: mod_base = OTHER; note = 2'-O-methyl ribonucleotide
  modified_base 32: mod_base = OTHER; note = 2'-O-methyl ribonucleotide
  modified_base 34: mod_base = OTHER; note = 2'-O-methyl ribonucleotide
  modified_base 35: mod_base = OTHER; note = 2'-O-methyl ribonucleotide
  modified_base 36: mod_base = OTHER; note = 2'-O-methyl ribonucleotide
  modified_base 37: mod_base = OTHER; note = 2'-O-methyl ribonucleotide
  modified_base 38: mod_base = OTHER; note = 2'-O-methyl ribonucleotide
  modified_base 39: mod_base = OTHER; note = 2'-O-methyl ribonucleotide
  modified_base 40: mod_base = OTHER; note = 2'-O-methyl ribonucleotide
  modified_base 41: mod_base = OTHER; note = 2'-O-methyl ribonucleotide
  modified_base 42: mod_base = OTHER; note = 2'-O-methyl ribonucleotide
  modified_base 46: mod_base = OTHER; note = 2'-O-methyl ribonucleotide
  modified_base 48: mod_base = OTHER; note = 2'-O-methyl ribonucleotide
  modified_base 50: mod_base = OTHER; note = 2'-O-methyl ribonucleotide
  modified_base 52: mod_base = OTHER; note = 2'-O-methyl ribonucleotide
  modified_base 53: mod_base = OTHER; note = 2'-O-methyl ribonucleotide
  modified_base 54: mod_base = OTHER; note = 2'-O-methyl ribonucleotide
  modified_base 57: mod_base = OTHER; note = 2'-O-methyl ribonucleotide
  modified_base 61: mod_base = OTHER; note = 2'-O-methyl ribonucleotide
  modified_base 66: mod_base = OTHER; note = 2'-O-methyl ribonucleotide
  modified_base 67: mod_base = OTHER; note = 2'-O-methyl ribonucleotide
  modified_base 70: mod_base = OTHER; note = 2'-O-methyl ribonucleotide
  modified_base 71: mod_base = OTHER; note = 2'-O-methyl ribonucleotide
  modified_base 72: mod_base = OTHER; note = 2'-O-methyl ribonucleotide
  modified_base 74: mod_base = OTHER; note = 2'-O-methyl ribonucleotide
  modified_base 75: mod_base = OTHER; note = 2'-O-methyl ribonucleotide
  modified_base 76: mod_base = OTHER; note = 2'-O-methyl ribonucleotide
  modified_base 77: mod_base = OTHER; note = 2'-O-methyl ribonucleotide
  modified_base 78: mod_base = OTHER; note = 2'-O-methyl ribonucleotide
  modified_base 79: mod_base = OTHER; note = 2'-O-methyl ribonucleotide
  modified_base 80: mod_base = OTHER; note = 2'-O-methyl ribonucleotide
  modified_base 82: mod_base = OTHER; note = 2'-O-methyl ribonucleotide
  modified_base 83: mod_base = OTHER; note = 2'-O-methyl ribonucleotide
  modified_base 84: mod_base = OTHER; note = 2'-O-methyl ribonucleotide
  modified_base 85: mod_base = OTHER; note = 2'-O-methyl ribonucleotide
  modified_base 86: mod_base = OTHER; note = 2'-O-methyl ribonucleotide
  modified_base 87: mod_base = OTHER; note = 2'-O-methyl ribonucleotide
  modified_base 89: mod_base = OTHER; note = 2'-O-methyl ribonucleotide
  modified_base 92: mod_base = OTHER; note = 2'-O-methyl ribonucleotide
  modified_base 93: mod_base = OTHER; note = 2'-O-methyl ribonucleotide
  modified_base 94: mod_base = OTHER; note = 2'-O-methyl ribonucleotide
  modified_base 95: mod_base = OTHER; note = 2'-O-methyl ribonucleotide
  modified_base 96: mod_base = OTHER; note = 2'-O-methyl ribonucleotide
  modified_base 97: mod_base = OTHER; note = 2'-O-methyl ribonucleotide
  modified_base 98: mod_base = OTHER; note = 2'-O-methyl ribonucleotide
  modified_base 99: mod_base = OTHER; note = 2'-O-methyl ribonucleotide
  modified_base 100: mod_base = OTHER; note = 2'-O-methyl ribonucleotide
  modified_base 101: mod_base = OTHER; note = uniform ribonucleotides (A, C, G, inosine or U), deoxynucleotides (A, G, C, inosine or T), ribonebularine, 2'-O-methylnebularine or deoxynebularine
  modified_base 102: mod_base = OTHER; note = uniform ribonucleotides (A, C, G, inosine or U), deoxynucleotides (A, G, C, inosine or T), ribonebularine, 2'-O-methylnebularine or deoxynebularine
  modified_base 103: mod_base = OTHER; note = uniform ribonucleotides (A, C, G, inosine or U), deoxynucleotides (A, G, C, inosine or T), ribonebularine, 2'-O-methylnebularine or deoxynebularine
  modified_base 1..3: mod_base = OTHER; note = phosphorothioate linkage
  modified_base 64..65: mod_base = OTHER; note = phosphorothioate linkage
  modified_base 97..100: mod_base = OTHER; note = phosphorothioate linkage
  misc_feature 1..100: note = RNA
  misc_feature 101..103: note = Optionally DNA or RNA

SEQ ID NO: 1825 - DNA, 103 bp, synthetic construct; identical to SEQ ID NO: 1796
  source 1..103: mol_type = other DNA
  modified_base 1: mod_base = OTHER; note = 2'-O-methyl ribonucleotide
  modified_base 2: mod_base = OTHER; note = 2'-O-methyl ribonucleotide
  modified_base 3: mod_base = OTHER; note = 2'-O-methyl ribonucleotide
  modified_base 21: mod_base = OTHER; note = 2'-O-methyl ribonucleotide
  modified_base 28: mod_base = OTHER; note = 2'-O-methyl ribonucleotide
  modified_base 29: mod_base = OTHER; note = 2'-O-methyl ribonucleotide
  modified_base 30: mod_base = OTHER; note = 2'-O-methyl ribonucleotide
  modified_base 31: mod_base = OTHER; note = 2'-O-methyl ribonucleotide
  modified_base 32: mod_base = OTHER; note = 2'-O-methyl ribonucleotide
  modified_base 34: mod_base = OTHER; note = 2'-O-methyl ribonucleotide
  modified_base 35: mod_base = OTHER; note = 2'-O-methyl ribonucleotide
  modified_base 36: mod_base = OTHER; note = 2'-O-methyl ribonucleotide
  modified_base 37: mod_base = OTHER; note = 2'-O-methyl ribonucleotide
  modified_base 38: mod_base = OTHER; note = 2'-O-methyl ribonucleotide
  modified_base 39: mod_base = OTHER; note = 2'-O-methyl ribonucleotide
  modified_base 40: mod_base = OTHER; note = 2'-O-methyl ribonucleotide
  modified_base 41: mod_base = OTHER; note = 2'-O-methyl ribonucleotide
  modified_base 42: mod_base = OTHER; note = 2'-O-methyl ribonucleotide
  modified_base 46: mod_base = OTHER; note = 2'-O-methyl ribonucleotide
  modified_base 48: mod_base = OTHER; note = 2'-O-methyl ribonucleotide
  modified_base 50: mod_base = OTHER; note = 2'-O-methyl ribonucleotide
  modified_base 52: mod_base = OTHER; note = 2'-O-methyl ribonucleotide
  modified_base 53: mod_base = OTHER; note = 2'-O-methyl ribonucleotide
  modified_base 54: mod_base = OTHER; note = 2'-O-methyl ribonucleotide
  modified_base 57: mod_base = OTHER; note = 2'-O-methyl ribonucleotide
  modified_base 61: mod_base = OTHER; note = 2'-O-methyl ribonucleotide
  modified_base 66: mod_base = OTHER; note = 2'-O-methyl ribonucleotide
  modified_base 67: mod_base = OTHER; note = 2'-O-methyl ribonucleotide
  modified_base 70: mod_base = OTHER; note = 2'-O-methyl ribonucleotide
  modified_base 71: mod_base = OTHER; note = 2'-O-methyl ribonucleotide
  modified_base 72: mod_base = OTHER; note = 2'-O-methyl ribonucleotide
  modified_base 74: mod_base = OTHER; note = 2'-O-methyl ribonucleotide
  modified_base 75: mod_base = OTHER; note = 2'-O-methyl ribonucleotide
  modified_base 76: mod_base = OTHER; note = 2'-O-methyl ribonucleotide
  modified_base 77: mod_base = OTHER; note = 2'-O-methyl ribonucleotide
  modified_base 78: mod_base = OTHER; note = 2'-O-methyl ribonucleotide
  modified_base 79: mod_base = OTHER; note = 2'-O-methyl ribonucleotide
  modified_base 80: mod_base = OTHER; note = 2'-O-methyl ribonucleotide
  modified_base 82: mod_base = OTHER; note = 2'-O-methyl ribonucleotide
  modified_base 83: mod_base = OTHER; note = 2'-O-methyl ribonucleotide
  modified_base 84: mod_base = OTHER; note = 2'-O-methyl ribonucleotide
  modified_base 85: mod_base = OTHER; note = 2'-O-methyl ribonucleotide
  modified_base 86: mod_base = OTHER; note = 2'-O-methyl ribonucleotide
  modified_base 87: mod_base = OTHER; note = 2'-O-methyl ribonucleotide
  modified_base 89: mod_base = OTHER; note = 2'-O-methyl ribonucleotide
  modified_base 92: mod_base = OTHER; note = 2'-O-methyl ribonucleotide
  modified_base 93: mod_base = OTHER; note = 2'-O-methyl ribonucleotide
  modified_base 94: mod_base = OTHER; note = 2'-O-methyl ribonucleotide
  modified_base 95: mod_base = OTHER; note = 2'-O-methyl ribonucleotide
  modified_base 96: mod_base = OTHER; note = 2'-O-methyl ribonucleotide
  modified_base 97: mod_base = OTHER; note = 2'-O-methyl ribonucleotide
  modified_base 98: mod_base = OTHER; note = 2'-O-methyl ribonucleotide
  modified_base 99: mod_base = OTHER; note = 2'-O-methyl ribonucleotide
  modified_base 100: mod_base = OTHER; note = 2'-O-methyl ribonucleotide
  modified_base 101: mod_base = OTHER; note = uniform ribonucleotides (A, C, G, inosine or U), deoxynucleotides (A, G, C, inosine or T), ribonebularine, 2'-O-methylnebularine or deoxynebularine
  modified_base 102: mod_base = OTHER; note = uniform ribonucleotides (A, C, G, inosine or U), deoxynucleotides (A, G, C, inosine or T), ribonebularine, 2'-O-methylnebularine or deoxynebularine
  modified_base 103: mod_base = OTHER; note = uniform ribonucleotides (A, C, G, inosine or U), deoxynucleotides (A, G, C, inosine or T), ribonebularine, 2'-O-methylnebularine or deoxynebularine
  modified_base 1..3: mod_base = OTHER; note = phosphorothioate linkage
  modified_base 64..65: mod_base = OTHER; note = phosphorothioate linkage
  modified_base 97..100: mod_base = OTHER; note = phosphorothioate linkage
  misc_feature 1..100: note = RNA
  misc_feature 101..103: note = Optionally DNA or RNA

SEQ ID NO: 1826 - DNA, 103 bp, synthetic construct; identical to SEQ ID NO: 1797
  source 1..103: mol_type = other DNA
  modified_base 1: mod_base = OTHER; note = 2'-O-methyl ribonucleotide
  modified_base 2: mod_base = OTHER; note = 2'-O-methyl ribonucleotide
  modified_base 3: mod_base = OTHER; note = 2'-O-methyl ribonucleotide
  modified_base 21: mod_base = OTHER; note = 2'-O-methyl ribonucleotide
  modified_base 28: mod_base = OTHER; note = 2'-O-methyl ribonucleotide
  modified_base 29: mod_base = OTHER; note = 2'-O-methyl ribonucleotide
  modified_base 30: mod_base = OTHER; note = 2'-O-methyl ribonucleotide
  modified_base 31: mod_base = OTHER; note = 2'-O-methyl ribonucleotide
  modified_base 32: mod_base = OTHER; note = 2'-O-methyl ribonucleotide
  modified_base 34: mod_base = OTHER; note = 2'-O-methyl ribonucleotide
  modified_base 35: mod_base = OTHER; note = 2'-O-methyl ribonucleotide
  modified_base 36: mod_base = OTHER; note = 2'-O-methyl ribonucleotide
  modified_base 37: mod_base = OTHER; note = 2'-O-methyl ribonucleotide
  modified_base 38: mod_base = OTHER; note = 2'-O-methyl ribonucleotide
  modified_base 39: mod_base = OTHER; note = 2'-O-methyl ribonucleotide
  modified_base 40: mod_base = OTHER; note = 2'-O-methyl ribonucleotide
  modified_base 41: mod_base = OTHER; note = 2'-O-methyl ribonucleotide
  modified_base 42: mod_base = OTHER; note = 2'-O-methyl ribonucleotide
  modified_base 46: mod_base = OTHER; note = 2'-O-methyl ribonucleotide
  modified_base 48: mod_base = OTHER; note = 2'-O-methyl ribonucleotide
  modified_base 50: mod_base = OTHER; note = 2'-O-methyl ribonucleotide
  modified_base 52: mod_base = OTHER; note = 2'-O-methyl ribonucleotide
  modified_base 53: mod_base = OTHER; note = 2'-O-methyl ribonucleotide
  modified_base 54: mod_base = OTHER; note = 2'-O-methyl ribonucleotide
  modified_base 55: mod_base = OTHER; note = 2'-O-methyl ribonucleotide
  modified_base 56: mod_base = OTHER; note = 2'-O-methyl ribonucleotide
  modified_base 57: mod_base = OTHER; note = 2'-O-methyl ribonucleotide
  modified_base 60: mod_base = OTHER; note = 2'-O-methyl ribonucleotide
  modified_base 61: mod_base = OTHER; note = 2'-O-methyl ribonucleotide
  modified_base 66: mod_base = OTHER; note = 2'-O-methyl ribonucleotide
  modified_base 67: mod_base = OTHER; note = 2'-O-methyl ribonucleotide
  modified_base 70: mod_base = OTHER; note = 2'-O-methyl ribonucleotide
  modified_base 71: mod_base = OTHER; note = 2'-O-methyl ribonucleotide
  modified_base 72: mod_base = OTHER; note = 2'-O-methyl ribonucleotide
  modified_base 74: mod_base = OTHER; note = 2'-O-methyl ribonucleotide
  modified_base 75: mod_base = OTHER; note = 2'-O-methyl ribonucleotide
  modified_base 76: mod_base = OTHER; note = 2'-O-methyl ribonucleotide
  modified_base 77: mod_base = OTHER; note = 2'-O-methyl ribonucleotide
  modified_base 78: mod_base = OTHER; note = 2'-O-methyl ribonucleotide
  modified_base 79: mod_base = OTHER; note = 2'-O-methyl ribonucleotide
  modified_base 80: mod_base = OTHER; note = 2'-O-methyl ribonucleotide
  modified_base 81: mod_base = OTHER; note = 2'-O-methyl ribonucleotide
  modified_base 83: mod_base = OTHER; note = 2'-O-methyl ribonucleotide
  modified_base 84: mod_base = OTHER; note = 2'-O-methyl ribonucleotide
  modified_base 85: mod_base = OTHER; note = 2'-O-methyl ribonucleotide
  modified_base 86: mod_base = OTHER; note = 2'-O-methyl ribonucleotide
  modified_base 87: mod_base = OTHER; note = 2'-O-methyl ribonucleotide
  modified_base 88: mod_base = OTHER; note = 2'-O-methyl ribonucleotide
  modified_base 89: mod_base = OTHER; note = 2'-O-methyl ribonucleotide
  modified_base 90: mod_base = OTHER; note = 2'-O-methyl ribonucleotide
  modified_base 91: mod_base = OTHER; note = 2'-O-methyl ribonucleotide
  modified_base 92: mod_base = OTHER; note = 2'-O-methyl ribonucleotide
  modified_base 93: mod_base = OTHER; note = 2'-O-methyl ribonucleotide
  modified_base 94: mod_base = OTHER; note = 2'-O-methyl ribonucleotide
  modified_base 95: mod_base = OTHER; note = 2'-O-methyl ribonucleotide
  modified_base 96: mod_base = OTHER; note = 2'-O-methyl ribonucleotide
  modified_base 97: mod_base = OTHER; note = 2'-O-methyl ribonucleotide
  modified_base 98: mod_base = OTHER; note = 2'-O-methyl ribonucleotide
  modified_base 99: mod_base = OTHER; note = 2'-O-methyl ribonucleotide
  modified_base 100: mod_base = OTHER; note = 2'-O-methyl ribonucleotide
  modified_base 101: mod_base = OTHER; note = uniform ribonucleotides (A, C, G, inosine or U), deoxynucleotides (A, G, C, inosine or T), ribonebularine, 2'-O-methylnebularine or deoxynebularine
  modified_base 102: mod_base = OTHER; note = uniform ribonucleotides (A, C, G, inosine or U), deoxynucleotides (A, G, C, inosine or T), ribonebularine, 2'-O-methylnebularine or deoxynebularine
  modified_base 103: mod_base = OTHER; note = uniform ribonucleotides (A, C, G, inosine or U), deoxynucleotides (A, G, C, inosine or T), ribonebularine, 2'-O-methylnebularine or deoxynebularine
  modified_base 1..3: mod_base = OTHER; note = phosphorothioate linkage
  modified_base 64..65: mod_base = OTHER; note = phosphorothioate linkage
  modified_base 97..100: mod_base = OTHER; note = phosphorothioate linkage
  misc_feature 1..100: note = RNA
  misc_feature 101..103: note = Optionally DNA or RNA

SEQ ID NO: 1827 - DNA, 103 bp, synthetic construct; identical to SEQ ID NO: 1795
  source 1..103: mol_type = other DNA
  modified_base 1: mod_base = OTHER; note = 2'-O-methyl ribonucleotide
  modified_base 2: mod_base = OTHER; note = 2'-O-methyl ribonucleotide
  modified_base 3: mod_base = OTHER; note = 2'-O-methyl ribonucleotide
  modified_base 21: mod_base = OTHER; note = 2'-O-methyl ribonucleotide
  modified_base 28: mod_base = OTHER; note = 2'-O-methyl ribonucleotide
  modified_base 29: mod_base = OTHER; note = 2'-O-methyl ribonucleotide
  modified_base 30: mod_base = OTHER; note = 2'-O-methyl ribonucleotide
  modified_base 31: mod_base = OTHER; note = 2'-O-methyl ribonucleotide
  modified_base 32: mod_base = OTHER; note = 2'-O-methyl ribonucleotide
  modified_base 34: mod_base = OTHER; note = 2'-O-methyl ribonucleotide
  modified_base 35: mod_base = OTHER; note = 2'-O-methyl ribonucleotide
  modified_base 36: mod_base = OTHER; note = 2'-O-methyl ribonucleotide
  modified_base 37: mod_base = OTHER; note = 2'-O-methyl ribonucleotide
  modified_base 38: mod_base = OTHER; note = 2'-O-methyl ribonucleotide
  modified_base 39: mod_base = OTHER; note = 2'-O-methyl ribonucleotide
  modified_base 40: mod_base = OTHER; note = 2'-O-methyl ribonucleotide
  modified_base 41: mod_base = OTHER; note = 2'-O-methyl ribonucleotide
  modified_base 42: mod_base = OTHER; note = 2'-O-methyl ribonucleotide
  modified_base 46: mod_base = OTHER; note = 2'-O-methyl ribonucleotide
  modified_base 48: mod_base = OTHER; note = 2'-O-methyl ribonucleotide
  modified_base 50: mod_base = OTHER; note = 2'-O-methyl ribonucleotide
  modified_base 52: mod_base = OTHER; note = 2'-O-methyl ribonucleotide
  modified_base 53: mod_base = OTHER; note = 2'-O-methyl ribonucleotide
  modified_base 54: mod_base = OTHER; note = 2'-O-methyl ribonucleotide
  modified_base 57: mod_base = OTHER; note = 2'-O-methyl ribonucleotide
  modified_base 61: mod_base = OTHER; note = 2'-O-methyl ribonucleotide
  modified_base 66: mod_base = OTHER; note = 2'-O-methyl ribonucleotide
  modified_base 67: mod_base = OTHER; note = 2'-O-methyl ribonucleotide
  modified_base 70: mod_base = OTHER; note = 2'-O-methyl ribonucleotide
  modified_base 71: mod_base = OTHER; note = 2'-O-methyl ribonucleotide
  modified_base 72: mod_base = OTHER; note = 2'-O-methyl ribonucleotide
  modified_base 74: mod_base = OTHER; note = 2'-O-methyl ribonucleotide
  modified_base 75: mod_base = OTHER; note = 2'-O-methyl ribonucleotide
  modified_base 76: mod_base = OTHER; note = 2'-O-methyl ribonucleotide
  modified_base 77: mod_base = OTHER; note = 2'-O-methyl ribonucleotide
  modified_base 78: mod_base = OTHER; note = 2'-O-methyl ribonucleotide
  modified_base 79: mod_base = OTHER; note = 2'-O-methyl ribonucleotide
  modified_base 80: mod_base = OTHER; note = 2'-O-methyl ribonucleotide
  modified_base 82: mod_base = OTHER; note = 2'-O-methyl ribonucleotide
  modified_base 83: mod_base = OTHER; note = 2'-O-methyl ribonucleotide
  modified_base 84: mod_base = OTHER; note = 2'-O-methyl ribonucleotide
  modified_base 85: mod_base = OTHER; note = 2'-O-methyl ribonucleotide
  modified_base 86: mod_base = OTHER; note = 2'-O-methyl ribonucleotide
  modified_base 87: mod_base = OTHER; note = 2'-O-methyl ribonucleotide
  modified_base 89: mod_base = OTHER; note = 2'-O-methyl ribonucleotide
  modified_base 92: mod_base = OTHER; note = 2'-O-methyl ribonucleotide
  modified_base 93: mod_base = OTHER; note = 2'-O-methyl ribonucleotide
  modified_base 94: mod_base = OTHER; note = 2'-O-methyl ribonucleotide
  modified_base 95: mod_base = OTHER; note = 2'-O-methyl ribonucleotide
  modified_base 96: mod_base = OTHER; note = 2'-O-methyl ribonucleotide
  modified_base 97: mod_base = OTHER; note = 2'-O-methyl ribonucleotide
  modified_base 98: mod_base = OTHER; note = 2'-O-methyl ribonucleotide
  modified_base 99: mod_base = OTHER; note = 2'-O-methyl ribonucleotide
  modified_base 100: mod_base = OTHER; note = 2'-O-methyl ribonucleotide
  modified_base 101: mod_base = OTHER; note = uniform ribonucleotides (A, C, G, inosine or U), deoxynucleotides (A, G, C, inosine or T), ribonebularine, 2'-O-methylnebularine or deoxynebularine
  modified_base 102: mod_base = OTHER; note = uniform ribonucleotides (A, C, G, inosine or U), deoxynucleotides (A, G, C, inosine or T), ribonebularine, 2'-O-methylnebularine or deoxynebularine
  modified_base 103: mod_base = OTHER; note = uniform ribonucleotides (A, C, G, inosine or U), deoxynucleotides (A, G, C, inosine or T), ribonebularine, 2'-O-methylnebularine or deoxynebularine
  modified_base 1..3: mod_base = OTHER; note = phosphorothioate linkage
  modified_base 45..46: mod_base = OTHER; note = phosphorothioate linkage
  modified_base 97..100: mod_base = OTHER; note = phosphorothioate linkage
  misc_feature 1..100: note = RNA
  misc_feature 101..103: note = Optionally DNA or RNA

SEQ ID NO: 1828 - DNA, 103 bp, synthetic construct; identical to SEQ ID NO: 1796
  source 1..103: mol_type = other DNA
  modified_base 1: mod_base = OTHER; note = 2'-O-methyl ribonucleotide
  modified_base 2: mod_base = OTHER; note = 2'-O-methyl ribonucleotide
  modified_base 3: mod_base = OTHER; note = 2'-O-methyl ribonucleotide
  modified_base 21: mod_base = OTHER; note = 2'-O-methyl ribonucleotide
  modified_base 28: mod_base = OTHER; note = 2'-O-methyl ribonucleotide
  modified_base 29: mod_base = OTHER; note = 2'-O-methyl ribonucleotide
  modified_base 30: mod_base = OTHER; note = 2'-O-methyl ribonucleotide
  modified_base 31: mod_base = OTHER; note = 2'-O-methyl ribonucleotide
  modified_base 32: mod_base = OTHER; note = 2'-O-methyl ribonucleotide
  modified_base 34: mod_base = OTHER; note = 2'-O-methyl ribonucleotide
  modified_base 35: mod_base = OTHER; note = 2'-O-methyl ribonucleotide
  modified_base 36: mod_base = OTHER; note = 2'-O-methyl ribonucleotide
  modified_base 37: mod_base = OTHER; note = 2'-O-methyl ribonucleotide
  modified_base 38: mod_base = OTHER; note = 2'-O-methyl ribonucleotide
  modified_base 39: mod_base = OTHER; note = 2'-O-methyl ribonucleotide
  modified_base 40: mod_base = OTHER; note = 2'-O-methyl ribonucleotide
  modified_base 41: mod_base = OTHER; note = 2'-O-methyl ribonucleotide
  modified_base 42: mod_base = OTHER; note = 2'-O-methyl ribonucleotide
  modified_base 46: mod_base = OTHER; note = 2'-O-methyl ribonucleotide
  modified_base 48: mod_base = OTHER; note = 2'-O-methyl ribonucleotide
  modified_base 50: mod_base = OTHER; note = 2'-O-methyl ribonucleotide
  modified_base 52: mod_base = OTHER; note = 2'-O-methyl ribonucleotide
  modified_base 53: mod_base = OTHER; note = 2'-O-methyl ribonucleotide
  modified_base 54: mod_base = OTHER; note = 2'-O-methyl ribonucleotide
  modified_base 57: mod_base = OTHER; note = 2'-O-methyl ribonucleotide
  modified_base 61: mod_base = OTHER; note = 2'-O-methyl ribonucleotide
  modified_base 66: mod_base = OTHER; note = 2'-O-methyl ribonucleotide
  modified_base 67: mod_base = OTHER; note = 2'-O-methyl ribonucleotide
  modified_base 70: mod_base = OTHER; note = 2'-O-methyl ribonucleotide
  modified_base 71: mod_base = OTHER; note = 2'-O-methyl ribonucleotide
  modified_base 72: mod_base = OTHER; note = 2'-O-methyl ribonucleotide
  modified_base 74: mod_base = OTHER; note = 2'-O-methyl ribonucleotide
  modified_base 75: mod_base = OTHER; note = 2'-O-methyl ribonucleotide
  modified_base 76: mod_base = OTHER; note = 2'-O-methyl ribonucleotide
  modified_base 77: mod_base = OTHER; note = 2'-O-methyl ribonucleotide
  modified_base 78: mod_base = OTHER; note = 2'-O-methyl ribonucleotide
  modified_base 79: mod_base = OTHER; note = 2'-O-methyl ribonucleotide
  modified_base 80: mod_base = OTHER; note = 2'-O-methyl ribonucleotide
  modified_base 82: mod_base = OTHER; note = 2'-O-methyl ribonucleotide
  modified_base 83: mod_base = OTHER; note = 2'-O-methyl ribonucleotide
  modified_base 84: mod_base = OTHER; note = 2'-O-methyl ribonucleotide
  modified_base 85: mod_base = OTHER; note = 2'-O-methyl ribonucleotide
  modified_base 86: mod_base = OTHER; note = 2'-O-methyl ribonucleotide
  modified_base 87: mod_base = OTHER; note = 2'-O-methyl ribonucleotide
  modified_base 89: mod_base = OTHER; note = 2'-O-methyl ribonucleotide
  modified_base 92: mod_base = OTHER; note = 2'-O-methyl ribonucleotide
  modified_base 93: mod_base = OTHER; note = 2'-O-methyl ribonucleotide
  modified_base 94: mod_base = OTHER; note = 2'-O-methyl ribonucleotide
  modified_base 95: mod_base = OTHER; note = 2'-O-methyl ribonucleotide
  modified_base 96: mod_base = OTHER; note = 2'-O-methyl ribonucleotide
  modified_base 97: mod_base = OTHER; note = 2'-O-methyl ribonucleotide
  modified_base 98: mod_base = OTHER; note = 2'-O-methyl ribonucleotide
  modified_base 99: mod_base = OTHER; note = 2'-O-methyl ribonucleotide
  modified_base 100: mod_base = OTHER; note = 2'-O-methyl ribonucleotide
  modified_base 101: mod_base = OTHER; note = uniform ribonucleotides (A, C, G, inosine or U), deoxynucleotides (A, G, C, inosine or T), ribonebularine, 2'-O-methylnebularine or deoxynebularine
  modified_base 102: mod_base = OTHER; note = uniform ribonucleotides (A, C, G, inosine or U), deoxynucleotides (A, G, C, inosine or T), ribonebularine, 2'-O-methylnebularine or deoxynebularine
  modified_base 103: mod_base = OTHER; note = uniform ribonucleotides (A, C, G, inosine or U), deoxynucleotides (A, G, C, inosine or T), ribonebularine, 2'-O-methylnebularine or deoxynebularine
  modified_base 1..3: mod_base = OTHER; note = phosphorothioate linkage
  modified_base 45..46: mod_base = OTHER; note = phosphorothioate linkage
  modified_base 97..100: mod_base = OTHER; note = phosphorothioate linkage
  misc_feature 1..100: note = RNA
  misc_feature 101..103: note = Optionally DNA or RNA

SEQ ID NO: 1829 - DNA, 103 bp, synthetic construct; identical to SEQ ID NO: 1797
  source 1..103: mol_type = other DNA
  modified_base 1: mod_base = OTHER; note = 2'-O-methyl ribonucleotide
  modified_base 2: mod_base = OTHER; note = 2'-O-methyl ribonucleotide
  modified_base 3: mod_base = OTHER; note = 2'-O-methyl ribonucleotide
  modified_base 21: mod_base = OTHER; note = 2'-O-methyl ribonucleotide
  modified_base 28: mod_base = OTHER; note = 2'-O-methyl ribonucleotide
  modified_base 29: mod_base = OTHER; note = 2'-O-methyl ribonucleotide
  modified_base 30: mod_base = OTHER; note = 2'-O-methyl ribonucleotide
  modified_base 31: mod_base = OTHER; note = 2'-O-methyl ribonucleotide
  modified_base 32: mod_base = OTHER; note = 2'-O-methyl ribonucleotide
  modified_base 34: mod_base = OTHER; note = 2'-O-methyl ribonucleotide
  modified_base 35: mod_base = OTHER; note = 2'-O-methyl ribonucleotide
  modified_base 36: mod_base = OTHER; note = 2'-O-methyl ribonucleotide
  modified_base 37: mod_base = OTHER; note = 2'-O-methyl ribonucleotide
  modified_base 38: mod_base = OTHER; note = 2'-O-methyl ribonucleotide
  modified_base 39: mod_base = OTHER; note = 2'-O-methyl ribonucleotide
  modified_base 40: mod_base = OTHER; note = 2'-O-methyl ribonucleotide
  modified_base 41: mod_base = OTHER; note = 2'-O-methyl ribonucleotide
  modified_base 42: mod_base = OTHER; note = 2'-O-methyl ribonucleotide
  modified_base 46: mod_base = OTHER; note = 2'-O-methyl ribonucleotide
  modified_base 48: mod_base = OTHER; note = 2'-O-methyl ribonucleotide
  modified_base 50: mod_base = OTHER; note = 2'-O-methyl ribonucleotide
  modified_base 52: mod_base = OTHER; note = 2'-O-methyl ribonucleotide
  modified_base 53: mod_base = OTHER; note = 2'-O-methyl ribonucleotide
  modified_base 54: mod_base = OTHER; note = 2'-O-methyl ribonucleotide
  modified_base 55: mod_base = OTHER; note = 2'-O-methyl ribonucleotide
  modified_base 56: mod_base = OTHER; note = 2'-O-methyl ribonucleotide
  modified_base 57: mod_base = OTHER; note = 2'-O-methyl ribonucleotide
  modified_base 60: mod_base = OTHER; note = 2'-O-methyl ribonucleotide
  modified_base 61: mod_base = OTHER; note = 2'-O-methyl ribonucleotide
  modified_base 66: mod_base = OTHER; note = 2'-O-methyl ribonucleotide
  modified_base 67: mod_base = OTHER; note = 2'-O-methyl ribonucleotide
  modified_base 70: mod_base = OTHER; note = 2'-O-methyl ribonucleotide
  modified_base 71: mod_base = OTHER; note = 2'-O-methyl ribonucleotide
  modified_base 72: mod_base = OTHER; note = 2'-O-methyl ribonucleotide
  modified_base 74: mod_base = OTHER; note = 2'-O-methyl ribonucleotide
  modified_base 75: mod_base = OTHER; note = 2'-O-methyl ribonucleotide
  modified_base 76: mod_base = OTHER; note = 2'-O-methyl ribonucleotide
  modified_base 77: mod_base = OTHER; note = 2'-O-methyl ribonucleotide
  modified_base 78: mod_base = OTHER; note = 2'-O-methyl ribonucleotide
  modified_base 79: mod_base = OTHER; note = 2'-O-methyl ribonucleotide
  modified_base 80: mod_base = OTHER; note = 2'-O-methyl ribonucleotide
  modified_base 81: mod_base = OTHER; note = 2'-O-methyl ribonucleotide
  modified_base 83: mod_base = OTHER; note = 2'-O-methyl ribonucleotide
  modified_base 84: mod_base = OTHER; note = 2'-O-methyl ribonucleotide
  modified_base 85: mod_base = OTHER; note = 2'-O-methyl ribonucleotide
  modified_base 86: mod_base = OTHER; note = 2'-O-methyl ribonucleotide
  modified_base 87: mod_base = OTHER; note = 2'-O-methyl ribonucleotide
  modified_base 88: mod_base = OTHER; note = 2'-O-methyl ribonucleotide
  modified_base 89: mod_base = OTHER; note = 2'-O-methyl ribonucleotide
  modified_base 90: mod_base = OTHER; note = 2'-O-methyl ribonucleotide
  modified_base 91: mod_base = OTHER; note = 2'-O-methyl ribonucleotide
  modified_base 92: mod_base = OTHER; note = 2'-O-methyl ribonucleotide
  modified_base 93: mod_base = OTHER; note = 2'-O-methyl ribonucleotide
  modified_base 94: mod_base = OTHER; note = 2'-O-methyl ribonucleotide
  modified_base 95: mod_base = OTHER; note = 2'-O-methyl ribonucleotide
  modified_base 96: mod_base = OTHER; note = 2'-O-methyl ribonucleotide
  modified_base 97: mod_base = OTHER; note = 2'-O-methyl ribonucleotide
  modified_base 98: mod_base = OTHER; note = 2'-O-methyl ribonucleotide
  modified_base 99: mod_base = OTHER; note = 2'-O-methyl ribonucleotide
  modified_base 100: mod_base = OTHER; note = 2'-O-methyl ribonucleotide
  modified_base 101: mod_base = OTHER; note = uniform ribonucleotides (A, C, G, inosine or U), deoxynucleotides (A, G, C, inosine or T), ribonebularine, 2'-O-methylnebularine or deoxynebularine
  modified_base 102: mod_base = OTHER; note = uniform ribonucleotides (A, C, G, inosine or U), deoxynucleotides (A, G, C, inosine or T), ribonebularine, 2'-O-methylnebularine or deoxynebularine
  modified_base 103: mod_base = OTHER; note = uniform ribonucleotides (A, C, G, inosine or U), deoxynucleotides (A, G, C, inosine or T), ribonebularine, 2'-O-methylnebularine or deoxynebularine
  modified_base 1..3: mod_base = OTHER; note = phosphorothioate linkage
  modified_base 45..46: mod_base = OTHER; note = phosphorothioate linkage
  modified_base 97..100: mod_base = OTHER; note = phosphorothioate linkage
  misc_feature 1..100: note = RNA
  misc_feature 101..103: note = Optionally DNA or RNA

SEQ ID NO: 1830 - DNA, 103 bp, synthetic construct; identical to SEQ ID NO: 1795
  source 1..103: mol_type = other DNA
  modified_base 1: mod_base = OTHER; note = 2'-O-methyl ribonucleotide
  modified_base 2: mod_base = OTHER; note = 2'-O-methyl ribonucleotide
  modified_base 3: mod_base = OTHER; note = 2'-O-methyl ribonucleotide
  modified_base 21: mod_base = OTHER; note = 2'-O-methyl ribonucleotide
  modified_base 28: mod_base = OTHER; note = 2'-O-methyl ribonucleotide
  modified_base 29: mod_base = OTHER; note = 2'-O-methyl ribonucleotide
  modified_base 30: mod_base = OTHER; note = 2'-O-methyl ribonucleotide
  modified_base 31: mod_base = OTHER; note = 2'-O-methyl ribonucleotide
  modified_base 32: mod_base = OTHER; note = 2'-O-methyl ribonucleotide
  modified_base 34: mod_base = OTHER; note = 2'-O-methyl ribonucleotide
  modified_base 35: mod_base = OTHER; note = 2'-O-methyl ribonucleotide
  modified_base 36: mod_base = OTHER; note = 2'-O-methyl ribonucleotide
  modified_base 37: mod_base = OTHER; note = 2'-O-methyl ribonucleotide
  modified_base 38: mod_base = OTHER; note = 2'-O-methyl ribonucleotide
  modified_base 39: mod_base = OTHER; note = 2'-O-methyl ribonucleotide
  modified_base 40: mod_base = OTHER; note = 2'-O-methyl ribonucleotide
  modified_base 41: mod_base = OTHER; note = 2'-O-methyl ribonucleotide
  modified_base 42: mod_base = OTHER; note = 2'-O-methyl ribonucleotide
  modified_base 46: mod_base = OTHER; note = 2'-O-methyl ribonucleotide
  modified_base 48: mod_base = OTHER; note = 2'-O-methyl ribonucleotide
  modified_base 50: mod_base = OTHER; note = 2'-O-methyl ribonucleotide
  modified_base 52: mod_base = OTHER; note = 2'-O-methyl ribonucleotide
  modified_base 53: mod_base = OTHER; note = 2'-O-methyl ribonucleotide
  modified_base 54: mod_base = OTHER; note = 2'-O-methyl ribonucleotide
  modified_base 57: mod_base = OTHER; note = 2'-O-methyl ribonucleotide
  modified_base 61: mod_base = OTHER; note = 2'-O-methyl ribonucleotide
  modified_base 66: mod_base = OTHER; note = 2'-O-methyl ribonucleotide
  modified_base 67: mod_base = OTHER; note = 2'-O-methyl ribonucleotide
  modified_base 70: mod_base = OTHER; note = 2'-O-methyl ribonucleotide
  modified_base 71: mod_base = OTHER; note = 2'-O-methyl ribonucleotide
  modified_base 72: mod_base = OTHER; note = 2'-O-methyl ribonucleotide
  modified_base 74: mod_base = OTHER; note = 2'-O-methyl ribonucleotide
  modified_base 75: mod_base = OTHER; note = 2'-O-methyl ribonucleotide
  modified_base 76: mod_base = OTHER; note = 2'-O-methyl ribonucleotide
  modified_base 77: mod_base = OTHER; note = 2'-O-methyl ribonucleotide
  modified_base 78: mod_base = OTHER; note = 2'-O-methyl ribonucleotide
  modified_base 79: mod_base = OTHER; note = 2'-O-methyl ribonucleotide
  modified_base 80: mod_base = OTHER; note = 2'-O-methyl ribonucleotide
  modified_base 82: mod_base = OTHER; note = 2'-O-methyl ribonucleotide
  modified_base 83: mod_base = OTHER; note = 2'-O-methyl ribonucleotide
  modified_base 84: mod_base = OTHER; note = 2'-O-methyl ribonucleotide
  modified_base 85: mod_base = OTHER; note = 2'-O-methyl ribonucleotide
  modified_base 86: mod_base = OTHER; note = 2'-O-methyl ribonucleotide
  modified_base 87: mod_base = OTHER; note = 2'-O-methyl ribonucleotide
  modified_base 89: mod_base = OTHER; note = 2'-O-methyl ribonucleotide
  modified_base 92: mod_base = OTHER; note = 2'-O-methyl ribonucleotide
  modified_base 93: mod_base = OTHER; note = 2'-O-methyl ribonucleotide
  modified_base 94: mod_base = OTHER; note = 2'-O-methyl ribonucleotide
  modified_base 95: mod_base = OTHER; note = 2'-O-methyl ribonucleotide
  modified_base 96: mod_base = OTHER; note = 2'-O-methyl ribonucleotide
  modified_base 97: mod_base = OTHER; note = 2'-O-methyl ribonucleotide
  modified_base 98: mod_base = OTHER; note = 2'-O-methyl ribonucleotide
  modified_base 99: mod_base = OTHER; note = 2'-O-methyl ribonucleotide
  modified_base 100: mod_base = OTHER; note = 2'-O-methyl ribonucleotide
  modified_base 101: mod_base = OTHER; note = uniform ribonucleotides (A, C, G, inosine or U), deoxynucleotides (A, G, C, inosine or T), ribonebularine, 2'-O-methylnebularine or deoxynebularine
  modified_base 102: mod_base = OTHER; note = uniform ribonucleotides (A, C, G, inosine or U), deoxynucleotides (A, G, C, inosine or T), ribonebularine, 2'-O-methylnebularine or deoxynebularine
  modified_base 103: mod_base = OTHER; note = uniform ribonucleotides (A, C, G, inosine or U), deoxynucleotides (A, G, C, inosine or T), ribonebularine, 2'-O-methylnebularine or deoxynebularine
  modified_base 1..3: mod_base = OTHER; note = phosphorothioate linkage
  modified_base 25..26: mod_base = OTHER; note = phosphorothioate linkage
  modified_base 97..100: mod_base = OTHER; note = phosphorothioate linkage
  misc_feature 1..100: note = RNA
  misc_feature 101..103: note = Optionally DNA or RNA

SEQ ID NO: 1831 - DNA, 103 bp, synthetic construct; identical to SEQ ID NO: 1796
  source 1..103: mol_type = other DNA
  modified_base 1: mod_base = OTHER; note = 2'-O-methyl ribonucleotide
  modified_base 2: mod_base = OTHER; note = 2'-O-methyl ribonucleotide
  modified_base 3: mod_base = OTHER; note = 2'-O-methyl ribonucleotide
  modified_base 21: mod_base = OTHER; note = 2'-O-methyl ribonucleotide
  modified_base 28: mod_base = OTHER; note = 2'-O-methyl ribonucleotide
  modified_base 29: mod_base = OTHER; note = 2'-O-methyl ribonucleotide
  modified_base 30: mod_base = OTHER; note = 2'-O-methyl ribonucleotide
  modified_base 31: mod_base = OTHER; note = 2'-O-methyl ribonucleotide
  modified_base 32: mod_base = OTHER; note = 2'-O-methyl ribonucleotide
  modified_base 34: mod_base = OTHER; note = 2'-O-methyl ribonucleotide
  modified_base 35: mod_base = OTHER; note = 2'-O-methyl ribonucleotide
  modified_base 36: mod_base = OTHER; note = 2'-O-methyl ribonucleotide
  modified_base 37: mod_base = OTHER; note = 2'-O-methyl ribonucleotide
  modified_base 38: mod_base = OTHER; note = 2'-O-methyl ribonucleotide
  modified_base 39: mod_base = OTHER; note = 2'-O-methyl ribonucleotide
  modified_base 40: mod_base = OTHER; note = 2'-O-methyl ribonucleotide
  modified_base 41: mod_base = OTHER; note = 2'-O-methyl ribonucleotide
  modified_base 42: mod_base = OTHER; note = 2'-O-methyl ribonucleotide
  modified_base 46: mod_base = OTHER; note = 2'-O-methyl ribonucleotide
  modified_base 48: mod_base = OTHER; note = 2'-O-methyl ribonucleotide
  modified_base 50: mod_base = OTHER; note = 2'-O-methyl ribonucleotide
  modified_base 52: mod_base = OTHER; note = 2'-O-methyl ribonucleotide
  modified_base 53: mod_base = OTHER; note = 2'-O-methyl ribonucleotide
  modified_base 54: mod_base = OTHER; note = 2'-O-methyl ribonucleotide
  modified_base 57: mod_base = OTHER; note = 2'-O-methyl ribonucleotide
  modified_base 61: mod_base = OTHER; note = 2'-O-methyl ribonucleotide
  modified_base 66: mod_base = OTHER; note = 2'-O-methyl ribonucleotide
  modified_base 67: mod_base = OTHER; note = 2'-O-methyl ribonucleotide
  modified_base 70: mod_base = OTHER; note = 2'-O-methyl ribonucleotide
  modified_base 71: mod_base = OTHER; note = 2'-O-methyl ribonucleotide
  modified_base 72: mod_base = OTHER; note = 2'-O-methyl ribonucleotide
  modified_base 74: mod_base = OTHER; note = 2'-O-methyl ribonucleotide
  modified_base 75: mod_base = OTHER; note = 2'-O-methyl ribonucleotide
  modified_base 76: mod_base = OTHER; note = 2'-O-methyl ribonucleotide
  modified_base 77: mod_base = OTHER; note = 2'-O-methyl ribonucleotide
  modified_base 78: mod_base = OTHER; note = 2'-O-methyl ribonucleotide
  modified_base 79: mod_base = OTHER; note = 2'-O-methyl ribonucleotide
  modified_base 80: mod_base = OTHER; note = 2'-O-methyl ribonucleotide
  modified_base 82: mod_base = OTHER; note = 2'-O-methyl ribonucleotide
  modified_base 83: mod_base = OTHER; note = 2'-O-methyl ribonucleotide
  modified_base 84: mod_base = OTHER; note = 2'-O-methyl ribonucleotide
  modified_base 85: mod_base = OTHER; note = 2'-O-methyl ribonucleotide
  modified_base 86: mod_base = OTHER; note = 2'-O-methyl ribonucleotide
  modified_base 87: mod_base = OTHER; note = 2'-O-methyl ribonucleotide
  modified_base 89: mod_base = OTHER; note = 2'-O-methyl ribonucleotide
  modified_base 92: mod_base = OTHER; note = 2'-O-methyl ribonucleotide
  modified_base 93: mod_base = OTHER; note = 2'-O-methyl ribonucleotide
  modified_base 94: mod_base = OTHER; note = 2'-O-methyl ribonucleotide
  modified_base 95: mod_base = OTHER; note = 2'-O-methyl ribonucleotide
  modified_base 96: mod_base = OTHER; note = 2'-O-methyl ribonucleotide
  modified_base 97: mod_base = OTHER; note = 2'-O-methyl ribonucleotide
  modified_base 98: mod_base = OTHER; note = 2'-O-methyl ribonucleotide
  modified_base 99: mod_base = OTHER; note = 2'-O-methyl ribonucleotide
  modified_base 100: mod_base = OTHER; note = 2'-O-methyl ribonucleotide
  modified_base 101: mod_base = OTHER; note = uniform ribonucleotides (A, C, G, inosine or U), deoxynucleotides (A, G, C, inosine or T), ribonebularine, 2'-O-methylnebularine or deoxynebularine
  modified_base 102: mod_base = OTHER; note = uniform ribonucleotides (A, C, G, inosine or U), deoxynucleotides (A, G, C, inosine or T), ribonebularine, 2'-O-methylnebularine or deoxynebularine
  modified_base 103: mod_base = OTHER; note = uniform ribonucleotides (A, C, G, inosine or U), deoxynucleotides (A, G, C, inosine or T), ribonebularine, 2'-O-methylnebularine or deoxynebularine
  modified_base 1..3: mod_base = OTHER; note = phosphorothioate linkage
  modified_base 25..26: mod_base = OTHER; note = phosphorothioate linkage
  modified_base 97..100: mod_base = OTHER; note = phosphorothioate linkage
  misc_feature 1..100: note = RNA
  misc_feature 101..103: note = Optionally DNA or RNA

SEQ ID NO: 1832 - DNA, 103 bp, synthetic construct; identical to SEQ ID NO: 1797
  source 1..103: mol_type = other DNA
  modified_base 1: mod_base = OTHER; note = 2'-O-methyl ribonucleotide
  modified_base 2: mod_base = OTHER; note = 2'-O-methyl ribonucleotide
  modified_base 3: mod_base = OTHER; note = 2'-O-methyl ribonucleotide
  modified_base 21: mod_base = OTHER; note = 2'-O-methyl ribonucleotide
  modified_base 28: mod_base = OTHER; note = 2'-O-methyl ribonucleotide
  modified_base 29: mod_base = OTHER; note = 2'-O-methyl ribonucleotide
  modified_base 30: mod_base = OTHER; note = 2'-O-methyl ribonucleotide
  modified_base 31: mod_base = OTHER; note = 2'-O-methyl ribonucleotide
  modified_base 32: mod_base = OTHER; note = 2'-O-methyl ribonucleotide
  modified_base 34: mod_base = OTHER; note = 2'-O-methyl ribonucleotide
  modified_base 35: mod_base = OTHER; note = 2'-O-methyl ribonucleotide
  modified_base 36: mod_base = OTHER; note = 2'-O-methyl ribonucleotide
  modified_base 37: mod_base = OTHER; note = 2'-O-methyl ribonucleotide
  modified_base 38: mod_base = OTHER; note = 2'-O-methyl ribonucleotide
  modified_base 39: mod_base = OTHER; note = 2'-O-methyl ribonucleotide
  modified_base 40: mod_base = OTHER; note = 2'-O-methyl ribonucleotide
  modified_base 41: mod_base = OTHER; note = 2'-O-methyl ribonucleotide
  modified_base 42: mod_base = OTHER; note = 2'-O-methyl ribonucleotide
  modified_base 46: mod_base = OTHER; note = 2'-O-methyl ribonucleotide
  modified_base 48: mod_base = OTHER; note = 2'-O-methyl ribonucleotide
  modified_base 50: mod_base = OTHER; note = 2'-O-methyl ribonucleotide
  modified_base 52: mod_base = OTHER; note = 2'-O-methyl ribonucleotide
  modified_base 53: mod_base = OTHER; note = 2'-O-methyl ribonucleotide
  modified_base 54: mod_base = OTHER; note = 2'-O-methyl ribonucleotide
  modified_base 55: mod_base = OTHER; note = 2'-O-methyl ribonucleotide
  modified_base 56: mod_base = OTHER; note = 2'-O-methyl ribonucleotide
  modified_base 57: mod_base = OTHER; note = 2'-O-methyl ribonucleotide
  modified_base 60: mod_base = OTHER; note = 2'-O-methyl ribonucleotide
  modified_base 61: mod_base = OTHER; note = 2'-O-methyl ribonucleotide
  modified_base 66: mod_base = OTHER; note = 2'-O-methyl ribonucleotide
  modified_base 67: mod_base = OTHER; note = 2'-O-methyl ribonucleotide
  modified_base 70: mod_base = OTHER; note = 2'-O-methyl ribonucleotide
  modified_base 71: mod_base = OTHER; note = 2'-O-methyl ribonucleotide
  modified_base 72: mod_base = OTHER; note = 2'-O-methyl ribonucleotide
  modified_base 74: mod_base = OTHER; note = 2'-O-methyl ribonucleotide
  modified_base 75: mod_base = OTHER; note = 2'-O-methyl ribonucleotide
  modified_base 76: mod_base = OTHER; note = 2'-O-methyl ribonucleotide
  modified_base 77: mod_base = OTHER; note = 2'-O-methyl ribonucleotide
  modified_base 78: mod_base = OTHER; note = 2'-O-methyl ribonucleotide
  modified_base 79: mod_base = OTHER; note = 2'-O-methyl ribonucleotide
  modified_base 80: mod_base = OTHER; note = 2'-O-methyl ribonucleotide
  modified_base 81: mod_base = OTHER; note = 2'-O-methyl ribonucleotide
  modified_base 83: mod_base = OTHER; note = 2'-O-methyl ribonucleotide
  modified_base 84: mod_base = OTHER; note = 2'-O-methyl ribonucleotide
  modified_base 85: mod_base = OTHER; note = 2'-O-methyl ribonucleotide
  modified_base 86: mod_base = OTHER; note = 2'-O-methyl ribonucleotide
  modified_base 87: mod_base = OTHER; note = 2'-O-methyl ribonucleotide
  modified_base 88: mod_base = OTHER; note = 2'-O-methyl ribonucleotide
  modified_base 89: mod_base = OTHER; note = 2'-O-methyl ribonucleotide
  modified_base 90: mod_base = OTHER; note = 2'-O-methyl ribonucleotide
  modified_base 91: mod_base = OTHER; note = 2'-O-methyl ribonucleotide
  modified_base 92: mod_base = OTHER; note = 2'-O-methyl ribonucleotide
  modified_base 93: mod_base = OTHER; note = 2'-O-methyl ribonucleotide
  modified_base 94: mod_base = OTHER; note = 2'-O-methyl ribonucleotide
  modified_base 95: mod_base = OTHER; note = 2'-O-methyl ribonucleotide
  modified_base 96: mod_base = OTHER; note = 2'-O-methyl ribonucleotide
  modified_base 97: mod_base = OTHER; note = 2'-O-methyl ribonucleotide
  modified_base 98: mod_base = OTHER; note = 2'-O-methyl ribonucleotide
  modified_base 99: mod_base = OTHER; note = 2'-O-methyl ribonucleotide
  modified_base 100: mod_base = OTHER; note = 2'-O-methyl ribonucleotide
  modified_base 101: mod_base = OTHER; note = uniform ribonucleotides (A, C, G, inosine or U), deoxynucleotides (A, G, C, inosine or T), ribonebularine, 2'-O-methylnebularine or deoxynebularine
  modified_base 102: mod_base = OTHER; note = uniform ribonucleotides (A, C, G, inosine or U), deoxynucleotides (A, G, C, inosine or T), ribonebularine, 2'-O-methylnebularine or deoxynebularine
  modified_base 103: mod_base = OTHER; note = uniform ribonucleotides (A, C, G, inosine or U), deoxynucleotides (A, G, C, inosine or T), ribonebularine, 2'-O-methylnebularine or deoxynebularine
  modified_base 1..3: mod_base = OTHER; note = phosphorothioate linkage
  modified_base 25..26: mod_base = OTHER; note = phosphorothioate linkage
  modified_base 97..100: mod_base = OTHER; note = phosphorothioate linkage
  misc_feature 1..100: note = RNA
  misc_feature 101..103: note = Optionally DNA or RNA

SEQ ID NO: 1833 - DNA, 103 bp, synthetic construct; identical to SEQ ID NO: 1795
  source 1..103: mol_type = other DNA
  modified_base 1: mod_base = OTHER; note = 2'-O-methyl ribonucleotide
  modified_base 2: mod_base = OTHER; note = 2'-O-methyl ribonucleotide
  modified_base 3: mod_base = OTHER; note = 2'-O-methyl ribonucleotide
  modified_base 21: mod_base = OTHER; note = 2'-O-methyl ribonucleotide
  modified_base 28: mod_base = OTHER; note = 2'-O-methyl ribonucleotide
  modified_base 29: mod_base = OTHER; note = 2'-O-methyl ribonucleotide
  modified_base 30: mod_base = OTHER; note = 2'-O-methyl ribonucleotide
  modified_base 31: mod_base = OTHER; note = 2'-O-methyl ribonucleotide
  modified_base 32: mod_base = OTHER; note = 2'-O-methyl ribonucleotide
  modified_base 34: mod_base = OTHER; note = 2'-O-methyl ribonucleotide
  modified_base 35: mod_base = OTHER; note = 2'-O-methyl ribonucleotide
  modified_base 36: mod_base = OTHER; note = 2'-O-methyl ribonucleotide
  modified_base 37: mod_base = OTHER; note = 2'-O-methyl ribonucleotide
  modified_base 38: mod_base = OTHER; note = 2'-O-methyl ribonucleotide
  modified_base 39: mod_base = OTHER; note = 2'-O-methyl ribonucleotide
  modified_base 40: mod_base = OTHER; note = 2'-O-methyl ribonucleotide
  modified_base 41: mod_base = OTHER; note = 2'-O-methyl ribonucleotide
  modified_base 42: mod_base = OTHER; note = 2'-O-methyl ribonucleotide
  modified_base 46: mod_base = OTHER; note = 2'-O-methyl ribonucleotide
  modified_base 48: mod_base = OTHER; note = 2'-O-methyl ribonucleotide
  modified_base 50: mod_base = OTHER; note = 2'-O-methyl ribonucleotide
  modified_base 52: mod_base = OTHER; note = 2'-O-methyl ribonucleotide
  modified_base 53: mod_base = OTHER; note = 2'-O-methyl ribonucleotide
  modified_base 54: mod_base = OTHER; note = 2'-O-methyl ribonucleotide
  modified_base 57: mod_base = OTHER; note = 2'-O-methyl ribonucleotide
  modified_base 61: mod_base = OTHER; note = 2'-O-methyl ribonucleotide
  modified_base 66: mod_base = OTHER; note = 2'-O-methyl ribonucleotide
  modified_base 67: mod_base = OTHER; note = 2'-O-methyl ribonucleotide
  modified_base 70: mod_base = OTHER; note = 2'-O-methyl ribonucleotide
  modified_base 71: mod_base = OTHER; note = 2'-O-methyl ribonucleotide
  modified_base 72: mod_base = OTHER; note = 2'-O-methyl ribonucleotide
  modified_base 74: mod_base = OTHER; note = 2'-O-methyl ribonucleotide
  modified_base 75: mod_base = OTHER; note = 2'-O-methyl ribonucleotide
  modified_base 76: mod_base = OTHER; note = 2'-O-methyl ribonucleotide
  modified_base 77: mod_base = OTHER; note = 2'-O-methyl ribonucleotide
  modified_base 78: mod_base = OTHER; note = 2'-O-methyl ribonucleotide
  modified_base 79: mod_base = OTHER; note = 2'-O-methyl ribonucleotide
  modified_base 80: mod_base = OTHER; note = 2'-O-methyl ribonucleotide
  modified_base 82: mod_base = OTHER; note = 2'-O-methyl ribonucleotide
  modified_base 83: mod_base = OTHER; note = 2'-O-methyl ribonucleotide
  modified_base 84: mod_base = OTHER; note = 2'-O-methyl ribonucleotide
  modified_base 85: mod_base = OTHER; note = 2'-O-methyl ribonucleotide
  modified_base 86: mod_base = OTHER; note = 2'-O-methyl ribonucleotide
  modified_base 87: mod_base = OTHER; note = 2'-O-methyl ribonucleotide
  modified_base 89: mod_base = OTHER; note = 2'-O-methyl ribonucleotide
  modified_base 92: mod_base = OTHER; note = 2'-O-methyl ribonucleotide
  modified_base 93: mod_base = OTHER; note = 2'-O-methyl ribonucleotide
  modified_base 94: mod_base = OTHER; note = 2'-O-methyl ribonucleotide
  modified_base 95: mod_base = OTHER; note = 2'-O-methyl ribonucleotide
  modified_base 96: mod_base = OTHER; note = 2'-O-methyl ribonucleotide
  modified_base 97: mod_base = OTHER; note = 2'-O-methyl ribonucleotide
  modified_base 98: mod_base = OTHER; note = 2'-O-methyl ribonucleotide
  modified_base 99: mod_base = OTHER; note = 2'-O-methyl ribonucleotide
  modified_base 100: mod_base = OTHER; note = 2'-O-methyl ribonucleotide
  modified_base 101: mod_base = OTHER; note = uniform ribonucleotides (A, C, G, inosine or U), deoxynucleotides (A, G, C, inosine or T), ribonebularine, 2'-O-methylnebularine or deoxynebularine
  modified_base 102: mod_base = OTHER; note = uniform ribonucleotides (A, C, G, inosine or U), deoxynucleotides (A, G, C, inosine or T), ribonebularine, 2'-O-methylnebularine or deoxynebularine
  modified_base 103: mod_base = OTHER; note = uniform ribonucleotides (A, C, G, inosine or U), deoxynucleotides (A, G, C, inosine or T), ribonebularine, 2'-O-methylnebularine or deoxynebularine
  modified_base 1..3: mod_base = OTHER; note = phosphorothioate linkage
  modified_base 45..46: mod_base = OTHER; note = phosphorothioate linkage
  modified_base 64..65: mod_base = OTHER; note = phosphorothioate linkage
  modified_base 97..100: mod_base = OTHER; note = phosphorothioate linkage
  misc_feature 1..100: note = RNA
  misc_feature 101..103: note = Optionally DNA or RNA

SEQ ID NO: 1834 - DNA, 103 bp, synthetic construct; identical to SEQ ID NO: 1796
  source 1..103: mol_type = other DNA
  modified_base 1: mod_base = OTHER; note = 2'-O-methyl ribonucleotide
  modified_base 2: mod_base = OTHER; note = 2'-O-methyl ribonucleotide
  modified_base 3: mod_base = OTHER; note = 2'-O-methyl ribonucleotide
  modified_base 21: mod_base = OTHER; note = 2'-O-methyl ribonucleotide
  modified_base 28: mod_base = OTHER; note = 2'-O-methyl ribonucleotide
  modified_base 29: mod_base = OTHER; note = 2'-O-methyl ribonucleotide
  modified_base 30: mod_base = OTHER; note = 2'-O-methyl ribonucleotide
  modified_base 31: mod_base = OTHER; note = 2'-O-methyl ribonucleotide
  modified_base 32: mod_base = OTHER; note = 2'-O-methyl ribonucleotide
  modified_base 34: mod_base = OTHER; note = 2'-O-methyl ribonucleotide
  modified_base 35: mod_base = OTHER; note = 2'-O-methyl ribonucleotide
  modified_base 36: mod_base = OTHER; note = 2'-O-methyl ribonucleotide
  modified_base 37: mod_base = OTHER; note = 2'-O-methyl ribonucleotide
  modified_base 38: mod_base = OTHER; note = 2'-O-methyl ribonucleotide
  modified_base 39: mod_base = OTHER; note = 2'-O-methyl ribonucleotide
  modified_base 40: mod_base = OTHER; note = 2'-O-methyl ribonucleotide
  modified_base 41: mod_base = OTHER; note = 2'-O-methyl ribonucleotide
  modified_base 42: mod_base = OTHER; note = 2'-O-methyl ribonucleotide
  modified_base 46: mod_base = OTHER; note = 2'-O-methyl ribonucleotide
  modified_base 48: mod_base = OTHER; note = 2'-O-methyl ribonucleotide
  modified_base 50: mod_base = OTHER; note = 2'-O-methyl ribonucleotide
  modified_base 52: mod_base = OTHER; note = 2'-O-methyl ribonucleotide
  modified_base 53: mod_base = OTHER; note = 2'-O-methyl ribonucleotide
  modified_base 54: mod_base = OTHER; note = 2'-O-methyl ribonucleotide
  modified_base 57: mod_base = OTHER; note = 2'-O-methyl ribonucleotide
  modified_base 61: mod_base = OTHER; note = 2'-O-methyl ribonucleotide
  modified_base 66: mod_base = OTHER; note = 2'-O-methyl ribonucleotide
  modified_base 67: mod_base = OTHER; note = 2'-O-methyl ribonucleotide
  modified_base 70: mod_base = OTHER; note = 2'-O-methyl ribonucleotide
  modified_base 71: mod_base = OTHER; note = 2'-O-methyl ribonucleotide
  modified_base 72: mod_base = OTHER; note = 2'-O-methyl ribonucleotide
  modified_base 74: mod_base = OTHER; note = 2'-O-methyl ribonucleotide
  modified_base 75: mod_base = OTHER; note = 2'-O-methyl ribonucleotide
  modified_base 76: mod_base = OTHER; note = 2'-O-methyl ribonucleotide
  modified_base 77: mod_base = OTHER; note = 2'-O-methyl ribonucleotide
  modified_base 78: mod_base = OTHER; note = 2'-O-methyl ribonucleotide
  modified_base 79: mod_base = OTHER; note = 2'-O-methyl ribonucleotide
  modified_base 80: mod_base = OTHER; note = 2'-O-methyl ribonucleotide
  modified_base 82: mod_base = OTHER; note = 2'-O-methyl ribonucleotide
  modified_base 83: mod_base = OTHER; note = 2'-O-methyl ribonucleotide
  modified_base 84: mod_base = OTHER; note = 2'-O-methyl ribonucleotide
  modified_base 85: mod_base = OTHER; note = 2'-O-methyl ribonucleotide
  modified_base 86: mod_base = OTHER; note = 2'-O-methyl ribonucleotide
  modified_base 87: mod_base = OTHER; note = 2'-O-methyl ribonucleotide
  modified_base 89: mod_base = OTHER; note = 2'-O-methyl ribonucleotide
  modified_base 92: mod_base = OTHER; note = 2'-O-methyl ribonucleotide
  modified_base 93: mod_base = OTHER; note = 2'-O-methyl ribonucleotide
  modified_base 94: mod_base = OTHER; note = 2'-O-methyl ribonucleotide
  modified_base 95: mod_base = OTHER; note = 2'-O-methyl ribonucleotide
  modified_base 96: mod_base = OTHER; note = 2'-O-methyl ribonucleotide
  modified_base 97: mod_base = OTHER; note = 2'-O-methyl ribonucleotide
  modified_base 98: mod_base = OTHER; note = 2'-O-methyl ribonucleotide
  modified_base 99: mod_base = OTHER; note = 2'-O-methyl ribonucleotide
  modified_base 100: mod_base = OTHER; note = 2'-O-methyl ribonucleotide
  modified_base 101: mod_base = OTHER; note = uniform ribonucleotides (A, C, G, inosine or U), deoxynucleotides (A, G, C, inosine or T), ribonebularine, 2'-O-methylnebularine or deoxynebularine
  modified_base 102: mod_base = OTHER; note = uniform ribonucleotides (A, C, G, inosine or U), deoxynucleotides (A, G, C, inosine or T), ribonebularine, 2'-O-methylnebularine or deoxynebularine
  modified_base 103: mod_base = OTHER; note = uniform ribonucleotides (A, C, G, inosine or U), deoxynucleotides (A, G, C, inosine or T), ribonebularine, 2'-O-methylnebularine or deoxynebularine
  modified_base 1..3: mod_base = OTHER; note = phosphorothioate linkage
  modified_base 45..46: mod_base = OTHER; note = phosphorothioate linkage
  modified_base 64..65: mod_base = OTHER; note = phosphorothioate linkage
  modified_base 97..100: mod_base = OTHER; note = phosphorothioate linkage
  misc_feature 1..100: note = RNA
  misc_feature 101..103: note = Optionally DNA or RNA

SEQ ID NO: 1835 - DNA, 103 bp, synthetic construct; identical to SEQ ID NO: 1797
  source 1..103: mol_type = other DNA
  modified_base 1: mod_base = OTHER; note = 2'-O-methyl ribonucleotide
  modified_base 2: mod_base = OTHER; note = 2'-O-methyl ribonucleotide
  modified_base 3: mod_base = OTHER; note = 2'-O-methyl ribonucleotide
  modified_base 21: mod_base = OTHER; note = 2'-O-methyl ribonucleotide
  modified_base 28: mod_base = OTHER; note = 2'-O-methyl ribonucleotide
  modified_base 29: mod_base = OTHER; note = 2'-O-methyl ribonucleotide
  modified_base 30: mod_base = OTHER; note = 2'-O-methyl ribonucleotide
  modified_base 31: mod_base = OTHER; note = 2'-O-methyl ribonucleotide
  modified_base 32: mod_base = OTHER; note = 2'-O-methyl ribonucleotide
  modified_base 34: mod_base = OTHER; note = 2'-O-methyl ribonucleotide
  modified_base 35: mod_base = OTHER; note = 2'-O-methyl ribonucleotide
  modified_base 36: mod_base = OTHER; note = 2'-O-methyl ribonucleotide
  modified_base 37: mod_base = OTHER; note = 2'-O-methyl ribonucleotide
  modified_base 38: mod_base = OTHER; note = 2'-O-methyl ribonucleotide
  modified_base 39: mod_base = OTHER; note = 2'-O-methyl ribonucleotide
  modified_base 40: mod_base = OTHER; note = 2'-O-methyl ribonucleotide
  modified_base 41: mod_base = OTHER; note = 2'-O-methyl ribonucleotide
  modified_base 42: mod_base = OTHER; note = 2'-O-methyl ribonucleotide
  modified_base 46: mod_base = OTHER; note = 2'-O-methyl ribonucleotide
  modified_base 48: mod_base = OTHER; note = 2'-O-methyl ribonucleotide
  modified_base 50: mod_base = OTHER; note = 2'-O-methyl ribonucleotide
  modified_base 52: mod_base = OTHER; note = 2'-O-methyl ribonucleotide
  modified_base 53: mod_base = OTHER; note = 2'-O-methyl ribonucleotide
  modified_base 54: mod_base = OTHER; note = 2'-O-methyl ribonucleotide
  modified_base 55: mod_base = OTHER; note = 2'-O-methyl ribonucleotide
  modified_base 56: mod_base = OTHER; note = 2'-O-methyl ribonucleotide
  modified_base 57: mod_base = OTHER; note = 2'-O-methyl ribonucleotide
  modified_base 60: mod_base = OTHER; note = 2'-O-methyl ribonucleotide
  modified_base 61: mod_base = OTHER; note = 2'-O-methyl ribonucleotide
  modified_base 66: mod_base = OTHER; note = 2'-O-methyl ribonucleotide
  modified_base 67: mod_base = OTHER; note = 2'-O-methyl ribonucleotide
  modified_base 70: mod_base = OTHER; note = 2'-O-methyl ribonucleotide
  modified_base 71: mod_base = OTHER; note = 2'-O-methyl ribonucleotide
  modified_base 72: mod_base = OTHER; note = 2'-O-methyl ribonucleotide
  modified_base 74: mod_base = OTHER; note = 2'-O-methyl ribonucleotide
  modified_base 75: mod_base = OTHER; note = 2'-O-methyl ribonucleotide
  modified_base 76: mod_base = OTHER; note = 2'-O-methyl ribonucleotide
  modified_base 77: mod_base = OTHER; note = 2'-O-methyl ribonucleotide
  modified_base 78: mod_base = OTHER; note = 2'-O-methyl ribonucleotide
  modified_base 79: mod_base = OTHER; note = 2'-O-methyl ribonucleotide
  modified_base 80: mod_base = OTHER; note = 2'-O-methyl ribonucleotide
  modified_base 81: mod_base = OTHER; note = 2'-O-methyl ribonucleotide
  modified_base 83: mod_base = OTHER; note = 2'-O-methyl ribonucleotide
  modified_base 84: mod_base = OTHER; note = 2'-O-methyl ribonucleotide
  modified_base 85: mod_base = OTHER; note = 2'-O-methyl ribonucleotide
  modified_base 86: mod_base = OTHER; note = 2'-O-methyl ribonucleotide
  modified_base 87: mod_base = OTHER; note = 2'-O-methyl ribonucleotide
  modified_base 88: mod_base = OTHER; note = 2'-O-methyl ribonucleotide
  modified_base 89: mod_base = OTHER; note = 2'-O-methyl ribonucleotide
  modified_base 90: mod_base = OTHER; note = 2'-O-methyl ribonucleotide
  modified_base 91: mod_base = OTHER; note = 2'-O-methyl ribonucleotide
  modified_base 92: mod_base = OTHER; note = 2'-O-methyl ribonucleotide
  modified_base 93: mod_base = OTHER; note = 2'-O-methyl ribonucleotide
  modified_base 94: mod_base = OTHER; note = 2'-O-methyl ribonucleotide
  modified_base 95: mod_base = OTHER; note = 2'-O-methyl ribonucleotide
  modified_base 96: mod_base = OTHER; note = 2'-O-methyl ribonucleotide
  modified_base 97: mod_base = OTHER; note = 2'-O-methyl ribonucleotide
  modified_base 98: mod_base = OTHER; note = 2'-O-methyl ribonucleotide
  modified_base 99: mod_base = OTHER; note = 2'-O-methyl ribonucleotide
  modified_base 100: mod_base = OTHER; note = 2'-O-methyl ribonucleotide
  modified_base 101: mod_base = OTHER; note = uniform ribonucleotides (A, C, G, inosine or U), deoxynucleotides (A, G, C, inosine or T), ribonebularine, 2'-O-methylnebularine or deoxynebularine
  modified_base 102: mod_base = OTHER; note = uniform ribonucleotides (A, C, G, inosine or U), deoxynucleotides (A, G, C, inosine or T), ribonebularine, 2'-O-methylnebularine or deoxynebularine
  modified_base 103: mod_base = OTHER; note = uniform ribonucleotides (A, C, G, inosine or U), deoxynucleotides (A, G, C, inosine or T), ribonebularine, 2'-O-methylnebularine or deoxynebularine
  modified_base 1..3: mod_base = OTHER; note = phosphorothioate linkage
  modified_base 45..46: mod_base = OTHER; note = phosphorothioate linkage
  modified_base 64..65: mod_base = OTHER; note = phosphorothioate linkage
  modified_base 97..100: mod_base = OTHER; note = phosphorothioate linkage
  misc_feature 1..100: note = RNA
  misc_feature 101..103: note = Optionally DNA or RNA

SEQ ID NO: 1836 - DNA, 103 bp, synthetic construct; identical to SEQ ID NO: 1795
  source 1..103: mol_type = other DNA
  modified_base 1: mod_base = OTHER; note = 2'-O-methyl ribonucleotide
  modified_base 2: mod_base = OTHER; note = 2'-O-methyl ribonucleotide
  modified_base 3: mod_base = OTHER; note = 2'-O-methyl ribonucleotide
  modified_base 21: mod_base = OTHER; note = 2'-O-methyl ribonucleotide
  modified_base 28: mod_base = OTHER; note = 2'-O-methyl ribonucleotide
  modified_base 29: mod_base = OTHER; note = 2'-O-methyl ribonucleotide
  modified_base 30: mod_base = OTHER; note = 2'-O-methyl ribonucleotide
  modified_base 31: mod_base = OTHER; note = 2'-O-methyl ribonucleotide
  modified_base 32: mod_base = OTHER; note = 2'-O-methyl ribonucleotide
  modified_base 34: mod_base = OTHER; note = 2'-O-methyl ribonucleotide
  modified_base 35: mod_base = OTHER; note = 2'-O-methyl ribonucleotide
  modified_base 36: mod_base = OTHER; note = 2'-O-methyl ribonucleotide
  modified_base 37: mod_base = OTHER; note = 2'-O-methyl ribonucleotide
  modified_base 38: mod_base = OTHER; note = 2'-O-methyl ribonucleotide
  modified_base 39: mod_base = OTHER; note = 2'-O-methyl ribonucleotide
  modified_base 40: mod_base = OTHER; note = 2'-O-methyl ribonucleotide
  modified_base 41: mod_base = OTHER; note = 2'-O-methyl ribonucleotide
  modified_base 42: mod_base = OTHER; note = 2'-O-methyl ribonucleotide
  modified_base 46: mod_base = OTHER; note = 2'-O-methyl ribonucleotide
  modified_base 48: mod_base = OTHER; note = 2'-O-methyl ribonucleotide
  modified_base 50: mod_base = OTHER; note = 2'-O-methyl ribonucleotide
  modified_base 52: mod_base = OTHER; note = 2'-O-methyl ribonucleotide
  modified_base 53: mod_base = OTHER; note = 2'-O-methyl ribonucleotide
  modified_base 54: mod_base = OTHER; note = 2'-O-methyl ribonucleotide
  modified_base 57: mod_base = OTHER; note = 2'-O-methyl ribonucleotide
  modified_base 61: mod_base = OTHER; note = 2'-O-methyl ribonucleotide
  modified_base 66: mod_base = OTHER; note = 2'-O-methyl ribonucleotide
  modified_base 67: mod_base = OTHER; note = 2'-O-methyl ribonucleotide
  modified_base 70: mod_base = OTHER; note = 2'-O-methyl ribonucleotide
  modified_base 71: mod_base = OTHER; note = 2'-O-methyl ribonucleotide
  modified_base 72: mod_base = OTHER; note = 2'-O-methyl ribonucleotide
  modified_base 74: mod_base = OTHER; note = 2'-O-methyl ribonucleotide
  modified_base 75: mod_base = OTHER; note = 2'-O-methyl ribonucleotide
  modified_base 76: mod_base = OTHER; note = 2'-O-methyl ribonucleotide
  modified_base 77: mod_base = OTHER; note = 2'-O-methyl ribonucleotide
  modified_base 78: mod_base = OTHER; note = 2'-O-methyl ribonucleotide
  modified_base 79: mod_base = OTHER; note = 2'-O-methyl ribonucleotide
  modified_base 80: mod_base = OTHER; note = 2'-O-methyl ribonucleotide
  modified_base 82: mod_base = OTHER; note = 2'-O-methyl ribonucleotide
  modified_base 83: mod_base = OTHER; note = 2'-O-methyl ribonucleotide
  modified_base 84: mod_base = OTHER; note = 2'-O-methyl ribonucleotide
  modified_base 85: mod_base = OTHER; note = 2'-O-methyl ribonucleotide
  modified_base 86: mod_base = OTHER; note = 2'-O-methyl ribonucleotide
  modified_base 87: mod_base = OTHER; note = 2'-O-methyl ribonucleotide
  modified_base 89: mod_base = OTHER; note = 2'-O-methyl ribonucleotide
  modified_base 92: mod_base = OTHER; note = 2'-O-methyl ribonucleotide
  modified_base 93: mod_base = OTHER; note = 2'-O-methyl ribonucleotide
  modified_base 94: mod_base = OTHER; note = 2'-O-methyl ribonucleotide
  modified_base 95: mod_base = OTHER; note = 2'-O-methyl ribonucleotide
  modified_base 96: mod_base = OTHER; note = 2'-O-methyl ribonucleotide
  modified_base 97: mod_base = OTHER; note = 2'-O-methyl ribonucleotide
  modified_base 98: mod_base = OTHER; note = 2'-O-methyl ribonucleotide
  modified_base 99: mod_base = OTHER; note = 2'-O-methyl ribonucleotide
  modified_base 100: mod_base = OTHER; note = 2'-O-methyl ribonucleotide
  modified_base 101: mod_base = OTHER; note = uniform ribonucleotides (A, C, G, inosine or U), deoxynucleotides (A, G, C, inosine or T), ribonebularine, 2'-O-methylnebularine or deoxynebularine
  modified_base 102: mod_base = OTHER; note = uniform ribonucleotides (A, C, G, inosine or U), deoxynucleotides (A, G, C, inosine or T), ribonebularine, 2'-O-methylnebularine or deoxynebularine
  modified_base 103: mod_base = OTHER; note = uniform ribonucleotides (A, C, G, inosine or U), deoxynucleotides (A, G, C, inosine or T), ribonebularine, 2'-O-methylnebularine or deoxynebularine
  modified_base 1..3: mod_base = OTHER; note = phosphorothioate linkage
  modified_base 25..26: mod_base = OTHER; note = phosphorothioate linkage
  modified_base 45..46: mod_base = OTHER; note = phosphorothioate linkage
  modified_base 97..100: mod_base = OTHER; note = phosphorothioate linkage
  misc_feature 1..100: note = RNA
  misc_feature 101..103: note = Optionally DNA or RNA

SEQ ID NO: 1837 - DNA, 103 bp, synthetic construct; identical to SEQ ID NO: 1796
  source 1..103: mol_type = other DNA
  modified_base 1: mod_base = OTHER; note = 2'-O-methyl ribonucleotide
  modified_base 2: mod_base = OTHER; note = 2'-O-methyl ribonucleotide
  modified_base 3: mod_base = OTHER; note = 2'-O-methyl ribonucleotide
  modified_base 21: mod_base = OTHER; note = 2'-O-methyl ribonucleotide
  modified_base 28: mod_base = OTHER; note = 2'-O-methyl ribonucleotide
  modified_base 29: mod_base = OTHER; note = 2'-O-methyl ribonucleotide
  modified_base 30: mod_base = OTHER; note = 2'-O-methyl ribonucleotide
  modified_base 31: mod_base = OTHER; note = 2'-O-methyl ribonucleotide
  modified_base 32: mod_base = OTHER; note = 2'-O-methyl ribonucleotide
  modified_base 34: mod_base = OTHER; note = 2'-O-methyl ribonucleotide
  modified_base 35: mod_base = OTHER; note = 2'-O-methyl ribonucleotide
  modified_base 36: mod_base = OTHER; note = 2'-O-methyl ribonucleotide
  modified_base 37: mod_base = OTHER; note = 2'-O-methyl ribonucleotide
  modified_base 38: mod_base = OTHER; note = 2'-O-methyl ribonucleotide
  modified_base 39: mod_base = OTHER; note = 2'-O-methyl ribonucleotide
  modified_base 40: mod_base = OTHER; note = 2'-O-methyl ribonucleotide
  modified_base 41: mod_base = OTHER; note = 2'-O-methyl ribonucleotide
  modified_base 42: mod_base = OTHER; note = 2'-O-methyl ribonucleotide
  modified_base 46: mod_base = OTHER; note = 2'-O-methyl ribonucleotide
  modified_base 48: mod_base = OTHER; note = 2'-O-methyl ribonucleotide
  modified_base 50: mod_base = OTHER; note = 2'-O-methyl ribonucleotide
  modified_base 52: mod_base = OTHER; note = 2'-O-methyl ribonucleotide
  modified_base 53: mod_base = OTHER; note = 2'-O-methyl ribonucleotide
  modified_base 54: mod_base = OTHER; note = 2'-O-methyl ribonucleotide
  modified_base 57: mod_base = OTHER; note = 2'-O-methyl ribonucleotide
  modified_base 61: mod_base = OTHER; note = 2'-O-methyl ribonucleotide
  modified_base 66: mod_base = OTHER; note = 2'-O-methyl ribonucleotide
  modified_base 67: mod_base = OTHER; note = 2'-O-methyl ribonucleotide
  modified_base 70: mod_base = OTHER; note = 2'-O-methyl ribonucleotide
  modified_base 71: mod_base = OTHER; note = 2'-O-methyl ribonucleotide
  modified_base 72: mod_base = OTHER; note = 2'-O-methyl ribonucleotide
  modified_base 74: mod_base = OTHER; note = 2'-O-methyl ribonucleotide
  modified_base 75: mod_base = OTHER; note = 2'-O-methyl ribonucleotide
  modified_base 76: mod_base = OTHER; note = 2'-O-methyl ribonucleotide
  modified_base 77: mod_base = OTHER; note = 2'-O-methyl ribonucleotide
  modified_base 78: mod_base = OTHER; note = 2'-O-methyl ribonucleotide
  modified_base 79: mod_base = OTHER; note = 2'-O-methyl ribonucleotide
  modified_base 80: mod_base = OTHER; note = 2'-O-methyl ribonucleotide
  modified_base 82: mod_base = OTHER; note = 2'-O-methyl ribonucleotide
  modified_base 83: mod_base = OTHER; note = 2'-O-methyl ribonucleotide
  modified_base 84: mod_base = OTHER; note = 2'-O-methyl ribonucleotide
  modified_base 85: mod_base = OTHER; note = 2'-O-methyl ribonucleotide
  modified_base 86: mod_base = OTHER; note = 2'-O-methyl ribonucleotide
  modified_base 87: mod_base = OTHER; note = 2'-O-methyl ribonucleotide
  modified_base 89: mod_base = OTHER; note = 2'-O-methyl ribonucleotide
  modified_base 92: mod_base = OTHER; note = 2'-O-methyl ribonucleotide
  modified_base 93: mod_base = OTHER; note = 2'-O-methyl ribonucleotide
  modified_base 94: mod_base = OTHER; note = 2'-O-methyl ribonucleotide
  modified_base 95: mod_base = OTHER; note = 2'-O-methyl ribonucleotide
  modified_base 96: mod_base = OTHER; note = 2'-O-methyl ribonucleotide
  modified_base 97: mod_base = OTHER; note = 2'-O-methyl ribonucleotide
  modified_base 98: mod_base = OTHER; note = 2'-O-methyl ribonucleotide
  modified_base 99: mod_base = OTHER; note = 2'-O-methyl ribonucleotide
  modified_base 100: mod_base = OTHER; note = 2'-O-methyl ribonucleotide
  modified_base 101: mod_base = OTHER; note = uniform ribonucleotides (A, C, G, inosine or U), deoxynucleotides (A, G, C, inosine or T), ribonebularine, 2'-O-methylnebularine or deoxynebularine
  modified_base 102: mod_base = OTHER; note = uniform ribonucleotides (A, C, G, inosine or U), deoxynucleotides (A, G, C, inosine or T), ribonebularine, 2'-O-methylnebularine or deoxynebularine
  modified_base 103: mod_base = OTHER; note = uniform ribonucleotides (A, C, G, inosine or U), deoxynucleotides (A, G, C, inosine or T), ribonebularine, 2'-O-methylnebularine or deoxynebularine
  modified_base 1..3: mod_base = OTHER; note = phosphorothioate linkage
  modified_base 25..26: mod_base = OTHER; note = phosphorothioate linkage
  modified_base 45..46: mod_base = OTHER; note = phosphorothioate linkage
  modified_base 97..100: mod_base = OTHER; note = phosphorothioate linkage
  misc_feature 1..100: note = RNA
  misc_feature 101..103: note = Optionally DNA or RNA

SEQ ID NO: 1838 - DNA, 103 bp, synthetic construct; identical to SEQ ID NO: 1797
  source 1..103: mol_type = other DNA
  modified_base 1: mod_base = OTHER; note = 2'-O-methyl ribonucleotide
  modified_base 2: mod_base = OTHER; note = 2'-O-methyl ribonucleotide
  modified_base 3: mod_base = OTHER; note = 2'-O-methyl ribonucleotide
  modified_base 21: mod_base = OTHER; note = 2'-O-methyl ribonucleotide
  modified_base 28: mod_base = OTHER; note = 2'-O-methyl ribonucleotide
  modified_base 29: mod_base = OTHER; note = 2'-O-methyl ribonucleotide
  modified_base 30: mod_base = OTHER; note = 2'-O-methyl ribonucleotide
  modified_base 31: mod_base = OTHER; note = 2'-O-methyl ribonucleotide
  modified_base 32: mod_base = OTHER; note = 2'-O-methyl ribonucleotide
  modified_base 34: mod_base = OTHER; note = 2'-O-methyl ribonucleotide
  modified_base 35: mod_base = OTHER; note = 2'-O-methyl ribonucleotide
  modified_base 36: mod_base = OTHER; note = 2'-O-methyl ribonucleotide
  modified_base 37: mod_base = OTHER; note = 2'-O-methyl ribonucleotide
  modified_base 38: mod_base = OTHER; note = 2'-O-methyl ribonucleotide
  modified_base 39: mod_base = OTHER; note = 2'-O-methyl ribonucleotide
  modified_base 40: mod_base = OTHER; note = 2'-O-methyl ribonucleotide
  modified_base 41: mod_base = OTHER; note = 2'-O-methyl ribonucleotide
  modified_base 42: mod_base = OTHER; note = 2'-O-methyl ribonucleotide
  modified_base 46: mod_base = OTHER; note = 2'-O-methyl ribonucleotide
  modified_base 48: mod_base = OTHER; note = 2'-O-methyl ribonucleotide
  modified_base 50: mod_base = OTHER; note = 2'-O-methyl ribonucleotide
  modified_base 52: mod_base = OTHER; note = 2'-O-methyl ribonucleotide
  modified_base 53: mod_base = OTHER; note = 2'-O-methyl ribonucleotide
  modified_base 54: mod_base = OTHER; note = 2'-O-methyl ribonucleotide
  modified_base 55: mod_base = OTHER; note = 2'-O-methyl ribonucleotide
  modified_base 56: mod_base = OTHER; note = 2'-O-methyl ribonucleotide
  modified_base 57: mod_base = OTHER; note = 2'-O-methyl ribonucleotide
  modified_base 60: mod_base = OTHER; note = 2'-O-methyl ribonucleotide
  modified_base 61: mod_base = OTHER; note = 2'-O-methyl ribonucleotide
  modified_base 66: mod_base = OTHER; note = 2'-O-methyl ribonucleotide
  modified_base 67: mod_base = OTHER; note = 2'-O-methyl ribonucleotide
  modified_base 70: mod_base = OTHER; note = 2'-O-methyl ribonucleotide
  modified_base 71: mod_base = OTHER; note = 2'-O-methyl ribonucleotide
  modified_base 72: mod_base = OTHER; note = 2'-O-methyl ribonucleotide
  modified_base 74: mod_base = OTHER; note = 2'-O-methyl ribonucleotide
  modified_base 75: mod_base = OTHER; note = 2'-O-methyl ribonucleotide
  modified_base 76: mod_base = OTHER; note = 2'-O-methyl ribonucleotide
  modified_base 77: mod_base = OTHER; note = 2'-O-methyl ribonucleotide
  modified_base 78: mod_base = OTHER; note = 2'-O-methyl ribonucleotide
  modified_base 79: mod_base = OTHER; note = 2'-O-methyl ribonucleotide
  modified_base 80: mod_base = OTHER; note = 2'-O-methyl ribonucleotide
  modified_base 81: mod_base = OTHER; note = 2'-O-methyl ribonucleotide
  modified_base 83: mod_base = OTHER; note = 2'-O-methyl ribonucleotide
  modified_base 84: mod_base = OTHER; note = 2'-O-methyl ribonucleotide
  modified_base 85: mod_base = OTHER; note = 2'-O-methyl ribonucleotide
  modified_base 86: mod_base = OTHER; note = 2'-O-methyl ribonucleotide
  modified_base 87: mod_base = OTHER; note = 2'-O-methyl ribonucleotide
  modified_base 88: mod_base = OTHER; note = 2'-O-methyl ribonucleotide
  modified_base 89: mod_base = OTHER; note = 2'-O-methyl ribonucleotide
  modified_base 90: mod_base = OTHER; note = 2'-O-methyl ribonucleotide
  modified_base 91: mod_base = OTHER; note = 2'-O-methyl ribonucleotide
  modified_base 92: mod_base = OTHER; note = 2'-O-methyl ribonucleotide
  modified_base 93: mod_base = OTHER; note = 2'-O-methyl ribonucleotide
  modified_base 94: mod_base = OTHER; note = 2'-O-methyl ribonucleotide
  modified_base 95: mod_base = OTHER; note = 2'-O-methyl ribonucleotide
  modified_base 96: mod_base = OTHER; note = 2'-O-methyl ribonucleotide
  modified_base 97: mod_base = OTHER; note = 2'-O-methyl ribonucleotide
  modified_base 98: mod_base = OTHER; note = 2'-O-methyl ribonucleotide
  modified_base 99: mod_base = OTHER; note = 2'-O-methyl ribonucleotide
  modified_base 100: mod_base = OTHER; note = 2'-O-methyl ribonucleotide
  modified_base 101: mod_base = OTHER; note = uniform ribonucleotides (A, C, G, inosine or U), deoxynucleotides (A, G, C, inosine or T), ribonebularine, 2'-O-methylnebularine or deoxynebularine
  modified_base 102: mod_base = OTHER; note = uniform ribonucleotides (A, C, G, inosine or U), deoxynucleotides (A, G, C, inosine or T), ribonebularine, 2'-O-methylnebularine or deoxynebularine
  modified_base 103: mod_base = OTHER; note = uniform ribonucleotides (A, C, G, inosine or U), deoxynucleotides (A, G, C, inosine or T), ribonebularine, 2'-O-methylnebularine or deoxynebularine
  modified_base 1..3: mod_base = OTHER; note = phosphorothioate linkage
  modified_base 25..26: mod_base = OTHER; note = phosphorothioate linkage
  modified_base 45..46: mod_base = OTHER; note = phosphorothioate linkage
  modified_base 97..100: mod_base = OTHER; note = phosphorothioate linkage
  misc_feature 1..100: note = RNA
  misc_feature 101..103: note = Optionally DNA or RNA

SEQ ID NO: 1839 - DNA, 103 bp, synthetic construct; identical to SEQ ID NO: 1795
  source 1..103: mol_type = other DNA
  modified_base 1: mod_base = OTHER; note = 2'-O-methyl ribonucleotide
  modified_base 2: mod_base = OTHER; note = 2'-O-methyl ribonucleotide
  modified_base 3: mod_base = OTHER; note = 2'-O-methyl ribonucleotide
  modified_base 21: mod_base = OTHER; note = 2'-O-methyl ribonucleotide
  modified_base 28: mod_base = OTHER; note = 2'-O-methyl ribonucleotide
  modified_base 29: mod_base = OTHER; note = 2'-O-methyl ribonucleotide
  modified_base 30: mod_base = OTHER; note = 2'-O-methyl ribonucleotide
  modified_base 31: mod_base = OTHER; note = 2'-O-methyl ribonucleotide
  modified_base 32: mod_base = OTHER; note = 2'-O-methyl ribonucleotide
  modified_base 34: mod_base = OTHER; note = 2'-O-methyl ribonucleotide
  modified_base 35: mod_base = OTHER; note = 2'-O-methyl ribonucleotide
  modified_base 36: mod_base = OTHER; note = 2'-O-methyl ribonucleotide
  modified_base 37: mod_base = OTHER; note = 2'-O-methyl ribonucleotide
  modified_base 38: mod_base = OTHER; note = 2'-O-methyl ribonucleotide
  modified_base 39: mod_base = OTHER; note = 2'-O-methyl ribonucleotide
  modified_base 40: mod_base = OTHER; note = 2'-O-methyl ribonucleotide
  modified_base 41: mod_base = OTHER; note = 2'-O-methyl ribonucleotide
  modified_base 42: mod_base = OTHER; note = 2'-O-methyl ribonucleotide
  modified_base 46: mod_base = OTHER; note = 2'-O-methyl ribonucleotide
  modified_base 48: mod_base = OTHER; note = 2'-O-methyl ribonucleotide
  modified_base 50: mod_base = OTHER; note = 2'-O-methyl ribonucleotide
  modified_base 52: mod_base = OTHER; note = 2'-O-methyl ribonucleotide
  modified_base 53: mod_base = OTHER; note = 2'-O-methyl ribonucleotide
  modified_base 54: mod_base = OTHER; note = 2'-O-methyl ribonucleotide
  modified_base 57: mod_base = OTHER; note = 2'-O-methyl ribonucleotide
  modified_base 61: mod_base = OTHER; note = 2'-O-methyl ribonucleotide
  modified_base 66: mod_base = OTHER; note = 2'-O-methyl ribonucleotide
  modified_base 67: mod_base = OTHER; note = 2'-O-methyl ribonucleotide
  modified_base 70: mod_base = OTHER; note = 2'-O-methyl ribonucleotide
  modified_base 71: mod_base = OTHER; note = 2'-O-methyl ribonucleotide
  modified_base 72: mod_base = OTHER; note = 2'-O-methyl ribonucleotide
  modified_base 74: mod_base = OTHER; note = 2'-O-methyl ribonucleotide
  modified_base 75: mod_base = OTHER; note = 2'-O-methyl ribonucleotide
  modified_base 76: mod_base = OTHER; note = 2'-O-methyl ribonucleotide
  modified_base 77: mod_base = OTHER; note = 2'-O-methyl ribonucleotide
  modified_base 78: mod_base = OTHER; note = 2'-O-methyl ribonucleotide
  modified_base 79: mod_base = OTHER; note = 2'-O-methyl ribonucleotide
  modified_base 80: mod_base = OTHER; note = 2'-O-methyl ribonucleotide
  modified_base 82: mod_base = OTHER; note = 2'-O-methyl ribonucleotide
  modified_base 83: mod_base = OTHER; note = 2'-O-methyl ribonucleotide
  modified_base 84: mod_base = OTHER; note = 2'-O-methyl ribonucleotide
  modified_base 85: mod_base = OTHER; note = 2'-O-methyl ribonucleotide
  modified_base 86: mod_base = OTHER; note = 2'-O-methyl ribonucleotide
  modified_base 87: mod_base = OTHER; note = 2'-O-methyl ribonucleotide
  modified_base 89: mod_base = OTHER; note = 2'-O-methyl ribonucleotide
  modified_base 92: mod_base = OTHER; note = 2'-O-methyl ribonucleotide
  modified_base 93: mod_base = OTHER; note = 2'-O-methyl ribonucleotide
  modified_base 94: mod_base = OTHER; note = 2'-O-methyl ribonucleotide
  modified_base 95: mod_base = OTHER; note = 2'-O-methyl ribonucleotide
  modified_base 96: mod_base = OTHER; note = 2'-O-methyl ribonucleotide
  modified_base 97: mod_base = OTHER; note = 2'-O-methyl ribonucleotide
  modified_base 98: mod_base = OTHER; note = 2'-O-methyl ribonucleotide
  modified_base 99: mod_base = OTHER; note = 2'-O-methyl ribonucleotide
  modified_base 100: mod_base = OTHER; note = 2'-O-methyl ribonucleotide
  modified_base 101: mod_base = OTHER; note = uniform ribonucleotides (A, C, G, inosine or U), deoxynucleotides (A, G, C, inosine or T), ribonebularine, 2'-O-methylnebularine or deoxynebularine
  modified_base 102: mod_base = OTHER; note = uniform ribonucleotides (A, C, G, inosine or U), deoxynucleotides (A, G, C, inosine or T), ribonebularine, 2'-O-methylnebularine or deoxynebularine
  modified_base 103: mod_base = OTHER; note = uniform ribonucleotides (A, C, G, inosine or U), deoxynucleotides (A, G, C, inosine or T), ribonebularine, 2'-O-methylnebularine or deoxynebularine
  modified_base 1..3: mod_base = OTHER; note = phosphorothioate linkage
  modified_base 25..26: mod_base = OTHER; note = phosphorothioate linkage
  modified_base 64..65: mod_base = OTHER; note = phosphorothioate linkage
  modified_base 97..100: mod_base = OTHER; note = phosphorothioate linkage
  misc_feature 1..100: note = RNA
  misc_feature 101..103: note = Optionally DNA or RNA

SEQ ID NO: 1840 - DNA, 103 bp, synthetic construct; identical to SEQ ID NO: 1796
  source 1..103: mol_type = other DNA
  modified_base 1: mod_base = OTHER; note = 2'-O-methyl ribonucleotide
  modified_base 2: mod_base = OTHER; note = 2'-O-methyl ribonucleotide
  modified_base 3: mod_base = OTHER; note = 2'-O-methyl ribonucleotide
  modified_base 21: mod_base = OTHER; note = 2'-O-methyl ribonucleotide
  modified_base 28: mod_base = OTHER; note = 2'-O-methyl ribonucleotide
  modified_base 29: mod_base = OTHER; note = 2'-O-methyl ribonucleotide
  modified_base 30: mod_base = OTHER; note = 2'-O-methyl ribonucleotide
  modified_base 31: mod_base = OTHER; note = 2'-O-methyl ribonucleotide
  modified_base 32: mod_base = OTHER; note = 2'-O-methyl ribonucleotide
  modified_base 34: mod_base = OTHER; note = 2'-O-methyl ribonucleotide
  modified_base 35: mod_base = OTHER; note = 2'-O-methyl ribonucleotide
  modified_base 36: mod_base = OTHER; note = 2'-O-methyl ribonucleotide
  modified_base 37: mod_base = OTHER; note = 2'-O-methyl ribonucleotide
  modified_base 38: mod_base = OTHER; note = 2'-O-methyl ribonucleotide
  modified_base 39: mod_base = OTHER; note = 2'-O-methyl ribonucleotide
  modified_base 40: mod_base = OTHER; note = 2'-O-methyl ribonucleotide
  modified_base 41: mod_base = OTHER; note = 2'-O-methyl ribonucleotide
  modified_base 42: mod_base = OTHER; note = 2'-O-methyl ribonucleotide
  modified_base 46: mod_base = OTHER; note = 2'-O-methyl ribonucleotide
  modified_base 48: mod_base = OTHER; note = 2'-O-methyl ribonucleotide
  modified_base 50: mod_base = OTHER; note = 2'-O-methyl ribonucleotide
  modified_base 52: mod_base = OTHER; note = 2'-O-methyl ribonucleotide
  modified_base 53: mod_base = OTHER; note = 2'-O-methyl ribonucleotide
  modified_base 54: mod_base = OTHER; note = 2'-O-methyl ribonucleotide
  modified_base 57: mod_base = OTHER; note = 2'-O-methyl ribonucleotide
  modified_base 61: mod_base = OTHER; note = 2'-O-methyl ribonucleotide
  modified_base 66: mod_base = OTHER; note = 2'-O-methyl ribonucleotide
  modified_base 67: mod_base = OTHER; note = 2'-O-methyl ribonucleotide
  modified_base 70: mod_base = OTHER; note = 2'-O-methyl ribonucleotide
  modified_base 71: mod_base = OTHER; note = 2'-O-methyl ribonucleotide
  modified_base 72: mod_base = OTHER; note = 2'-O-methyl ribonucleotide
  modified_base 74: mod_base = OTHER; note = 2'-O-methyl ribonucleotide
  modified_base 75: mod_base = OTHER; note = 2'-O-methyl ribonucleotide
  modified_base 76: mod_base = OTHER; note = 2'-O-methyl ribonucleotide
  modified_base 77: mod_base = OTHER; note = 2'-O-methyl ribonucleotide
  modified_base 78: mod_base = OTHER; note = 2'-O-methyl ribonucleotide
  modified_base 79: mod_base = OTHER; note = 2'-O-methyl ribonucleotide
  modified_base 80: mod_base = OTHER; note = 2'-O-methyl ribonucleotide
  modified_base 82: mod_base = OTHER; note = 2'-O-methyl ribonucleotide
  modified_base 83: mod_base = OTHER; note = 2'-O-methyl ribonucleotide
  modified_base 84: mod_base = OTHER; note = 2'-O-methyl ribonucleotide
  modified_base 85: mod_base = OTHER; note = 2'-O-methyl ribonucleotide
  modified_base 86: mod_base = OTHER; note = 2'-O-methyl ribonucleotide
  modified_base 87: mod_base = OTHER; note = 2'-O-methyl ribonucleotide
  modified_base 89: mod_base = OTHER; note = 2'-O-methyl ribonucleotide
  modified_base 92: mod_base = OTHER; note = 2'-O-methyl ribonucleotide
  modified_base 93: mod_base = OTHER; note = 2'-O-methyl ribonucleotide
  modified_base 94: mod_base = OTHER; note = 2'-O-methyl ribonucleotide
  modified_base 95: mod_base = OTHER; note = 2'-O-methyl ribonucleotide
  modified_base 96: mod_base = OTHER; note = 2'-O-methyl ribonucleotide
  modified_base 97: mod_base = OTHER; note = 2'-O-methyl ribonucleotide
  modified_base 98: mod_base = OTHER; note = 2'-O-methyl ribonucleotide
  modified_base 99: mod_base = OTHER; note = 2'-O-methyl ribonucleotide
  modified_base 100: mod_base = OTHER; note = 2'-O-methyl ribonucleotide
  modified_base 101: mod_base = OTHER; note = uniform ribonucleotides (A, C, G, inosine or U), deoxynucleotides (A, G, C, inosine or T), ribonebularine, 2'-O-methylnebularine or deoxynebularine
  modified_base 102: mod_base = OTHER; note = uniform ribonucleotides (A, C, G, inosine or U), deoxynucleotides (A, G, C, inosine or T), ribonebularine, 2'-O-methylnebularine or deoxynebularine
  modified_base 103: mod_base = OTHER; note = uniform ribonucleotides (A, C, G, inosine or U), deoxynucleotides (A, G, C, inosine or T), ribonebularine, 2'-O-methylnebularine or deoxynebularine
  modified_base 1..3: mod_base = OTHER; note = phosphorothioate linkage
  modified_base 25..26: mod_base = OTHER; note = phosphorothioate linkage
  modified_base 64..65: mod_base = OTHER; note = phosphorothioate linkage
  modified_base 97..100: mod_base = OTHER; note = phosphorothioate linkage
  misc_feature 1..100: note = RNA
  misc_feature 101..103: note = Optionally DNA or RNA

SEQ ID NO: 1841 - DNA, 103 bp, synthetic construct; identical to SEQ ID NO: 1797
  source 1..103: mol_type = other DNA
  modified_base 1: mod_base = OTHER; note = 2'-O-methyl ribonucleotide
  modified_base 2: mod_base = OTHER; note = 2'-O-methyl ribonucleotide
  modified_base 3: mod_base = OTHER; note = 2'-O-methyl ribonucleotide
  modified_base 21: mod_base = OTHER; note = 2'-O-methyl ribonucleotide
  modified_base 28: mod_base = OTHER; note = 2'-O-methyl ribonucleotide
  modified_base 29: mod_base = OTHER; note = 2'-O-methyl ribonucleotide
  modified_base 30: mod_base = OTHER; note = 2'-O-methyl ribonucleotide
  modified_base 31: mod_base = OTHER; note = 2'-O-methyl ribonucleotide
  modified_base 32: mod_base = OTHER; note = 2'-O-methyl ribonucleotide
  modified_base 34: mod_base = OTHER; note = 2'-O-methyl ribonucleotide
  modified_base 35: mod_base = OTHER; note = 2'-O-methyl ribonucleotide
  modified_base 36: mod_base = OTHER; note = 2'-O-methyl ribonucleotide
  modified_base 37: mod_base = OTHER; note = 2'-O-methyl ribonucleotide
  modified_base 38: mod_base = OTHER; note = 2'-O-methyl ribonucleotide
  modified_base 39: mod_base = OTHER; note = 2'-O-methyl ribonucleotide
  modified_base 40: mod_base = OTHER; note = 2'-O-methyl ribonucleotide
  modified_base 41: mod_base = OTHER; note = 2'-O-methyl ribonucleotide
  modified_base 42: mod_base = OTHER; note = 2'-O-methyl ribonucleotide
  modified_base 46: mod_base = OTHER; note = 2'-O-methyl ribonucleotide
  modified_base 48: mod_base = OTHER; note = 2'-O-methyl ribonucleotide
  modified_base 50: mod_base = OTHER; note = 2'-O-methyl ribonucleotide
  modified_base 52: mod_base = OTHER; note = 2'-O-methyl ribonucleotide
  modified_base 53: mod_base = OTHER; note = 2'-O-methyl ribonucleotide
  modified_base 54: mod_base = OTHER; note = 2'-O-methyl ribonucleotide
  modified_base 55: mod_base = OTHER; note = 2'-O-methyl ribonucleotide
  modified_base 56: mod_base = OTHER; note = 2'-O-methyl ribonucleotide
  modified_base 57: mod_base = OTHER; note = 2'-O-methyl ribonucleotide
  modified_base 60: mod_base = OTHER; note = 2'-O-methyl ribonucleotide
  modified_base 61: mod_base = OTHER; note = 2'-O-methyl ribonucleotide
  modified_base 66: mod_base = OTHER; note = 2'-O-methyl ribonucleotide
  modified_base 67: mod_base = OTHER; note = 2'-O-methyl ribonucleotide
  modified_base 70: mod_base = OTHER; note = 2'-O-methyl ribonucleotide
  modified_base 71: mod_base = OTHER; note = 2'-O-methyl ribonucleotide
  modified_base 72: mod_base = OTHER; note = 2'-O-methyl ribonucleotide
  modified_base 74: mod_base = OTHER; note = 2'-O-methyl ribonucleotide
  modified_base 75: mod_base = OTHER; note = 2'-O-methyl ribonucleotide
  modified_base 76: mod_base = OTHER; note = 2'-O-methyl ribonucleotide
  modified_base 77: mod_base = OTHER; note = 2'-O-methyl ribonucleotide
  modified_base 78: mod_base = OTHER; note = 2'-O-methyl ribonucleotide
  modified_base 79: mod_base = OTHER; note = 2'-O-methyl ribonucleotide
  modified_base 80: mod_base = OTHER; note = 2'-O-methyl ribonucleotide
  modified_base 81: mod_base = OTHER; note = 2'-O-methyl ribonucleotide
  modified_base 83: mod_base = OTHER; note = 2'-O-methyl ribonucleotide
  modified_base 84: mod_base = OTHER; note = 2'-O-methyl ribonucleotide
  modified_base 85: mod_base = OTHER; note = 2'-O-methyl ribonucleotide
  modified_base 86: mod_base = OTHER; note = 2'-O-methyl ribonucleotide
  modified_base 87: mod_base = OTHER; note = 2'-O-methyl ribonucleotide
  modified_base 88: mod_base = OTHER; note = 2'-O-methyl ribonucleotide
  modified_base 89: mod_base = OTHER; note = 2'-O-methyl ribonucleotide
  modified_base 90: mod_base = OTHER; note = 2'-O-methyl ribonucleotide
  modified_base 91: mod_base = OTHER; note = 2'-O-methyl ribonucleotide
  modified_base 92: mod_base = OTHER; note = 2'-O-methyl ribonucleotide
  modified_base 93: mod_base = OTHER; note = 2'-O-methyl ribonucleotide
  modified_base 94: mod_base = OTHER; note = 2'-O-methyl ribonucleotide
  modified_base 95: mod_base = OTHER; note = 2'-O-methyl ribonucleotide
  modified_base 96: mod_base = OTHER; note = 2'-O-methyl ribonucleotide
  modified_base 97: mod_base = OTHER; note = 2'-O-methyl ribonucleotide
  modified_base 98: mod_base = OTHER; note = 2'-O-methyl ribonucleotide
  modified_base 99: mod_base = OTHER; note = 2'-O-methyl ribonucleotide
  modified_base 100: mod_base = OTHER; note = 2'-O-methyl ribonucleotide
  modified_base 101: mod_base = OTHER; note = uniform ribonucleotides (A, C, G, inosine or U), deoxynucleotides (A, G, C, inosine or T), ribonebularine, 2'-O-methylnebularine or deoxynebularine
  modified_base 102: mod_base = OTHER; note = uniform ribonucleotides (A, C, G, inosine or U), deoxynucleotides (A, G, C, inosine or T), ribonebularine, 2'-O-methylnebularine or deoxynebularine
  modified_base 103: mod_base = OTHER; note = uniform ribonucleotides (A, C, G, inosine or U), deoxynucleotides (A, G, C, inosine or T), ribonebularine, 2'-O-methylnebularine or deoxynebularine
  modified_base 1..3: mod_base = OTHER; note = phosphorothioate linkage
  modified_base 25..26: mod_base = OTHER; note = phosphorothioate linkage
  modified_base 64..65: mod_base = OTHER; note = phosphorothioate linkage
  modified_base 97..100: mod_base = OTHER; note = phosphorothioate linkage
  misc_feature 1..100: note = RNA
  misc_feature 101..103: note = Optionally DNA or RNA

SEQ ID NO: 1842 - DNA, 103 bp, synthetic construct; identical to SEQ ID NO: 1795
  source 1..103: mol_type = other DNA
  modified_base 1: mod_base = OTHER; note = 2'-O-methyl ribonucleotide
  modified_base 2: mod_base = OTHER; note = 2'-O-methyl ribonucleotide
  modified_base 3: mod_base = OTHER; note = 2'-O-methyl ribonucleotide
  modified_base 21: mod_base = OTHER; note = 2'-O-methyl ribonucleotide
  modified_base 28: mod_base = OTHER; note = 2'-O-methyl ribonucleotide
  modified_base 29: mod_base = OTHER; note = 2'-O-methyl ribonucleotide
  modified_base 30: mod_base = OTHER; note = 2'-O-methyl ribonucleotide
  modified_base 31: mod_base = OTHER; note = 2'-O-methyl ribonucleotide
  modified_base 32: mod_base = OTHER; note = 2'-O-methyl ribonucleotide
  modified_base 34: mod_base = OTHER; note = 2'-O-methyl ribonucleotide
  modified_base 35: mod_base = OTHER; note = 2'-O-methyl ribonucleotide
  modified_base 36: mod_base = OTHER; note = 2'-O-methyl ribonucleotide
  modified_base 37: mod_base = OTHER; note = 2'-O-methyl ribonucleotide
  modified_base 38: mod_base = OTHER; note = 2'-O-methyl ribonucleotide
  modified_base 39: mod_base = OTHER; note = 2'-O-methyl ribonucleotide
  modified_base 40: mod_base = OTHER; note = 2'-O-methyl ribonucleotide
  modified_base 41: mod_base = OTHER; note = 2'-O-methyl ribonucleotide
  modified_base 42: mod_base = OTHER; note = 2'-O-methyl ribonucleotide
  modified_base 46: mod_base = OTHER; note = 2'-O-methyl ribonucleotide
  modified_base 48: mod_base = OTHER; note = 2'-O-methyl ribonucleotide
  modified_base 50: mod_base = OTHER; note = 2'-O-methyl ribonucleotide
  modified_base 52: mod_base = OTHER; note = 2'-O-methyl ribonucleotide
  modified_base 53: mod_base = OTHER; note = 2'-O-methyl ribonucleotide
  modified_base 54: mod_base = OTHER; note = 2'-O-methyl ribonucleotide
  modified_base 57: mod_base = OTHER; note = 2'-O-methyl ribonucleotide
  modified_base 61: mod_base = OTHER; note = 2'-O-methyl ribonucleotide
  modified_base 66: mod_base = OTHER; note = 2'-O-methyl ribonucleotide
  modified_base 67: mod_base = OTHER; note = 2'-O-methyl ribonucleotide
  modified_base 70: mod_base = OTHER; note = 2'-O-methyl ribonucleotide
  modified_base 71: mod_base = OTHER; note = 2'-O-methyl ribonucleotide
  modified_base 72: mod_base = OTHER; note = 2'-O-methyl ribonucleotide
  modified_base 74: mod_base = OTHER; note = 2'-O-methyl ribonucleotide
  modified_base 75: mod_base = OTHER; note = 2'-O-methyl ribonucleotide
  modified_base 76: mod_base = OTHER; note = 2'-O-methyl ribonucleotide
  modified_base 77: mod_base = OTHER; note = 2'-O-methyl ribonucleotide
  modified_base 78: mod_base = OTHER; note = 2'-O-methyl ribonucleotide
  modified_base 79: mod_base = OTHER; note = 2'-O-methyl ribonucleotide
  modified_base 80: mod_base = OTHER; note = 2'-O-methyl ribonucleotide
  modified_base 82: mod_base = OTHER; note = 2'-O-methyl ribonucleotide
  modified_base 83: mod_base = OTHER; note = 2'-O-methyl ribonucleotide
  modified_base 84: mod_base = OTHER; note = 2'-O-methyl ribonucleotide
  modified_base 85: mod_base = OTHER; note = 2'-O-methyl ribonucleotide
  modified_base 86: mod_base = OTHER; note = 2'-O-methyl ribonucleotide
  modified_base 87: mod_base = OTHER; note = 2'-O-methyl ribonucleotide
  modified_base 89: mod_base = OTHER; note = 2'-O-methyl ribonucleotide
  modified_base 92: mod_base = OTHER; note = 2'-O-methyl ribonucleotide
  modified_base 93: mod_base = OTHER; note = 2'-O-methyl ribonucleotide
  modified_base 94: mod_base = OTHER; note = 2'-O-methyl ribonucleotide
  modified_base 95: mod_base = OTHER; note = 2'-O-methyl ribonucleotide
  modified_base 96: mod_base = OTHER; note = 2'-O-methyl ribonucleotide
  modified_base 97: mod_base = OTHER; note = 2'-O-methyl ribonucleotide
  modified_base 98: mod_base = OTHER; note = 2'-O-methyl ribonucleotide
  modified_base 99: mod_base = OTHER; note = 2'-O-methyl ribonucleotide
  modified_base 100: mod_base = OTHER; note = 2'-O-methyl ribonucleotide
  modified_base 101: mod_base = OTHER; note = uniform ribonucleotides (A, C, G, inosine or U), deoxynucleotides (A, G, C, inosine or T), ribonebularine, 2'-O-methylnebularine or deoxynebularine
  modified_base 102: mod_base = OTHER; note = uniform ribonucleotides (A, C, G, inosine or U), deoxynucleotides (A, G, C, inosine or T), ribonebularine, 2'-O-methylnebularine or deoxynebularine
  modified_base 103: mod_base = OTHER; note = uniform ribonucleotides (A, C, G, inosine or U), deoxynucleotides (A, G, C, inosine or T), ribonebularine, 2'-O-methylnebularine or deoxynebularine
  modified_base 1..3: mod_base = OTHER; note = phosphorothioate linkage
  modified_base 25..26: mod_base = OTHER; note = phosphorothioate linkage
  modified_base 45..46: mod_base = OTHER; note = phosphorothioate linkage
  modified_base 64..65: mod_base = OTHER; note = phosphorothioate linkage
  modified_base 97..100: mod_base = OTHER; note = phosphorothioate linkage
  misc_feature 1..100: note = RNA
  misc_feature 101..103: note = Optionally DNA or RNA

SEQ ID NO: 1843 - DNA, 103 bp, synthetic construct; identical to SEQ ID NO: 1796
  source 1..103: mol_type = other DNA
  modified_base 1: mod_base = OTHER; note = 2'-O-methyl ribonucleotide
  modified_base 2: mod_base = OTHER; note = 2'-O-methyl ribonucleotide
  modified_base 3: mod_base = OTHER; note = 2'-O-methyl ribonucleotide
  modified_base 21: mod_base = OTHER; note = 2'-O-methyl ribonucleotide
  modified_base 28: mod_base = OTHER; note = 2'-O-methyl ribonucleotide
  modified_base 29: mod_base = OTHER; note = 2'-O-methyl ribonucleotide
  modified_base 30: mod_base = OTHER; note = 2'-O-methyl ribonucleotide
  modified_base 31: mod_base = OTHER; note = 2'-O-methyl ribonucleotide
  modified_base 32: mod_base = OTHER; note = 2'-O-methyl ribonucleotide
  modified_base 34: mod_base = OTHER; note = 2'-O-methyl ribonucleotide
  modified_base 35: mod_base = OTHER; note = 2'-O-methyl ribonucleotide
  modified_base 36: mod_base = OTHER; note = 2'-O-methyl ribonucleotide
  modified_base 37: mod_base = OTHER; note = 2'-O-methyl ribonucleotide
  modified_base 38: mod_base = OTHER; note = 2'-O-methyl ribonucleotide
  modified_base 39: mod_base = OTHER; note = 2'-O-methyl ribonucleotide
  modified_base 40: mod_base = OTHER; note = 2'-O-methyl ribonucleotide
  modified_base 41: mod_base = OTHER; note = 2'-O-methyl ribonucleotide
  modified_base 42: mod_base = OTHER; note = 2'-O-methyl ribonucleotide
  modified_base 46: mod_base = OTHER; note = 2'-O-methyl ribonucleotide
  modified_base 48: mod_base = OTHER; note = 2'-O-methyl ribonucleotide
  modified_base 50: mod_base = OTHER; note = 2'-O-methyl ribonucleotide
  modified_base 52: mod_base = OTHER; note = 2'-O-methyl ribonucleotide
  modified_base 53: mod_base = OTHER; note = 2'-O-methyl ribonucleotide
  modified_base 54: mod_base = OTHER; note = 2'-O-methyl ribonucleotide
  modified_base 57: mod_base = OTHER; note = 2'-O-methyl ribonucleotide
  modified_base 61: mod_base = OTHER; note = 2'-O-methyl ribonucleotide
  modified_base 66: mod_base = OTHER; note = 2'-O-methyl ribonucleotide
  modified_base 67: mod_base = OTHER; note = 2'-O-methyl ribonucleotide
  modified_base 70: mod_base = OTHER; note = 2'-O-methyl ribonucleotide
  modified_base 71: mod_base = OTHER; note = 2'-O-methyl ribonucleotide
  modified_base 72: mod_base = OTHER; note = 2'-O-methyl ribonucleotide
  modified_base 74: mod_base = OTHER; note = 2'-O-methyl ribonucleotide
  modified_base 75: mod_base = OTHER; note = 2'-O-methyl ribonucleotide
  modified_base 76: mod_base = OTHER; note = 2'-O-methyl ribonucleotide
  modified_base 77: mod_base = OTHER; note = 2'-O-methyl ribonucleotide
  modified_base 78: mod_base = OTHER; note = 2'-O-methyl ribonucleotide
  modified_base 79: mod_base = OTHER; note = 2'-O-methyl ribonucleotide
  modified_base 80: mod_base = OTHER; note = 2'-O-methyl ribonucleotide
  modified_base 82: mod_base = OTHER; note = 2'-O-methyl ribonucleotide
  modified_base 83: mod_base = OTHER; note = 2'-O-methyl ribonucleotide
  modified_base 84: mod_base = OTHER; note = 2'-O-methyl ribonucleotide
  modified_base 85: mod_base = OTHER; note = 2'-O-methyl ribonucleotide
  modified_base 86: mod_base = OTHER; note = 2'-O-methyl ribonucleotide
  modified_base 87: mod_base = OTHER; note = 2'-O-methyl ribonucleotide
  modified_base 89: mod_base = OTHER; note = 2'-O-methyl ribonucleotide
  modified_base 92: mod_base = OTHER; note = 2'-O-methyl ribonucleotide
  modified_base 93: mod_base = OTHER; note = 2'-O-methyl ribonucleotide
  modified_base 94: mod_base = OTHER; note = 2'-O-methyl ribonucleotide
  modified_base 95: mod_base = OTHER; note = 2'-O-methyl ribonucleotide
  modified_base 96: mod_base = OTHER; note = 2'-O-methyl ribonucleotide
  modified_base 97: mod_base = OTHER; note = 2'-O-methyl ribonucleotide
  modified_base 98: mod_base = OTHER; note = 2'-O-methyl ribonucleotide
  modified_base 99: mod_base = OTHER; note = 2'-O-methyl ribonucleotide
  modified_base 100: mod_base = OTHER; note = 2'-O-methyl ribonucleotide
  modified_base 101: mod_base = OTHER; note = uniform ribonucleotides (A, C, G, inosine or U), deoxynucleotides (A, G, C, inosine or T), ribonebularine, 2'-O-methylnebularine or deoxynebularine
  modified_base 102: mod_base = OTHER; note = uniform ribonucleotides (A, C, G, inosine or U), deoxynucleotides (A, G, C, inosine or T), ribonebularine, 2'-O-methylnebularine or deoxynebularine
  modified_base 103: mod_base = OTHER; note = uniform ribonucleotides (A, C, G, inosine or U), deoxynucleotides (A, G, C, inosine or T), ribonebularine, 2'-O-methylnebularine or deoxynebularine
  modified_base 1..3: mod_base = OTHER; note = phosphorothioate linkage
  modified_base 25..26: mod_base = OTHER; note = phosphorothioate linkage
  modified_base 45..46: mod_base = OTHER; note = phosphorothioate linkage
  modified_base 64..65: mod_base = OTHER; note = phosphorothioate linkage
  modified_base 97..100: mod_base = OTHER; note = phosphorothioate linkage
  misc_feature 1..100: note = RNA
  misc_feature 101..103: note = Optionally DNA or RNA

SEQ ID NO: 1844 - DNA, 102 bp, synthetic construct
  source 1..102: mol_type = other DNA
  modified_base 1: mod_base = OTHER; note = 2'-O-methyl ribonucleotide
  modified_base 2: mod_base = OTHER; note = 2'-O-methyl ribonucleotide
  modified_base 20: mod_base = OTHER; note = 2'-O-methyl ribonucleotide
  modified_base 27: mod_base = OTHER; note = 2'-O-methyl ribonucleotide
  modified_base 28: mod_base = OTHER; note = 2'-O-methyl ribonucleotide
  modified_base 29: mod_base = OTHER; note = 2'-O-methyl ribonucleotide
  modified_base 30: mod_base = OTHER; note = 2'-O-methyl ribonucleotide
  modified_base 31: mod_base = OTHER; note = 2'-O-methyl ribonucleotide
  modified_base 32: mod_base = OTHER; note = 2'-O-methyl ribonucleotide
  modified_base 33: mod_base = OTHER; note = 2'-O-methyl ribonucleotide
  modified_base 34: mod_base = OTHER; note = 2'-O-methyl ribonucleotide
  modified_base 35: mod_base = OTHER; note = 2'-O-methyl ribonucleotide
  modified_base 36: mod_base = OTHER; note = 2'-O-methyl ribonucleotide
  modified_base 37: mod_base = OTHER; note = 2'-O-methyl ribonucleotide
  modified_base 38: mod_base = OTHER; note = 2'-O-methyl ribonucleotide
  modified_base 39: mod_base = OTHER; note = 2'-O-methyl ribonucleotide
  modified_base 40: mod_base = OTHER; note = 2'-O-methyl ribonucleotide
  modified_base 41: mod_base = OTHER; note = 2'-O-methyl ribonucleotide
  modified_base 45: mod_base = OTHER; note = 2'-O-methyl ribonucleotide
  modified_base 47: mod_base = OTHER; note = 2'-O-methyl ribonucleotide
  modified_base 49: mod_base = OTHER; note = 2'-O-methyl ribonucleotide
  modified_base 51: mod_base = OTHER; note = 2'-O-methyl ribonucleotide
  modified_base 52: mod_base = OTHER; note = 2'-O-methyl ribonucleotide
  modified_base 53: mod_base = OTHER; note = 2'-O-methyl ribonucleotide
  modified_base 54: mod_base = OTHER; note = 2'-O-methyl ribonucleotide
  modified_base 55: mod_base = OTHER; note = 2'-O-methyl ribonucleotide
  modified_base 56: mod_base = OTHER; note = 2'-O-methyl ribonucleotide
  modified_base 59: mod_base = OTHER; note = 2'-O-methyl ribonucleotide
  modified_base 60: mod_base = OTHER; note = 2'-O-methyl ribonucleotide
  modified_base 65: mod_base = OTHER; note = 2'-O-methyl ribonucleotide
  modified_base 66: mod_base = OTHER; note = 2'-O-methyl ribonucleotide
  modified_base 69: mod_base = OTHER; note = 2'-O-methyl ribonucleotide
  modified_base 70: mod_base = OTHER; note = 2'-O-methyl ribonucleotide
  modified_base 71: mod_base = OTHER; note = 2'-O-methyl ribonucleotide
  modified_base 72: mod_base = OTHER; note = 2'-O-methyl ribonucleotide
  modified_base 73: mod_base = OTHER; note = 2'-O-methyl ribonucleotide
  modified_base 74: mod_base = OTHER; note = 2'-O-methyl ribonucleotide
  modified_base 75: mod_base = OTHER; note = 2'-O-methyl ribonucleotide
  modified_base 76: mod_base = OTHER; note = 2'-O-methyl ribonucleotide
  modified_base 77: mod_base = OTHER; note = 2'-O-methyl ribonucleotide
  modified_base 78: mod_base = OTHER; note = 2'-O-methyl ribonucleotide
  modified_base 79: mod_base = OTHER; note = 2'-O-methyl ribonucleotide
  modified_base 80: mod_base = OTHER; note = 2'-O-methyl ribonucleotide
  modified_base 82: mod_base = OTHER; note = 2'-O-methyl ribonucleotide
  modified_base 83: mod_base = OTHER; note = 2'-O-methyl ribonucleotide
  modified_base 84: mod_base = OTHER; note = 2'-O-methyl ribonucleotide
  modified_base 85: mod_base = OTHER; note = 2'-O-methyl ribonucleotide
  modified_base 86: mod_base = OTHER; note = 2'-O-methyl ribonucleotide
  modified_base 87: mod_base = OTHER; note = 2'-O-methyl ribonucleotide
  modified_base 88: mod_base = OTHER; note = 2'-O-methyl ribonucleotide
  modified_base 89: mod_base = OTHER; note = 2'-O-methyl ribonucleotide
  modified_base 90: mod_base = OTHER; note = 2'-O-methyl ribonucleotide
  modified_base 91: mod_base = OTHER; note = 2'-O-methyl ribonucleotide
  modified_base 92: mod_base = OTHER; note = 2'-O-methyl ribonucleotide
  modified_base 93: mod_base = OTHER; note = 2'-O-methyl ribonucleotide
  modified_base 94: mod_base = OTHER; note = 2'-O-methyl ribonucleotide
  modified_base 95: mod_base = OTHER; note = 2'-O-methyl ribonucleotide
  modified_base 96: mod_base = OTHER; note = 2'-O-methyl ribonucleotide
  modified_base 97: mod_base = OTHER; note = 2'-O-methyl ribonucleotide
  modified_base 98: mod_base = OTHER; note = 2'-O-methyl ribonucleotide
  modified_base 99: mod_base = OTHER; note = 2'-O-methyl ribonucleotide
  modified_base 100: mod_base = OTHER; note = uniform ribonucleotides (A, C, G, inosine or U), deoxynucleotides (A, G, C, inosine or T), ribonebularine, 2'-O-methylnebularine or deoxynebularine
  modified_base 101: mod_base = OTHER; note = uniform ribonucleotides (A, C, G, inosine or U), deoxynucleotides (A, G, C, inosine or T), ribonebularine, 2'-O-methylnebularine or deoxynebularine
  modified_base 102: mod_base = OTHER; note = uniform ribonucleotides (A, C, G, inosine or U), deoxynucleotides (A, G, C, inosine or T), ribonebularine, 2'-O-methylnebularine or deoxynebularine
  modified_base 1..3: mod_base = OTHER; note = phosphorothioate linkage
  modified_base 24..25: mod_base = OTHER; note = phosphorothioate linkage
  modified_base 44..45: mod_base = OTHER; note = phosphorothioate linkage
  modified_base 63..64: mod_base = OTHER; note = phosphorothioate linkage
  modified_base 96..99: mod_base = OTHER; note = phosphorothioate linkage
  misc_feature 1..99: note = RNA
  misc_feature 100..102: note = Optionally DNA or RNA
gaatacctgagtaactttcgttttagagctagaaatagcaagttaaaataaggctagtccgttatcaacttgaaaaagtggcaccgagtcggtgcttttnnn

SEQ ID NO: 1845 - DNA, 103 bp, synthetic construct; identical to SEQ ID NO: 1797
  source 1..103: mol_type = other DNA
  modified_base 1: mod_base = OTHER; note = 2'-O-methyl ribonucleotide
  modified_base 2: mod_base = OTHER; note = 2'-O-methyl ribonucleotide
  modified_base 3: mod_base = OTHER; note = 2'-O-methyl ribonucleotide
  modified_base 21: mod_base = OTHER; note = 2'-O-methyl ribonucleotide
  modified_base 28: mod_base = OTHER; note = 2'-O-methyl ribonucleotide
  modified_base 29: mod_base = OTHER; note = 2'-O-methyl ribonucleotide
  modified_base 30: mod_base = OTHER; note = 2'-O-methyl ribonucleotide
  modified_base 31: mod_base = OTHER; note = 2'-O-methyl ribonucleotide
  modified_base 32: mod_base = OTHER; note = 2'-O-methyl ribonucleotide
  modified_base 34: mod_base = OTHER; note = 2'-O-methyl ribonucleotide
  modified_base 35: mod_base = OTHER; note = 2'-O-methyl ribonucleotide
  modified_base 36: mod_base = OTHER; note = 2'-O-methyl ribonucleotide
  modified_base 37: mod_base = OTHER; note = 2'-O-methyl ribonucleotide
  modified_base 38: mod_base = OTHER; note = 2'-O-methyl ribonucleotide
  modified_base 39: mod_base = OTHER; note = 2'-O-methyl ribonucleotide
  modified_base 40: mod_base = OTHER; note = 2'-O-methyl ribonucleotide
  modified_base 41: mod_base = OTHER; note = 2'-O-methyl ribonucleotide
  modified_base 42: mod_base = OTHER; note = 2'-O-methyl ribonucleotide
  modified_base 46: mod_base = OTHER; note = 2'-O-methyl ribonucleotide
  modified_base 48: mod_base = OTHER; note = 2'-O-methyl ribonucleotide
  modified_base 50: mod_base = OTHER; note = 2'-O-methyl ribonucleotide
  modified_base 52: mod_base = OTHER; note = 2'-O-methyl ribonucleotide
  modified_base 53: mod_base = OTHER; note = 2'-O-methyl ribonucleotide
  modified_base 54: mod_base = OTHER; note = 2'-O-methyl ribonucleotide
  modified_base 55: mod_base = OTHER; note = 2'-O-methyl ribonucleotide
  modified_base 56: mod_base = OTHER; note = 2'-O-methyl ribonucleotide
  modified_base 57: mod_base = OTHER; note = 2'-O-methyl ribonucleotide
  modified_base 60: mod_base = OTHER; note = 2'-O-methyl ribonucleotide
  modified_base 61: mod_base = OTHER; note = 2'-O-methyl ribonucleotide
  modified_base 66: mod_base = OTHER; note = 2'-O-methyl ribonucleotide
  modified_base 67: mod_base = OTHER; note = 2'-O-methyl ribonucleotide
  modified_base 70: mod_base = OTHER; note = 2'-O-methyl ribonucleotide
  modified_base 71: mod_base = OTHER; note = 2'-O-methyl ribonucleotide
  modified_base 72: mod_base = OTHER; note = 2'-O-methyl ribonucleotide
  modified_base 74: mod_base = OTHER; note = 2'-O-methyl ribonucleotide
  modified_base 75: mod_base = OTHER; note = 2'-O-methyl ribonucleotide
  modified_base 76: mod_base = OTHER; note = 2'-O-methyl ribonucleotide
  modified_base 77: mod_base = OTHER; note = 2'-O-methyl ribonucleotide
  modified_base 78: mod_base = OTHER; note = 2'-O-methyl ribonucleotide
  modified_base 79: mod_base = OTHER; note = 2'-O-methyl ribonucleotide
  modified_base 80: mod_base = OTHER; note = 2'-O-methyl ribonucleotide
  modified_base 81: mod_base = OTHER; note = 2'-O-methyl ribonucleotide
  modified_base 83: mod_base = OTHER; note = 2'-O-methyl ribonucleotide
  modified_base 84: mod_base = OTHER; note = 2'-O-methyl ribonucleotide
  modified_base 85: mod_base = OTHER; note = 2'-O-methyl ribonucleotide
  modified_base 86: mod_base = OTHER; note = 2'-O-methyl ribonucleotide
  modified_base 87: mod_base = OTHER; note = 2'-O-methyl ribonucleotide
  modified_base 88: mod_base = OTHER; note = 2'-O-methyl ribonucleotide
  modified_base 89: mod_base = OTHER; note = 2'-O-methyl ribonucleotide
  modified_base 90: mod_base = OTHER; note = 2'-O-methyl ribonucleotide
  modified_base 91: mod_base = OTHER; note = 2'-O-methyl ribonucleotide
  modified_base 92: mod_base = OTHER; note = 2'-O-methyl ribonucleotide
  modified_base 93: mod_base = OTHER; note = 2'-O-methyl ribonucleotide
  modified_base 94: mod_base = OTHER; note = 2'-O-methyl ribonucleotide
  modified_base 95: mod_base = OTHER; note = 2'-O-methyl ribonucleotide
  modified_base 96: mod_base = OTHER; note = 2'-O-methyl ribonucleotide
  modified_base 97: mod_base = OTHER; note = 2'-O-methyl ribonucleotide
  modified_base 98: mod_base = OTHER; note = 2'-O-methyl ribonucleotide
  modified_base 99: mod_base = OTHER; note = 2'-O-methyl ribonucleotide
  modified_base 100: mod_base = OTHER; note = 2'-O-methyl ribonucleotide
  modified_base 101: mod_base = OTHER; note = uniform ribonucleotides (A, C, G, inosine or U), deoxynucleotides (A, G, C, inosine or T), ribonebularine, 2'-O-methylnebularine or deoxynebularine
  modified_base 102: mod_base = OTHER; note = uniform ribonucleotides (A, C, G, inosine or U), deoxynucleotides (A, G, C, inosine or T), ribonebularine, 2'-O-methylnebularine or deoxynebularine
  modified_base 103: mod_base = OTHER; note = uniform ribonucleotides (A, C, G, inosine or U), deoxynucleotides (A, G, C, inosine or T), ribonebularine, 2'-O-methylnebularine or deoxynebularine
  modified_base 1..3: mod_base = OTHER; note = phosphorothioate linkage
  modified_base 25..26: mod_base = OTHER; note = phosphorothioate linkage
  modified_base 45..46: mod_base = OTHER; note = phosphorothioate linkage
  modified_base 64..65: mod_base = OTHER; note = phosphorothioate linkage
  modified_base 97..100: mod_base = OTHER; note = phosphorothioate linkage
  misc_feature 1..100: note = RNA
  misc_feature 101..103: note = Optionally DNA or RNA

SEQ ID NO: 1846 - DNA, 103 bp, synthetic construct; identical to SEQ ID NO: 1797
  source 1..103: mol_type = other DNA
  modified_base 1: mod_base = OTHER; note = 2'-O-methyl ribonucleotide
  modified_base 2: mod_base = OTHER; note = 2'-O-methyl ribonucleotide
  modified_base 3: mod_base = OTHER; note = 2'-O-methyl ribonucleotide
  modified_base 21: mod_base = OTHER; note = 2'-O-methyl ribonucleotide
  modified_base 28: mod_base = OTHER; note = 2'-O-methyl ribonucleotide
  modified_base 29: mod_base = OTHER; note = 2'-O-methyl ribonucleotide
  modified_base 30: mod_base = OTHER; note = 2'-O-methyl ribonucleotide
  modified_base 31: mod_base = OTHER; note = 2'-O-methyl ribonucleotide
  modified_base 32: mod_base = OTHER; note = 2'-O-methyl ribonucleotide
  modified_base 34: mod_base = OTHER; note = 2'-O-methyl ribonucleotide
  modified_base 35: mod_base = OTHER; note = 2'-O-methyl ribonucleotide
  modified_base 36: mod_base = OTHER; note = 2'-O-methyl ribonucleotide
  modified_base 37: mod_base = OTHER; note = 2'-O-methyl ribonucleotide
  modified_base 38: mod_base = OTHER; note = 2'-O-methyl ribonucleotide
  modified_base 39: mod_base = OTHER; note = 2'-O-methyl ribonucleotide
  modified_base 40: mod_base = OTHER; note = 2'-O-methyl ribonucleotide
  modified_base 41: mod_base = OTHER; note = 2'-O-methyl ribonucleotide
  modified_base 42: mod_base = OTHER; note = 2'-O-methyl ribonucleotide
  modified_base 46: mod_base = OTHER; note = 2'-O-methyl ribonucleotide
  modified_base 48: mod_base = OTHER; note = 2'-O-methyl ribonucleotide
  modified_base 50: mod_base = OTHER; note = 2'-O-methyl ribonucleotide
  modified_base 52: mod_base = OTHER; note = 2'-O-methyl ribonucleotide
  modified_base 53: mod_base = OTHER; note = 2'-O-methyl ribonucleotide
  modified_base 54: mod_base = OTHER; note = 2'-O-methyl ribonucleotide
  modified_base 57: mod_base = OTHER; note = 2'-O-methyl ribonucleotide
  modified_base 61: mod_base = OTHER; note = 2'-O-methyl ribonucleotide
  modified_base 66: mod_base = OTHER; note = 2'-O-methyl ribonucleotide
  modified_base 67: mod_base = OTHER; note = 2'-O-methyl ribonucleotide
  modified_base 70: mod_base = OTHER; note = 2'-O-methyl ribonucleotide
  modified_base 71: mod_base = OTHER; note = 2'-O-methyl ribonucleotide
  modified_base 72: mod_base = OTHER; note = 2'-O-methyl ribonucleotide
  modified_base 74: mod_base = OTHER; note = 2'-O-methyl ribonucleotide
  modified_base 75: mod_base = OTHER; note = 2'-O-methyl ribonucleotide
  modified_base 76: mod_base = OTHER; note = 2'-O-methyl ribonucleotide
  modified_base 77: mod_base = OTHER; note = 2'-O-methyl ribonucleotide
  modified_base 78: mod_base = OTHER; note = 2'-O-methyl ribonucleotide
  modified_base 79: mod_base = OTHER; note = 2'-O-methyl ribonucleotide
  modified_base 80: mod_base = OTHER; note = 2'-O-methyl ribonucleotide
  modified_base 82: mod_base = OTHER; note = 2'-O-methyl ribonucleotide
  modified_base 83: mod_base = OTHER; note = 2'-O-methyl ribonucleotide
  modified_base 84: mod_base = OTHER; note = 2'-O-methyl ribonucleotide
  modified_base 85: mod_base = OTHER; note = 2'-O-methyl ribonucleotide
  modified_base 86: mod_base = OTHER; note = 2'-O-methyl ribonucleotide
  modified_base 87: mod_base = OTHER; note = 2'-O-methyl ribonucleotide
  modified_base 89: mod_base = OTHER; note = 2'-O-methyl ribonucleotide
  modified_base 92: mod_base = OTHER; note = 2'-O-methyl ribonucleotide
  modified_base 93: mod_base = OTHER; note = 2'-O-methyl ribonucleotide
  modified_base 94: mod_base = OTHER; note = 2'-O-methyl ribonucleotide
  modified_base 95: mod_base = OTHER; note = 2'-O-methyl ribonucleotide
  modified_base 96: mod_base = OTHER; note = 2'-O-methyl ribonucleotide
  modified_base 97: mod_base = OTHER; note = 2'-O-methyl ribonucleotide
  modified_base 98: mod_base = OTHER; note = 2'-O-methyl ribonucleotide
  modified_base 99: mod_base = OTHER; note = 2'-O-methyl ribonucleotide
  modified_base 100: mod_base = OTHER; note = 2'-O-methyl ribonucleotide
  modified_base 101: mod_base = OTHER; note = uniform ribonucleotides (A, C, G, inosine or U), deoxynucleotides (A, G, C, inosine or T), ribonebularine, 2'-O-methylnebularine or deoxynebularine
  modified_base 102: mod_base = OTHER; note = uniform ribonucleotides (A, C, G, inosine or U), deoxynucleotides (A, G, C, inosine or T), ribonebularine, 2'-O-methylnebularine or deoxynebularine
  modified_base 103: mod_base = OTHER; note = uniform ribonucleotides (A, C, G, inosine or U), deoxynucleotides (A, G, C, inosine or T), ribonebularine, 2'-O-methylnebularine or deoxynebularine
  modified_base 1..4: mod_base = OTHER; note = phosphorothioate linkage
  modified_base 98..100: mod_base = OTHER; note = phosphorothioate linkage
  misc_feature 1..100: note = RNA
  misc_feature 101..103: note = Optionally DNA or RNA

SEQ ID NO: 1847 - DNA, 103 bp, synthetic construct; identical to SEQ ID NO: 1797
  source 1..103: mol_type = other DNA
  modified_base 1: mod_base = OTHER; note = 2'-O-methyl ribonucleotide
  modified_base 2: mod_base = OTHER; note = 2'-O-methyl ribonucleotide
  modified_base 3: mod_base = OTHER; note = 2'-O-methyl ribonucleotide
  modified_base 21: mod_base = OTHER; note = 2'-O-methyl ribonucleotide
  modified_base 28: mod_base = OTHER; note = 2'-O-methyl ribonucleotide
  modified_base 29: mod_base = OTHER; note = 2'-O-methyl ribonucleotide
  modified_base 30: mod_base = OTHER; note = 2'-O-methyl ribonucleotide
  modified_base 31: mod_base = OTHER; note = 2'-O-methyl ribonucleotide
  modified_base 32: mod_base = OTHER; note = 2'-O-methyl ribonucleotide
  modified_base 33: mod_base = OTHER; note = 2'-O-methyl ribonucleotide
  modified_base 34: mod_base = OTHER; note = 2'-O-methyl ribonucleotide
  modified_base 35: mod_base = OTHER; note = 2'-O-methyl ribonucleotide
  modified_base 36: mod_base = OTHER; note = 2'-O-methyl ribonucleotide
  modified_base 37: mod_base = OTHER; note = 2'-O-methyl ribonucleotide
  modified_base 38: mod_base = OTHER; note = 2'-O-methyl ribonucleotide
  modified_base 39: mod_base = OTHER; note = 2'-O-methyl ribonucleotide
  modified_base 40: mod_base = OTHER; note = 2'-O-methyl ribonucleotide
  modified_base 41: mod_base = OTHER; note = 2'-O-methyl ribonucleotide
  modified_base 42: mod_base = OTHER; note = 2'-O-methyl ribonucleotide
  modified_base 46: mod_base = OTHER; note = 2'-O-methyl ribonucleotide
  modified_base 48: mod_base = OTHER; note = 2'-O-methyl ribonucleotide
  modified_base 50: mod_base = OTHER; note = 2'-O-methyl ribonucleotide
  modified_base 52: mod_base = OTHER; note = 2'-O-methyl ribonucleotide
  modified_base 53: mod_base = OTHER; note = 2'-O-methyl ribonucleotide
  modified_base 54: mod_base = OTHER; note = 2'-O-methyl ribonucleotide
  modified_base 55: mod_base = OTHER; note = 2'-O-methyl ribonucleotide
  modified_base 56: mod_base = OTHER; note = 2'-O-methyl ribonucleotide
  modified_base 57: mod_base = OTHER; note = 2'-O-methyl ribonucleotide
  modified_base 60: mod_base = OTHER; note = 2'-O-methyl ribonucleotide
  modified_base 61: mod_base = OTHER; note = 2'-O-methyl ribonucleotide
  modified_base 66: mod_base = OTHER; note = 2'-O-methyl ribonucleotide
  modified_base 67: mod_base = OTHER; note = 2'-O-methyl ribonucleotide
  modified_base 70: mod_base = OTHER; note = 2'-O-methyl ribonucleotide
  modified_base 71: mod_base = OTHER; note = 2'-O-methyl ribonucleotide
  modified_base 72: mod_base = OTHER; note = 2'-O-methyl ribonucleotide
  modified_base 73: mod_base = OTHER; note = 2'-O-methyl ribonucleotide
  modified_base 74: mod_base = OTHER; note = 2'-O-methyl ribonucleotide
  modified_base 75: mod_base = OTHER; note = 2'-O-methyl ribonucleotide
  modified_base 76: mod_base = OTHER; note = 2'-O-methyl ribonucleotide
  modified_base 77: mod_base = OTHER; note = 2'-O-methyl ribonucleotide
  modified_base 78: mod_base = OTHER; note = 2'-O-methyl ribonucleotide
  modified_base 79: mod_base = OTHER; note = 2'-O-methyl ribonucleotide
  modified_base 80: mod_base = OTHER; note = 2'-O-methyl ribonucleotide
  modified_base 81: mod_base = OTHER; note = 2'-O-methyl ribonucleotide
  modified_base 83: mod_base = OTHER; note = 2'-O-methyl ribonucleotide
  modified_base 84: mod_base = OTHER; note = 2'-O-methyl ribonucleotide
  modified_base 85: mod_base = OTHER; note = 2'-O-methyl ribonucleotide
  modified_base 86: mod_base = OTHER; note = 2'-O-methyl ribonucleotide
  modified_base 87: mod_base = OTHER; note = 2'-O-methyl ribonucleotide
  modified_base 88: mod_base = OTHER; note = 2'-O-methyl ribonucleotide
  modified_base 89: mod_base = OTHER; note = 2'-O-methyl ribonucleotide
  modified_base 90: mod_base = OTHER; note = 2'-O-methyl ribonucleotide
  modified_base 91: mod_base = OTHER; note = 2'-O-methyl ribonucleotide
  modified_base 92: mod_base = OTHER; note = 2'-O-methyl ribonucleotide
  modified_base 93: mod_base = OTHER; note = 2'-O-methyl ribonucleotide
  modified_base 94: mod_base = OTHER; note = 2'-O-methyl ribonucleotide
  modified_base 95: mod_base = OTHER; note = 2'-O-methyl ribonucleotide
  modified_base 96: mod_base = OTHER; note = 2'-O-methyl ribonucleotide
  modified_base 97: mod_base = OTHER; note = 2'-O-methyl ribonucleotide
  modified_base 98: mod_base = OTHER; note = 2'-O-methyl ribonucleotide
  modified_base 99: mod_base = OTHER; note = 2'-O-methyl ribonucleotide
  modified_base 100: mod_base = OTHER; note = 2'-O-methyl ribonucleotide
  modified_base 101: mod_base = OTHER; note = uniform ribonucleotides (A, C, G, inosine or U), deoxynucleotides (A, G, C, inosine or T), ribonebularine, 2'-O-methylnebularine or deoxynebularine
  modified_base 102: mod_base = OTHER; note = uniform ribonucleotides (A, C, G, inosine or U), deoxynucleotides (A, G, C, inosine or T), ribonebularine, 2'-O-methylnebularine or deoxynebularine
  modified_base 103: mod_base = OTHER; note = uniform ribonucleotides (A, C, G, inosine or U), deoxynucleotides (A, G, C, inosine or T), ribonebularine, 2'-O-methylnebularine or deoxynebularine
  modified_base 1..4: mod_base = OTHER; note = phosphorothioate linkage
  modified_base 98..100: mod_base = OTHER; note = phosphorothioate linkage
  misc_feature 1..100: note = RNA
  misc_feature 101..103: note = Optionally DNA or RNA

SEQ ID NO: 1848 - DNA, 103 bp, synthetic construct; identical to SEQ ID NO: 1795
  source 1..103: mol_type = other DNA
  modified_base 1: mod_base = OTHER; note = 2'-O-methyl ribonucleotide
  modified_base 2: mod_base = OTHER; note = 2'-O-methyl ribonucleotide
  modified_base 3: mod_base = OTHER; note = 2'-O-methyl ribonucleotide
  modified_base 21: mod_base = OTHER; note = 2'-O-methyl ribonucleotide
  modified_base 28: mod_base = OTHER; note = 2'-O-methyl ribonucleotide
  modified_base 29: mod_base = OTHER; note = 2'-O-methyl ribonucleotide
  modified_base 30: mod_base = OTHER; note = 2'-O-methyl ribonucleotide
  modified_base 31: mod_base = OTHER; note = 2'-O-methyl ribonucleotide
  modified_base 32: mod_base = OTHER; note = 2'-O-methyl ribonucleotide
  modified_base 34: mod_base = OTHER; note = 2'-O-methyl ribonucleotide
  modified_base 35: mod_base = OTHER; note = 2'-O-methyl ribonucleotide
  modified_base 36: mod_base = OTHER; note = 2'-O-methyl ribonucleotide
  modified_base 37: mod_base = OTHER; note = 2'-O-methyl ribonucleotide
  modified_base 38: mod_base = OTHER; note = 2'-O-methyl ribonucleotide
  modified_base 39: mod_base = OTHER; note = 2'-O-methyl ribonucleotide
  modified_base 40: mod_base = OTHER; note = 2'-O-methyl ribonucleotide
  modified_base 41: mod_base = OTHER; note = 2'-O-methyl ribonucleotide
  modified_base 42: mod_base = OTHER; note = 2'-O-methyl ribonucleotide
  modified_base 46: mod_base = OTHER; note = 2'-O-methyl ribonucleotide
  modified_base 48: mod_base = OTHER; note = 2'-O-methyl ribonucleotide
  modified_base 50: mod_base = OTHER; note = 2'-O-methyl ribonucleotide
  modified_base 52: mod_base = OTHER; note = 2'-O-methyl ribonucleotide
  modified_base 53: mod_base = OTHER; note = 2'-O-methyl ribonucleotide
  modified_base 54: mod_base = OTHER; note = 2'-O-methyl ribonucleotide
  modified_base 57: mod_base = OTHER; note = 2'-O-methyl ribonucleotide
  modified_base 61: mod_base = OTHER; note = 2'-O-methyl ribonucleotide
  modified_base 66: mod_base = OTHER; note = 2'-O-methyl ribonucleotide
  modified_base 67: mod_base = OTHER; note = 2'-O-methyl ribonucleotide
  modified_base 70: mod_base = OTHER; note = 2'-O-methyl ribonucleotide
  modified_base 71: mod_base = OTHER; note = 2'-O-methyl ribonucleotide
  modified_base 72: mod_base = OTHER; note = 2'-O-methyl ribonucleotide
  modified_base 74: mod_base = OTHER; note = 2'-O-methyl ribonucleotide
  modified_base 75: mod_base = OTHER; note = 2'-O-methyl ribonucleotide
  modified_base 76: mod_base = OTHER; note = 2'-O-methyl ribonucleotide
  modified_base 77: mod_base = OTHER; note = 2'-O-methyl ribonucleotide
  modified_base 78: mod_base = OTHER; note = 2'-O-methyl ribonucleotide
  modified_base 79: mod_base = OTHER; note = 2'-O-methyl ribonucleotide
  modified_base 80: mod_base = OTHER; note = 2'-O-methyl ribonucleotide
  modified_base 82: mod_base = OTHER; note = 2'-O-methyl ribonucleotide
  modified_base 83: mod_base = OTHER; note = 2'-O-methyl ribonucleotide
  modified_base 84: mod_base = OTHER; note = 2'-O-methyl ribonucleotide
  modified_base 85: mod_base = OTHER; note = 2'-O-methyl ribonucleotide
  modified_base 86: mod_base = OTHER; note = 2'-O-methyl ribonucleotide
  modified_base 87: mod_base = OTHER; note = 2'-O-methyl ribonucleotide
  modified_base 89: mod_base = OTHER; note = 2'-O-methyl ribonucleotide
  modified_base 92: mod_base = OTHER; note = 2'-O-methyl ribonucleotide
  modified_base 93: mod_base = OTHER; note = 2'-O-methyl ribonucleotide
  modified_base 94: mod_base = OTHER; note = 2'-O-methyl ribonucleotide
  modified_base 95: mod_base = OTHER; note = 2'-O-methyl ribonucleotide
  modified_base 96: mod_base = OTHER; note = 2'-O-methyl ribonucleotide
  modified_base 97: mod_base = OTHER; note = 2'-O-methyl ribonucleotide
  modified_base 98: mod_base = OTHER; note = 2'-O-methyl ribonucleotide
  modified_base 99: mod_base = OTHER; note = 2'-O-methyl ribonucleotide
  modified_base 100: mod_base = OTHER; note = 2'-O-methyl ribonucleotide
  modified_base 101: mod_base = OTHER; note = uniform ribonucleotides (A, C, G, inosine or U), deoxynucleotides (A, G, C, inosine or T), ribonebularine, 2'-O-methylnebularine or deoxynebularine
  modified_base 102: mod_base = OTHER; note = uniform ribonucleotides (A, C, G, inosine or U), deoxynucleotides (A, G, C, inosine or T), ribonebularine, 2'-O-methylnebularine or deoxynebularine
  modified_base 103: mod_base = OTHER; note = uniform ribonucleotides (A, C, G, inosine or U), deoxynucleotides (A, G, C, inosine or T), ribonebularine, 2'-O-methylnebularine or deoxynebularine
  modified_base 1..4: mod_base = OTHER; note = phosphorothioate linkage
  modified_base 98..100: mod_base = OTHER; note = phosphorothioate linkage
  misc_feature 1..100: note = RNA
  misc_feature 101..103: note = Optionally DNA or RNA

SEQ ID NO: 1849 - DNA, 103 bp, synthetic construct; identical to SEQ ID NO: 1796
  source 1..103: mol_type = other DNA
  modified_base 1: mod_base = OTHER; note = 2'-O-methyl ribonucleotide
  modified_base 2: mod_base = OTHER; note = 2'-O-methyl ribonucleotide
  modified_base 3: mod_base = OTHER; note = 2'-O-methyl ribonucleotide
  modified_base 21: mod_base = OTHER; note = 2'-O-methyl ribonucleotide
  modified_base 28: mod_base = OTHER; note = 2'-O-methyl ribonucleotide
  modified_base 29: mod_base = OTHER; note = 2'-O-methyl ribonucleotide
  modified_base 30: mod_base = OTHER; note = 2'-O-methyl ribonucleotide
  modified_base 31: mod_base = OTHER; note = 2'-O-methyl ribonucleotide
  modified_base 32: mod_base = OTHER; note = 2'-O-methyl ribonucleotide
  modified_base 34: mod_base = OTHER; note = 2'-O-methyl ribonucleotide
  modified_base 35: mod_base = OTHER; note = 2'-O-methyl ribonucleotide
  modified_base 36: mod_base = OTHER; note = 2'-O-methyl ribonucleotide
  modified_base 37: mod_base = OTHER; note = 2'-O-methyl ribonucleotide
  modified_base 38: mod_base = OTHER; note = 2'-O-methyl ribonucleotide
  modified_base 39: mod_base = OTHER; note = 2'-O-methyl ribonucleotide
  modified_base 40: mod_base = OTHER; note = 2'-O-methyl ribonucleotide
  modified_base 41: mod_base = OTHER; note = 2'-O-methyl ribonucleotide
  modified_base 42: mod_base = OTHER; note = 2'-O-methyl ribonucleotide
  modified_base 46: mod_base = OTHER; note = 2'-O-methyl ribonucleotide
  modified_base 48: mod_base = OTHER; note = 2'-O-methyl ribonucleotide
  modified_base 50: mod_base = OTHER; note = 2'-O-methyl ribonucleotide
  modified_base 52: mod_base = OTHER; note = 2'-O-methyl ribonucleotide
  modified_base 53: mod_base = OTHER; note = 2'-O-methyl ribonucleotide
  modified_base 54: mod_base = OTHER; note = 2'-O-methyl ribonucleotide
  modified_base 57: mod_base = OTHER; note = 2'-O-methyl ribonucleotide
  modified_base 61: mod_base = OTHER; note = 2'-O-methyl ribonucleotide
  modified_base 66: mod_base = OTHER; note = 2'-O-methyl ribonucleotide
  modified_base 67: mod_base = OTHER; note = 2'-O-methyl ribonucleotide
  modified_base 70: mod_base = OTHER; note = 2'-O-methyl ribonucleotide
  modified_base 71: mod_base = OTHER; note = 2'-O-methyl ribonucleotide
  modified_base 72: mod_base = OTHER; note = 2'-O-methyl ribonucleotide
  modified_base 74: mod_base = OTHER; note = 2'-O-methyl ribonucleotide
  modified_base 75: mod_base = OTHER; note = 2'-O-methyl ribonucleotide
  modified_base 76: mod_base = OTHER; note = 2'-O-methyl ribonucleotide
  modified_base 77: mod_base = OTHER; note = 2'-O-methyl ribonucleotide
  modified_base 78: mod_base = OTHER; note = 2'-O-methyl ribonucleotide
  modified_base 79: mod_base = OTHER; note = 2'-O-methyl ribonucleotide
  modified_base 80: mod_base = OTHER; note = 2'-O-methyl ribonucleotide
  modified_base 82: mod_base = OTHER; note = 2'-O-methyl ribonucleotide
  modified_base 83: mod_base = OTHER; note = 2'-O-methyl ribonucleotide
  modified_base 84: mod_base = OTHER; note = 2'-O-methyl ribonucleotide
  modified_base 85: mod_base = OTHER; note = 2'-O-methyl ribonucleotide
  modified_base 86: mod_base = OTHER; note = 2'-O-methyl ribonucleotide
  modified_base 87: mod_base = OTHER; note = 2'-O-methyl ribonucleotide
  modified_base 89: mod_base = OTHER; note = 2'-O-methyl ribonucleotide
  modified_base 92: mod_base = OTHER; note = 2'-O-methyl ribonucleotide
  modified_base 93: mod_base = OTHER; note = 2'-O-methyl ribonucleotide
  modified_base 94: mod_base = OTHER; note = 2'-O-methyl ribonucleotide
  modified_base 95: mod_base = OTHER; note = 2'-O-methyl ribonucleotide
  modified_base 96: mod_base = OTHER; note = 2'-O-methyl ribonucleotide
  modified_base 97: mod_base = OTHER; note = 2'-O-methyl ribonucleotide
  modified_base 98: mod_base = OTHER; note = 2'-O-methyl ribonucleotide
  modified_base 99: mod_base = OTHER; note = 2'-O-methyl ribonucleotide
  modified_base 100: mod_base = OTHER; note = 2'-O-methyl ribonucleotide
  modified_base 101: mod_base = OTHER; note = uniform ribonucleotides (A, C, G, inosine or U), deoxynucleotides (A, G, C, inosine or T), ribonebularine, 2'-O-methylnebularine or deoxynebularine
  modified_base 102: mod_base = OTHER; note = uniform ribonucleotides (A, C, G, inosine or U), deoxynucleotides (A, G, C, inosine or T), ribonebularine, 2'-O-methylnebularine or deoxynebularine
  modified_base 103: mod_base = OTHER; note = uniform ribonucleotides (A, C, G, inosine or U), deoxynucleotides (A, G, C, inosine or T), ribonebularine, 2'-O-methylnebularine or deoxynebularine
  modified_base 1..4: mod_base = OTHER; note = phosphorothioate linkage
  modified_base 98..100: mod_base = OTHER; note = phosphorothioate linkage
  misc_feature 1..100: note = RNA
  misc_feature 101..103: note = Optionally DNA or RNA

SEQ ID NO: 1850 - DNA, 103 bp, synthetic construct; identical to SEQ ID NO: 1795
  source 1..103: mol_type = other DNA
  modified_base 1: mod_base = OTHER; note = 2'-O-methyl ribonucleotide
  modified_base 2: mod_base = OTHER; note = 2'-O-methyl ribonucleotide
  modified_base 3: mod_base = OTHER; note = 2'-O-methyl ribonucleotide
  modified_base 21: mod_base = OTHER; note = 2'-O-methyl ribonucleotide
  modified_base 28: mod_base = OTHER; note = 2'-O-methyl ribonucleotide
  modified_base 29: mod_base = OTHER; note = 2'-O-methyl ribonucleotide
  modified_base 30: mod_base = OTHER; note = 2'-O-methyl ribonucleotide
  modified_base 31: mod_base = OTHER; note = 2'-O-methyl ribonucleotide
  modified_base 32: mod_base = OTHER; note = 2'-O-methyl ribonucleotide
  modified_base 34: mod_base = OTHER; note = 2'-O-methyl ribonucleotide
  modified_base 35: mod_base = OTHER; note = 2'-O-methyl ribonucleotide
  modified_base 36: mod_base = OTHER; note = 2'-O-methyl ribonucleotide
  modified_base 37: mod_base = OTHER; note = 2'-O-methyl ribonucleotide
  modified_base 38: mod_base = OTHER; note = 2'-O-methyl ribonucleotide
  modified_base 39: mod_base = OTHER; note = 2'-O-methyl ribonucleotide
  modified_base 40: mod_base = OTHER; note = 2'-O-methyl ribonucleotide
  modified_base 41: mod_base = OTHER; note = 2'-O-methyl ribonucleotide
  modified_base 42: mod_base = OTHER; note = 2'-O-methyl ribonucleotide
  modified_base 46: mod_base = OTHER; note = 2'-O-methyl ribonucleotide
  modified_base 48: mod_base = OTHER; note = 2'-O-methyl ribonucleotide
  modified_base 50: mod_base = OTHER; note = 2'-O-methyl ribonucleotide
  modified_base 52: mod_base = OTHER; note = 2'-O-methyl ribonucleotide
  modified_base 53: mod_base = OTHER; note = 2'-O-methyl ribonucleotide
  modified_base 54: mod_base = OTHER; note = 2'-O-methyl ribonucleotide
  modified_base 57: mod_base = OTHER; note = 2'-O-methyl ribonucleotide
  modified_base 61: mod_base = OTHER; note = 2'-O-methyl ribonucleotide
  modified_base 66: mod_base = OTHER; note = 2'-O-methyl ribonucleotide
  modified_base 67: mod_base = OTHER; note = 2'-O-methyl ribonucleotide
  modified_base 70: mod_base = OTHER; note = 2'-O-methyl ribonucleotide
  modified_base 71: mod_base = OTHER; note = 2'-O-methyl ribonucleotide
  modified_base 72: mod_base = OTHER; note = 2'-O-methyl ribonucleotide
  modified_base 74: mod_base = OTHER; note = 2'-O-methyl ribonucleotide
  modified_base 75: mod_base = OTHER; note = 2'-O-methyl ribonucleotide
  modified_base 76: mod_base = OTHER; note = 2'-O-methyl ribonucleotide
  modified_base 77: mod_base = OTHER; note = 2'-O-methyl ribonucleotide
  modified_base 78: mod_base = OTHER; note = 2'-O-methyl ribonucleotide
  modified_base 79: mod_base = OTHER; note = 2'-O-methyl ribonucleotide
  modified_base 80: mod_base = OTHER; note = 2'-O-methyl ribonucleotide
  modified_base 82: mod_base = OTHER; note = 2'-O-methyl ribonucleotide
  modified_base 83: mod_base = OTHER; note = 2'-O-methyl ribonucleotide
  modified_base 84: mod_base = OTHER; note = 2'-O-methyl ribonucleotide
  modified_base 85: mod_base = OTHER; note = 2'-O-methyl ribonucleotide
  modified_base 86: mod_base = OTHER; note = 2'-O-methyl ribonucleotide
  modified_base 87: mod_base = OTHER; note = 2'-O-methyl ribonucleotide
  modified_base 89: mod_base = OTHER; note = 2'-O-methyl ribonucleotide
  modified_base 92: mod_base = OTHER; note = 2'-O-methyl ribonucleotide
  modified_base 93: mod_base = OTHER; note = 2'-O-methyl ribonucleotide
  modified_base 94: mod_base = OTHER; note = 2'-O-methyl ribonucleotide
  modified_base 95: mod_base = OTHER; note = 2'-O-methyl ribonucleotide
  modified_base 96: mod_base = OTHER; note = 2'-O-methyl ribonucleotide
  modified_base 97: mod_base = OTHER; note = 2'-O-methyl ribonucleotide
  modified_base 98: mod_base = OTHER; note = 2'-O-methyl ribonucleotide
  modified_base 99: mod_base = OTHER; note = 2'-O-methyl ribonucleotide
  modified_base 100: mod_base = OTHER; note = 2'-O-methyl ribonucleotide
  modified_base 101: mod_base = OTHER; note = uniform ribonucleotides (A, C, G, inosine or U), deoxynucleotides (A, G, C, inosine or T), ribonebularine, 2'-O-methylnebularine or deoxynebularine
  modified_base 102: mod_base = OTHER; note = uniform ribonucleotides (A, C, G, inosine or U), deoxynucleotides (A, G, C, inosine or T), ribonebularine, 2'-O-methylnebularine or deoxynebularine
  modified_base 103: mod_base = OTHER; note = uniform ribonucleotides (A, C, G, inosine or U), deoxynucleotides (A, G, C, inosine or T), ribonebularine, 2'-O-methylnebularine or deoxynebularine
  modified_base 1..4: mod_base = OTHER; note = phosphorothioate linkage
  modified_base 64..65: mod_base = OTHER; note = phosphorothioate linkage
  modified_base 98..100: mod_base = OTHER; note = phosphorothioate linkage
  misc_feature 1..100: note = RNA
  misc_feature 101..103: note = Optionally DNA or RNA

SEQ ID NO: 1851 - DNA, 103 bp, synthetic construct; identical to SEQ ID NO: 1796
  source 1..103: mol_type = other DNA
  modified_base 1: mod_base = OTHER; note = 2'-O-methyl ribonucleotide
  modified_base 2: mod_base = OTHER; note = 2'-O-methyl ribonucleotide
  modified_base 3: mod_base = OTHER; note = 2'-O-methyl ribonucleotide
  modified_base 21: mod_base = OTHER; note = 2'-O-methyl ribonucleotide
  modified_base 28: mod_base = OTHER; note = 2'-O-methyl ribonucleotide
  modified_base 29: mod_base = OTHER; note = 2'-O-methyl ribonucleotide
  modified_base 30: mod_base = OTHER; note = 2'-O-methyl ribonucleotide
  modified_base 31: mod_base = OTHER; note = 2'-O-methyl ribonucleotide
  modified_base 32: mod_base = OTHER; note = 2'-O-methyl ribonucleotide
  modified_base 34: mod_base = OTHER; note = 2'-O-methyl ribonucleotide
  modified_base 35: mod_base = OTHER; note = 2'-O-methyl ribonucleotide
  modified_base 36: mod_base = OTHER; note = 2'-O-methyl ribonucleotide
  modified_base 37: mod_base = OTHER; note = 2'-O-methyl ribonucleotide
  modified_base 38: mod_base = OTHER; note = 2'-O-methyl ribonucleotide
  modified_base 39: mod_base = OTHER; note = 2'-O-methyl ribonucleotide
  modified_base 40: mod_base = OTHER; note = 2'-O-methyl ribonucleotide
  modified_base 41: mod_base = OTHER; note = 2'-O-methyl ribonucleotide
  modified_base 42: mod_base = OTHER; note = 2'-O-methyl ribonucleotide
  modified_base 46: mod_base = OTHER; note = 2'-O-methyl ribonucleotide
  modified_base 48: mod_base = OTHER; note = 2'-O-methyl ribonucleotide
  modified_base 50: mod_base = OTHER; note = 2'-O-methyl ribonucleotide
  modified_base 52: mod_base = OTHER; note = 2'-O-methyl ribonucleotide
  modified_base 53: mod_base = OTHER; note = 2'-O-methyl ribonucleotide
  modified_base 54: mod_base = OTHER; note = 2'-O-methyl ribonucleotide
  modified_base 57: mod_base = OTHER; note = 2'-O-methyl ribonucleotide
  modified_base 61: mod_base = OTHER; note = 2'-O-methyl ribonucleotide
  modified_base 66: mod_base = OTHER; note = 2'-O-methyl ribonucleotide
  modified_base 67: mod_base = OTHER; note = 2'-O-methyl ribonucleotide
  modified_base 70: mod_base = OTHER; note = 2'-O-methyl ribonucleotide
  modified_base 71: mod_base = OTHER; note = 2'-O-methyl ribonucleotide
  modified_base 72: mod_base = OTHER; note = 2'-O-methyl ribonucleotide
  modified_base 74: mod_base = OTHER; note = 2'-O-methyl ribonucleotide
  modified_base 75: mod_base = OTHER; note = 2'-O-methyl ribonucleotide
  modified_base 76: mod_base = OTHER; note = 2'-O-methyl ribonucleotide
  modified_base 77: mod_base = OTHER; note = 2'-O-methyl ribonucleotide
  modified_base 78: mod_base = OTHER; note = 2'-O-methyl ribonucleotide
  modified_base 79: mod_base = OTHER; note = 2'-O-methyl ribonucleotide
  modified_base 80: mod_base = OTHER; note = 2'-O-methyl ribonucleotide
  modified_base 82: mod_base = OTHER; note = 2'-O-methyl ribonucleotide
  modified_base 83: mod_base = OTHER; note = 2'-O-methyl ribonucleotide
  modified_base 84: mod_base = OTHER; note = 2'-O-methyl ribonucleotide
  modified_base 85: mod_base = OTHER; note = 2'-O-methyl ribonucleotide
  modified_base 86: mod_base = OTHER; note = 2'-O-methyl ribonucleotide
  modified_base 87: mod_base = OTHER; note = 2'-O-methyl ribonucleotide
  modified_base 89: mod_base = OTHER; note = 2'-O-methyl ribonucleotide
  modified_base 92: mod_base = OTHER; note = 2'-O-methyl ribonucleotide
  modified_base 93: mod_base = OTHER; note = 2'-O-methyl ribonucleotide
  modified_base 94: mod_base = OTHER; note = 2'-O-methyl ribonucleotide
  modified_base 95: mod_base = OTHER; note = 2'-O-methyl ribonucleotide
  modified_base 96: mod_base = OTHER; note = 2'-O-methyl ribonucleotide
  modified_base 97: mod_base = OTHER; note = 2'-O-methyl ribonucleotide
  modified_base 98: mod_base = OTHER; note = 2'-O-methyl ribonucleotide
  modified_base 99: mod_base = OTHER; note = 2'-O-methyl ribonucleotide
  modified_base 100: mod_base = OTHER; note = 2'-O-methyl ribonucleotide
  modified_base 101: mod_base = OTHER; note = uniform ribonucleotides (A, C, G, inosine or U), deoxynucleotides (A, G, C, inosine or T), ribonebularine, 2'-O-methylnebularine or deoxynebularine
  modified_base 102: mod_base = OTHER; note = uniform ribonucleotides (A, C, G, inosine or U), deoxynucleotides (A, G, C, inosine or T), ribonebularine, 2'-O-methylnebularine or deoxynebularine
  modified_base 103: mod_base = OTHER; note = uniform ribonucleotides (A, C, G, inosine or U), deoxynucleotides (A, G, C, inosine or T), ribonebularine, 2'-O-methylnebularine or deoxynebularine
  modified_base 1..4: mod_base = OTHER; note = phosphorothioate linkage
  modified_base 64..65: mod_base = OTHER; note = phosphorothioate linkage
  modified_base 98..100: mod_base = OTHER; note = phosphorothioate linkage
  misc_feature 1..100: note = RNA
  misc_feature 101..103: note = Optionally DNA or RNA

SEQ ID NO: 1852 - DNA, 103 bp, synthetic construct; identical to SEQ ID NO: 1797
  source 1..103: mol_type = other DNA
  modified_base 1: mod_base = OTHER; note = 2'-O-methyl ribonucleotide
  modified_base 2: mod_base = OTHER; note = 2'-O-methyl ribonucleotide
  modified_base 3: mod_base = OTHER; note = 2'-O-methyl ribonucleotide
  modified_base 21: mod_base = OTHER; note = 2'-O-methyl ribonucleotide
  modified_base 28: mod_base = OTHER; note = 2'-O-methyl ribonucleotide
  modified_base 29: mod_base = OTHER; note = 2'-O-methyl ribonucleotide
  modified_base 30: mod_base = OTHER; note = 2'-O-methyl ribonucleotide
  modified_base 31: mod_base = OTHER; note = 2'-O-methyl ribonucleotide
  modified_base 32: mod_base = OTHER; note = 2'-O-methyl ribonucleotide
  modified_base 34: mod_base = OTHER; note = 2'-O-methyl ribonucleotide
  modified_base 35: mod_base = OTHER; note = 2'-O-methyl ribonucleotide
  modified_base 36: mod_base = OTHER; note = 2'-O-methyl ribonucleotide
  modified_base 37: mod_base = OTHER; note = 2'-O-methyl ribonucleotide
  modified_base 38: mod_base = OTHER; note = 2'-O-methyl ribonucleotide
  modified_base 39: mod_base = OTHER; note = 2'-O-methyl ribonucleotide
  modified_base 40: mod_base = OTHER; note = 2'-O-methyl ribonucleotide
  modified_base 41: mod_base = OTHER; note = 2'-O-methyl ribonucleotide
  modified_base 42: mod_base = OTHER; note = 2'-O-methyl ribonucleotide
  modified_base 46: mod_base = OTHER; note = 2'-O-methyl ribonucleotide
  modified_base 48: mod_base = OTHER; note = 2'-O-methyl ribonucleotide
  modified_base 50: mod_base = OTHER; note = 2'-O-methyl ribonucleotide
  modified_base 52: mod_base = OTHER; note = 2'-O-methyl ribonucleotide
  modified_base 53: mod_base = OTHER; note = 2'-O-methyl ribonucleotide
  modified_base 54: mod_base = OTHER; note = 2'-O-methyl ribonucleotide
  modified_base 55: mod_base = OTHER; note = 2'-O-methyl ribonucleotide
  modified_base 56: mod_base = OTHER; note = 2'-O-methyl ribonucleotide
  modified_base 57: mod_base = OTHER; note = 2'-O-methyl ribonucleotide
  modified_base 60: mod_base = OTHER; note = 2'-O-methyl ribonucleotide
  modified_base 61: mod_base = OTHER; note = 2'-O-methyl ribonucleotide
  modified_base 66: mod_base = OTHER; note = 2'-O-methyl ribonucleotide
  modified_base 67: mod_base = OTHER; note = 2'-O-methyl ribonucleotide
  modified_base 70: mod_base = OTHER; note = 2'-O-methyl ribonucleotide
  modified_base 71: mod_base = OTHER; note = 2'-O-methyl ribonucleotide
  modified_base 72: mod_base = OTHER; note = 2'-O-methyl ribonucleotide
  modified_base 74: mod_base = OTHER; note = 2'-O-methyl ribonucleotide
  modified_base 75: mod_base = OTHER; note = 2'-O-methyl ribonucleotide
  modified_base 76: mod_base = OTHER; note = 2'-O-methyl ribonucleotide
  modified_base 77: mod_base = OTHER; note = 2'-O-methyl ribonucleotide
  modified_base 78: mod_base = OTHER; note = 2'-O-methyl ribonucleotide
  modified_base 79: mod_base = OTHER; note = 2'-O-methyl ribonucleotide
  modified_base 80: mod_base = OTHER; note = 2'-O-methyl ribonucleotide
  modified_base 81: mod_base = OTHER; note = 2'-O-methyl ribonucleotide
  modified_base 83: mod_base = OTHER; note = 2'-O-methyl ribonucleotide
  modified_base 84: mod_base = OTHER; note = 2'-O-methyl ribonucleotide
  modified_base 85: mod_base = OTHER; note = 2'-O-methyl ribonucleotide
  modified_base 86: mod_base = OTHER; note = 2'-O-methyl ribonucleotide
  modified_base 87: mod_base = OTHER; note = 2'-O-methyl ribonucleotide
  modified_base 88: mod_base = OTHER; note = 2'-O-methyl ribonucleotide
  modified_base 89: mod_base = OTHER; note = 2'-O-methyl ribonucleotide
  modified_base 90: mod_base = OTHER; note = 2'-O-methyl ribonucleotide
  modified_base 91: mod_base = OTHER; note = 2'-O-methyl ribonucleotide
  modified_base 92: mod_base = OTHER; note = 2'-O-methyl ribonucleotide
  modified_base 93: mod_base = OTHER; note = 2'-O-methyl ribonucleotide
  modified_base 94: mod_base = OTHER; note = 2'-O-methyl ribonucleotide
  modified_base 95: mod_base = OTHER; note = 2'-O-methyl ribonucleotide
  modified_base 96: mod_base = OTHER; note = 2'-O-methyl ribonucleotide
  modified_base 97: mod_base = OTHER; note = 2'-O-methyl ribonucleotide
  modified_base 98: mod_base = OTHER; note = 2'-O-methyl ribonucleotide
  modified_base 99: mod_base = OTHER; note = 2'-O-methyl ribonucleotide
  modified_base 100: mod_base = OTHER; note = 2'-O-methyl ribonucleotide
  modified_base 101: mod_base = OTHER; note = uniform ribonucleotides (A, C, G, inosine or U), deoxynucleotides (A, G, C, inosine or T), ribonebularine, 2'-O-methylnebularine or deoxynebularine
  modified_base 102: mod_base = OTHER; note = uniform ribonucleotides (A, C, G, inosine or U), deoxynucleotides (A, G, C, inosine or T), ribonebularine, 2'-O-methylnebularine or deoxynebularine
  modified_base 103: mod_base = OTHER; note = uniform ribonucleotides (A, C, G, inosine or U), deoxynucleotides (A, G, C, inosine or T), ribonebularine, 2'-O-methylnebularine or deoxynebularine
  modified_base 1..4: mod_base = OTHER; note = phosphorothioate linkage
  modified_base 64..65: mod_base = OTHER; note = phosphorothioate linkage
  modified_base 98..100: mod_base = OTHER; note = phosphorothioate linkage
  misc_feature 1..100: note = RNA
  misc_feature 101..103: note = Optionally DNA or RNA

SEQ ID NO: 1853 - DNA, 103 bp, synthetic construct; identical to SEQ ID NO: 1795
  source 1..103: mol_type = other DNA
  modified_base 1: mod_base = OTHER; note = 2'-O-methyl ribonucleotide
  modified_base 2: mod_base = OTHER; note = 2'-O-methyl ribonucleotide
  modified_base 3: mod_base = OTHER; note = 2'-O-methyl ribonucleotide
  modified_base 21: mod_base = OTHER; note = 2'-O-methyl ribonucleotide
  modified_base 28: mod_base = OTHER; note = 2'-O-methyl ribonucleotide
  modified_base 29: mod_base = OTHER; note = 2'-O-methyl ribonucleotide
  modified_base 30: mod_base = OTHER; note = 2'-O-methyl ribonucleotide
  modified_base 31: mod_base = OTHER; note = 2'-O-methyl ribonucleotide
  modified_base 32: mod_base = OTHER; note = 2'-O-methyl ribonucleotide
  modified_base 34: mod_base = OTHER; note = 2'-O-methyl ribonucleotide
  modified_base 35: mod_base = OTHER; note = 2'-O-methyl ribonucleotide
  modified_base 36: mod_base = OTHER; note = 2'-O-methyl ribonucleotide
  modified_base 37: mod_base = OTHER; note = 2'-O-methyl ribonucleotide
  modified_base 38: mod_base = OTHER; note = 2'-O-methyl ribonucleotide
  modified_base 39: mod_base = OTHER; note = 2'-O-methyl ribonucleotide
  modified_base 40: mod_base = OTHER; note = 2'-O-methyl ribonucleotide
  modified_base 41: mod_base = OTHER; note = 2'-O-methyl ribonucleotide
  modified_base 42: mod_base = OTHER; note = 2'-O-methyl ribonucleotide
  modified_base 46: mod_base = OTHER; note = 2'-O-methyl ribonucleotide
  modified_base 48: mod_base = OTHER; note = 2'-O-methyl ribonucleotide
  modified_base 50: mod_base = OTHER; note = 2'-O-methyl ribonucleotide
  modified_base 52: mod_base = OTHER; note = 2'-O-methyl ribonucleotide
  modified_base 53: mod_base = OTHER; note = 2'-O-methyl ribonucleotide
  modified_base 54: mod_base = OTHER; note = 2'-O-methyl ribonucleotide
  modified_base 57: mod_base = OTHER; note = 2'-O-methyl ribonucleotide
  modified_base 61: mod_base = OTHER; note = 2'-O-methyl ribonucleotide
  modified_base 66: mod_base = OTHER; note = 2'-O-methyl ribonucleotide
  modified_base 67: mod_base = OTHER; note = 2'-O-methyl ribonucleotide
  modified_base 70: mod_base = OTHER; note = 2'-O-methyl ribonucleotide
  modified_base 71: mod_base = OTHER; note = 2'-O-methyl ribonucleotide
  modified_base 72: mod_base = OTHER; note = 2'-O-methyl ribonucleotide
  modified_base 74: mod_base = OTHER; note = 2'-O-methyl ribonucleotide
  modified_base 75: mod_base = OTHER; note = 2'-O-methyl ribonucleotide
  modified_base 76: mod_base = OTHER; note = 2'-O-methyl ribonucleotide
  modified_base 77: mod_base = OTHER; note = 2'-O-methyl ribonucleotide
  modified_base 78: mod_base = OTHER; note = 2'-O-methyl ribonucleotide
  modified_base 79: mod_base = OTHER; note = 2'-O-methyl ribonucleotide
  modified_base 80: mod_base = OTHER; note = 2'-O-methyl ribonucleotide
  modified_base 82: mod_base = OTHER; note = 2'-O-methyl ribonucleotide
  modified_base 83: mod_base = OTHER; note = 2'-O-methyl ribonucleotide
  modified_base 84: mod_base = OTHER; note = 2'-O-methyl ribonucleotide
  modified_base 85: mod_base = OTHER; note = 2'-O-methyl ribonucleotide
  modified_base 86: mod_base = OTHER; note = 2'-O-methyl ribonucleotide
  modified_base 87: mod_base = OTHER; note = 2'-O-methyl ribonucleotide
  modified_base 89: mod_base = OTHER; note = 2'-O-methyl ribonucleotide
  modified_base 92: mod_base = OTHER; note = 2'-O-methyl ribonucleotide
  modified_base 93: mod_base = OTHER; note = 2'-O-methyl ribonucleotide
  modified_base 94: mod_base = OTHER; note = 2'-O-methyl ribonucleotide
  modified_base 95: mod_base = OTHER; note = 2'-O-methyl ribonucleotide
  modified_base 96: mod_base = OTHER; note = 2'-O-methyl ribonucleotide
  modified_base 97: mod_base = OTHER; note = 2'-O-methyl ribonucleotide
  modified_base 98: mod_base = OTHER; note = 2'-O-methyl ribonucleotide
  modified_base 99: mod_base = OTHER; note = 2'-O-methyl ribonucleotide
  modified_base 100: mod_base = OTHER; note = 2'-O-methyl ribonucleotide
  modified_base 101: mod_base = OTHER; note = uniform ribonucleotides (A, C, G, inosine or U), deoxynucleotides (A, G, C, inosine or T), ribonebularine, 2'-O-methylnebularine or deoxynebularine
  modified_base 102: mod_base = OTHER; note = uniform ribonucleotides (A, C, G, inosine or U), deoxynucleotides (A, G, C, inosine or T), ribonebularine, 2'-O-methylnebularine or deoxynebularine
  modified_base 103: mod_base = OTHER; note = uniform ribonucleotides (A, C, G, inosine or U), deoxynucleotides (A, G, C, inosine or T), ribonebularine, 2'-O-methylnebularine or deoxynebularine
  modified_base 1..4: mod_base = OTHER; note = phosphorothioate linkage
  modified_base 45..46: mod_base = OTHER; note = phosphorothioate linkage
  modified_base 98..100: mod_base = OTHER; note = phosphorothioate linkage
  misc_feature 1..100: note = RNA
  misc_feature 101..103: note = Optionally DNA or RNA

SEQ ID NO: 1854 - DNA, 103 bp, synthetic construct; identical to SEQ ID NO: 1796
  source 1..103: mol_type = other DNA
  modified_base 1: mod_base = OTHER; note = 2'-O-methyl ribonucleotide
  modified_base 2: mod_base = OTHER; note = 2'-O-methyl ribonucleotide
  modified_base 3: mod_base = OTHER; note = 2'-O-methyl ribonucleotide
  modified_base 21: mod_base = OTHER; note = 2'-O-methyl ribonucleotide
  modified_base 28: mod_base = OTHER; note = 2'-O-methyl ribonucleotide
  modified_base 29: mod_base = OTHER; note = 2'-O-methyl ribonucleotide
  modified_base 30: mod_base = OTHER; note = 2'-O-methyl ribonucleotide
  modified_base 31: mod_base = OTHER; note = 2'-O-methyl ribonucleotide
  modified_base 32: mod_base = OTHER; note = 2'-O-methyl ribonucleotide
  modified_base 34: mod_base = OTHER; note = 2'-O-methyl ribonucleotide
  modified_base 35: mod_base = OTHER; note = 2'-O-methyl ribonucleotide
  modified_base 36: mod_base = OTHER; note = 2'-O-methyl ribonucleotide
  modified_base 37: mod_base = OTHER; note = 2'-O-methyl ribonucleotide
  modified_base 38: mod_base = OTHER; note = 2'-O-methyl ribonucleotide
  modified_base 39: mod_base = OTHER; note = 2'-O-methyl ribonucleotide
  modified_base 40: mod_base = OTHER; note = 2'-O-methyl ribonucleotide
  modified_base 41: mod_base = OTHER; note = 2'-O-methyl ribonucleotide
  modified_base 42: mod_base = OTHER; note = 2'-O-methyl ribonucleotide
  modified_base 46: mod_base = OTHER; note = 2'-O-methyl ribonucleotide
  modified_base 48: mod_base = OTHER; note = 2'-O-methyl ribonucleotide
  modified_base 50: mod_base = OTHER; note = 2'-O-methyl ribonucleotide
  modified_base 52: mod_base = OTHER; note = 2'-O-methyl ribonucleotide
  modified_base 53: mod_base = OTHER; note = 2'-O-methyl ribonucleotide
  modified_base 54: mod_base = OTHER; note = 2'-O-methyl ribonucleotide
  modified_base 57: mod_base = OTHER; note = 2'-O-methyl ribonucleotide
  modified_base 61: mod_base = OTHER; note = 2'-O-methyl ribonucleotide
  modified_base 66: mod_base = OTHER; note = 2'-O-methyl ribonucleotide
  modified_base 67: mod_base = OTHER; note = 2'-O-methyl ribonucleotide
  modified_base 70: mod_base = OTHER; note = 2'-O-methyl ribonucleotide
  modified_base 71: mod_base = OTHER; note = 2'-O-methyl ribonucleotide
  modified_base 72: mod_base = OTHER; note = 2'-O-methyl ribonucleotide
  modified_base 74: mod_base = OTHER; note = 2'-O-methyl ribonucleotide
  modified_base 75: mod_base = OTHER; note = 2'-O-methyl ribonucleotide
  modified_base 76: mod_base = OTHER; note = 2'-O-methyl ribonucleotide
  modified_base 77: mod_base = OTHER; note = 2'-O-methyl ribonucleotide
  modified_base 78: mod_base = OTHER; note = 2'-O-methyl ribonucleotide
  modified_base 79: mod_base = OTHER; note = 2'-O-methyl ribonucleotide
  modified_base 80: mod_base = OTHER; note = 2'-O-methyl ribonucleotide
  modified_base 82: mod_base = OTHER; note = 2'-O-methyl ribonucleotide
  modified_base 83: mod_base = OTHER; note = 2'-O-methyl ribonucleotide
  modified_base 84: mod_base = OTHER; note = 2'-O-methyl ribonucleotide
  modified_base 85: mod_base = OTHER; note = 2'-O-methyl ribonucleotide
  modified_base 86: mod_base = OTHER; note = 2'-O-methyl ribonucleotide
  modified_base 87: mod_base = OTHER; note = 2'-O-methyl ribonucleotide
  modified_base 89: mod_base = OTHER; note = 2'-O-methyl ribonucleotide
  modified_base 92: mod_base = OTHER; note = 2'-O-methyl ribonucleotide
  modified_base 93: mod_base = OTHER; note = 2'-O-methyl ribonucleotide
  modified_base 94: mod_base = OTHER; note = 2'-O-methyl ribonucleotide
  modified_base 95: mod_base = OTHER; note = 2'-O-methyl ribonucleotide
  modified_base 96: mod_base = OTHER; note = 2'-O-methyl ribonucleotide
  modified_base 97: mod_base = OTHER; note = 2'-O-methyl ribonucleotide
  modified_base 98: mod_base = OTHER; note = 2'-O-methyl ribonucleotide
  modified_base 99: mod_base = OTHER; note = 2'-O-methyl ribonucleotide
  modified_base 100: mod_base = OTHER; note = 2'-O-methyl ribonucleotide
  modified_base 101: mod_base = OTHER; note = uniform ribonucleotides (A, C, G, inosine or U), deoxynucleotides (A, G, C, inosine or T), ribonebularine, 2'-O-methylnebularine or deoxynebularine
  modified_base 102: mod_base = OTHER; note = uniform ribonucleotides (A, C, G, inosine or U), deoxynucleotides (A, G, C, inosine or T), ribonebularine, 2'-O-methylnebularine or deoxynebularine
  modified_base 103: mod_base = OTHER; note = uniform ribonucleotides (A, C, G, inosine or U), deoxynucleotides (A, G, C, inosine or T), ribonebularine, 2'-O-methylnebularine or deoxynebularine
  modified_base 1..4: mod_base = OTHER; note = phosphorothioate linkage
  modified_base 45..46: mod_base = OTHER; note = phosphorothioate linkage
  modified_base 98..100: mod_base = OTHER; note = phosphorothioate linkage
  misc_feature 1..100: note = RNA
  misc_feature 101..103: note = Optionally DNA or RNA

SEQ ID NO: 1855 - DNA, 103 bp, synthetic construct; identical to SEQ ID NO: 1797
  source 1..103: mol_type = other DNA
  modified_base 1: mod_base = OTHER; note = 2'-O-methyl ribonucleotide
  modified_base 2: mod_base = OTHER; note = 2'-O-methyl ribonucleotide
  modified_base 3: mod_base = OTHER; note = 2'-O-methyl ribonucleotide
  modified_base 21: mod_base = OTHER; note = 2'-O-methyl ribonucleotide
  modified_base 28: mod_base = OTHER; note = 2'-O-methyl ribonucleotide
  modified_base 29: mod_base = OTHER; note = 2'-O-methyl ribonucleotide
  modified_base 30: mod_base = OTHER; note = 2'-O-methyl ribonucleotide
  modified_base 31: mod_base = OTHER; note = 2'-O-methyl ribonucleotide
  modified_base 32: mod_base = OTHER; note = 2'-O-methyl ribonucleotide
  modified_base 34: mod_base = OTHER; note = 2'-O-methyl ribonucleotide
  modified_base 35: mod_base = OTHER; note = 2'-O-methyl ribonucleotide
  modified_base 36: mod_base = OTHER; note = 2'-O-methyl ribonucleotide
  modified_base 37: mod_base = OTHER; note = 2'-O-methyl ribonucleotide
  modified_base 38: mod_base = OTHER; note = 2'-O-methyl ribonucleotide
  modified_base 39: mod_base = OTHER; note = 2'-O-methyl ribonucleotide
  modified_base 40: mod_base = OTHER; note = 2'-O-methyl ribonucleotide
  modified_base 41: mod_base = OTHER; note = 2'-O-methyl ribonucleotide
  modified_base 42: mod_base = OTHER; note = 2'-O-methyl ribonucleotide
  modified_base 46: mod_base = OTHER; note = 2'-O-methyl ribonucleotide
  modified_base 48: mod_base = OTHER; note = 2'-O-methyl ribonucleotide
  modified_base 50: mod_base = OTHER; note = 2'-O-methyl ribonucleotide
  modified_base 52: mod_base = OTHER; note = 2'-O-methyl ribonucleotide
  modified_base 53: mod_base = OTHER; note = 2'-O-methyl ribonucleotide
  modified_base 54: mod_base = OTHER; note = 2'-O-methyl ribonucleotide
  modified_base 55: mod_base = OTHER; note = 2'-O-methyl ribonucleotide
  modified_base 56: mod_base = OTHER; note = 2'-O-methyl ribonucleotide
  modified_base 57: mod_base = OTHER; note = 2'-O-methyl ribonucleotide
  modified_base 60: mod_base = OTHER; note = 2'-O-methyl ribonucleotide
  modified_base 61: mod_base = OTHER; note = 2'-O-methyl ribonucleotide
  modified_base 66: mod_base = OTHER; note = 2'-O-methyl ribonucleotide
  modified_base 67: mod_base = OTHER; note = 2'-O-methyl ribonucleotide
  modified_base 70: mod_base = OTHER; note = 2'-O-methyl ribonucleotide
  modified_base 71: mod_base = OTHER; note = 2'-O-methyl ribonucleotide
  modified_base 72: mod_base = OTHER; note = 2'-O-methyl ribonucleotide
  modified_base 74: mod_base = OTHER; note = 2'-O-methyl ribonucleotide
  modified_base 75: mod_base = OTHER; note = 2'-O-methyl ribonucleotide
  modified_base 76: mod_base = OTHER; note = 2'-O-methyl ribonucleotide
  modified_base 77: mod_base = OTHER; note = 2'-O-methyl ribonucleotide
  modified_base 78: mod_base = OTHER; note = 2'-O-methyl ribonucleotide
  modified_base 79: mod_base = OTHER; note = 2'-O-methyl ribonucleotide
  modified_base 80: mod_base = OTHER; note = 2'-O-methyl ribonucleotide
  modified_base 81: mod_base = OTHER; note = 2'-O-methyl ribonucleotide
  modified_base 83: mod_base = OTHER; note = 2'-O-methyl ribonucleotide
  modified_base 84: mod_base = OTHER; note = 2'-O-methyl ribonucleotide
  modified_base 85: mod_base = OTHER; note = 2'-O-methyl ribonucleotide
  modified_base 86: mod_base = OTHER; note = 2'-O-methyl ribonucleotide
  modified_base 87: mod_base = OTHER; note = 2'-O-methyl ribonucleotide
  modified_base 88: mod_base = OTHER; note = 2'-O-methyl ribonucleotide
  modified_base 89: mod_base = OTHER; note = 2'-O-methyl ribonucleotide
  modified_base 90: mod_base = OTHER; note = 2'-O-methyl ribonucleotide
  modified_base 91: mod_base = OTHER; note = 2'-O-methyl ribonucleotide
  modified_base 92: mod_base = OTHER; note = 2'-O-methyl ribonucleotide
  modified_base 93: mod_base = OTHER; note = 2'-O-methyl ribonucleotide
  modified_base 94: mod_base = OTHER; note = 2'-O-methyl ribonucleotide
  modified_base 95: mod_base = OTHER; note = 2'-O-methyl ribonucleotide
  modified_base 96: mod_base = OTHER; note = 2'-O-methyl ribonucleotide
  modified_base 97: mod_base = OTHER; note = 2'-O-methyl ribonucleotide
  modified_base 98: mod_base = OTHER; note = 2'-O-methyl ribonucleotide
  modified_base 99: mod_base = OTHER; note = 2'-O-methyl ribonucleotide
  modified_base 100: mod_base = OTHER; note = 2'-O-methyl ribonucleotide
  modified_base 101: mod_base = OTHER; note = uniform ribonucleotides (A, C, G, inosine or U), deoxynucleotides (A, G, C, inosine or T), ribonebularine, 2'-O-methylnebularine or deoxynebularine
  modified_base 102: mod_base = OTHER; note = uniform ribonucleotides (A, C, G, inosine or U), deoxynucleotides (A, G, C, inosine or T), ribonebularine, 2'-O-methylnebularine or deoxynebularine
  modified_base 103: mod_base = OTHER; note = uniform ribonucleotides (A, C, G, inosine or U), deoxynucleotides (A, G, C, inosine or T), ribonebularine, 2'-O-methylnebularine or deoxynebularine
  modified_base 1..4: mod_base = OTHER; note = phosphorothioate linkage
  modified_base 45..46: mod_base = OTHER; note = phosphorothioate linkage
  modified_base 98..100: mod_base = OTHER; note = phosphorothioate linkage
  misc_feature 1..100: note = RNA
  misc_feature 101..103: note = Optionally DNA or RNA

SEQ ID NO: 1856 - DNA, 103 bp, synthetic construct; identical to SEQ ID NO: 1795
  source 1..103: mol_type = other DNA
  modified_base 1: mod_base = OTHER; note = 2'-O-methyl ribonucleotide
  modified_base 2: mod_base = OTHER; note = 2'-O-methyl ribonucleotide
  modified_base 3: mod_base = OTHER; note = 2'-O-methyl ribonucleotide
  modified_base 21: mod_base = OTHER; note = 2'-O-methyl ribonucleotide
  modified_base 28: mod_base = OTHER; note = 2'-O-methyl ribonucleotide
  modified_base 29: mod_base = OTHER; note = 2'-O-methyl ribonucleotide
  modified_base 30: mod_base = OTHER; note = 2'-O-methyl ribonucleotide
  modified_base 31: mod_base = OTHER; note = 2'-O-methyl ribonucleotide
  modified_base 32: mod_base = OTHER; note = 2'-O-methyl ribonucleotide
  modified_base 34: mod_base = OTHER; note = 2'-O-methyl ribonucleotide
  modified_base 35: mod_base = OTHER; note = 2'-O-methyl ribonucleotide
  modified_base 36: mod_base = OTHER; note = 2'-O-methyl ribonucleotide
  modified_base 37: mod_base = OTHER; note = 2'-O-methyl ribonucleotide
  modified_base 38: mod_base = OTHER; note = 2'-O-methyl ribonucleotide
  modified_base 39: mod_base = OTHER; note = 2'-O-methyl ribonucleotide
  modified_base 40: mod_base = OTHER; note = 2'-O-methyl ribonucleotide
  modified_base 41: mod_base = OTHER; note = 2'-O-methyl ribonucleotide
  modified_base 42: mod_base = OTHER; note = 2'-O-methyl ribonucleotide
  modified_base 46: mod_base = OTHER; note = 2'-O-methyl ribonucleotide
  modified_base 48: mod_base = OTHER; note = 2'-O-methyl ribonucleotide
  modified_base 50: mod_base = OTHER; note = 2'-O-methyl ribonucleotide
  modified_base 52: mod_base = OTHER; note = 2'-O-methyl ribonucleotide
  modified_base 53: mod_base = OTHER; note = 2'-O-methyl ribonucleotide
  modified_base 54: mod_base = OTHER; note = 2'-O-methyl ribonucleotide
  modified_base 57: mod_base = OTHER; note = 2'-O-methyl ribonucleotide
  modified_base 61: mod_base = OTHER; note = 2'-O-methyl ribonucleotide
  modified_base 66: mod_base = OTHER; note = 2'-O-methyl ribonucleotide
  modified_base 67: mod_base = OTHER; note = 2'-O-methyl ribonucleotide
  modified_base 70: mod_base = OTHER; note = 2'-O-methyl ribonucleotide
  modified_base 71: mod_base = OTHER; note = 2'-O-methyl ribonucleotide
  modified_base 72: mod_base = OTHER; note = 2'-O-methyl ribonucleotide
  modified_base 74: mod_base = OTHER; note = 2'-O-methyl ribonucleotide
  modified_base 75: mod_base = OTHER; note = 2'-O-methyl ribonucleotide
  modified_base 76: mod_base = OTHER; note = 2'-O-methyl ribonucleotide
  modified_base 77: mod_base = OTHER; note = 2'-O-methyl ribonucleotide
  modified_base 78: mod_base = OTHER; note = 2'-O-methyl ribonucleotide
  modified_base 79: mod_base = OTHER; note = 2'-O-methyl ribonucleotide
  modified_base 80: mod_base = OTHER; note = 2'-O-methyl ribonucleotide
  modified_base 82: mod_base = OTHER; note = 2'-O-methyl ribonucleotide
  modified_base 83: mod_base = OTHER; note = 2'-O-methyl ribonucleotide
  modified_base 84: mod_base = OTHER; note = 2'-O-methyl ribonucleotide
  modified_base 85: mod_base = OTHER; note = 2'-O-methyl ribonucleotide
  modified_base 86: mod_base = OTHER; note = 2'-O-methyl ribonucleotide
  modified_base 87: mod_base = OTHER; note = 2'-O-methyl ribonucleotide
  modified_base 89: mod_base = OTHER; note = 2'-O-methyl ribonucleotide
  modified_base 92: mod_base = OTHER; note = 2'-O-methyl ribonucleotide
  modified_base 93: mod_base = OTHER; note = 2'-O-methyl ribonucleotide
  modified_base 94: mod_base = OTHER; note = 2'-O-methyl ribonucleotide
  modified_base 95: mod_base = OTHER; note = 2'-O-methyl ribonucleotide
  modified_base 96: mod_base = OTHER; note = 2'-O-methyl ribonucleotide
  modified_base 97: mod_base = OTHER; note = 2'-O-methyl ribonucleotide
  modified_base 98: mod_base = OTHER; note = 2'-O-methyl ribonucleotide
  modified_base 99: mod_base = OTHER; note = 2'-O-methyl ribonucleotide
  modified_base 100: mod_base = OTHER; note = 2'-O-methyl ribonucleotide
  modified_base 101: mod_base = OTHER; note = uniform ribonucleotides (A, C, G, inosine or U), deoxynucleotides (A, G, C, inosine or T), ribonebularine, 2'-O-methylnebularine or deoxynebularine
  modified_base 102: mod_base = OTHER; note = uniform ribonucleotides (A, C, G, inosine or U), deoxynucleotides (A, G, C, inosine or T), ribonebularine, 2'-O-methylnebularine or deoxynebularine
  modified_base 103: mod_base = OTHER; note = uniform ribonucleotides (A, C, G, inosine or U), deoxynucleotides (A, G, C, inosine or T), ribonebularine, 2'-O-methylnebularine or deoxynebularine
  modified_base 1..4: mod_base = OTHER; note = phosphorothioate linkage
  modified_base 25..26: mod_base = OTHER; note = phosphorothioate linkage
  modified_base 98..100: mod_base = OTHER; note = phosphorothioate linkage
  misc_feature 1..100: note = RNA
  misc_feature 101..103: note = Optionally DNA or RNA

SEQ ID NO: 1857 - DNA, 103 bp, synthetic construct; identical to SEQ ID NO: 1796
  source 1..103: mol_type = other DNA
  modified_base 1: mod_base = OTHER; note = 2'-O-methyl ribonucleotide
  modified_base 2: mod_base = OTHER; note = 2'-O-methyl ribonucleotide
  modified_base 3: mod_base = OTHER; note = 2'-O-methyl ribonucleotide
  modified_base 21: mod_base = OTHER; note = 2'-O-methyl ribonucleotide
  modified_base 28: mod_base = OTHER; note = 2'-O-methyl ribonucleotide
  modified_base 29: mod_base = OTHER; note = 2'-O-methyl ribonucleotide
  modified_base 30: mod_base = OTHER; note = 2'-O-methyl ribonucleotide
  modified_base 31: mod_base = OTHER; note = 2'-O-methyl ribonucleotide
  modified_base 32: mod_base = OTHER; note = 2'-O-methyl ribonucleotide
  modified_base 34: mod_base = OTHER; note = 2'-O-methyl ribonucleotide
  modified_base 35: mod_base = OTHER; note = 2'-O-methyl ribonucleotide
  modified_base 36: mod_base = OTHER; note = 2'-O-methyl ribonucleotide
  modified_base 37: mod_base = OTHER; note = 2'-O-methyl ribonucleotide
  modified_base 38: mod_base = OTHER; note = 2'-O-methyl ribonucleotide
  modified_base 39: mod_base = OTHER; note = 2'-O-methyl ribonucleotide
  modified_base 40: mod_base = OTHER; note = 2'-O-methyl ribonucleotide
  modified_base 41: mod_base = OTHER; note = 2'-O-methyl ribonucleotide
  modified_base 42: mod_base = OTHER; note = 2'-O-methyl ribonucleotide
  modified_base 46: mod_base = OTHER; note = 2'-O-methyl ribonucleotide
  modified_base 48: mod_base = OTHER; note = 2'-O-methyl ribonucleotide
  modified_base 50: mod_base = OTHER; note = 2'-O-methyl ribonucleotide
  modified_base 52: mod_base = OTHER; note = 2'-O-methyl ribonucleotide
  modified_base 53: mod_base = OTHER; note = 2'-O-methyl ribonucleotide
  modified_base 54: mod_base = OTHER; note = 2'-O-methyl ribonucleotide
  modified_base 57: mod_base = OTHER; note = 2'-O-methyl ribonucleotide
  modified_base 61: mod_base = OTHER; note = 2'-O-methyl ribonucleotide
  modified_base 66: mod_base = OTHER; note = 2'-O-methyl ribonucleotide
  modified_base 67: mod_base = OTHER; note = 2'-O-methyl ribonucleotide
  modified_base 70: mod_base = OTHER; note = 2'-O-methyl ribonucleotide
  modified_base 71: mod_base = OTHER; note = 2'-O-methyl ribonucleotide
  modified_base 72: mod_base = OTHER; note = 2'-O-methyl ribonucleotide
  modified_base 74: mod_base = OTHER; note = 2'-O-methyl ribonucleotide
  modified_base 75: mod_base = OTHER; note = 2'-O-methyl ribonucleotide
  modified_base 76: mod_base = OTHER; note = 2'-O-methyl ribonucleotide
  modified_base 77: mod_base = OTHER; note = 2'-O-methyl ribonucleotide
  modified_base 78: mod_base = OTHER; note = 2'-O-methyl ribonucleotide
  modified_base 79: mod_base = OTHER; note = 2'-O-methyl ribonucleotide
  modified_base 80: mod_base = OTHER; note = 2'-O-methyl ribonucleotide
  modified_base 82: mod_base = OTHER; note = 2'-O-methyl ribonucleotide
  modified_base 83: mod_base = OTHER; note = 2'-O-methyl ribonucleotide
  modified_base 84: mod_base = OTHER; note = 2'-O-methyl ribonucleotide
  modified_base 85: mod_base = OTHER; note = 2'-O-methyl ribonucleotide
  modified_base 86: mod_base = OTHER; note = 2'-O-methyl ribonucleotide
  modified_base 87: mod_base = OTHER; note = 2'-O-methyl ribonucleotide
  modified_base 89: mod_base = OTHER; note = 2'-O-methyl ribonucleotide
  modified_base 92: mod_base = OTHER; note = 2'-O-methyl ribonucleotide
  modified_base 93: mod_base = OTHER; note = 2'-O-methyl ribonucleotide
  modified_base 94: mod_base = OTHER; note = 2'-O-methyl ribonucleotide
  modified_base 95: mod_base = OTHER; note = 2'-O-methyl ribonucleotide
  modified_base 96: mod_base = OTHER; note = 2'-O-methyl ribonucleotide
  modified_base 97: mod_base = OTHER; note = 2'-O-methyl ribonucleotide
  modified_base 98: mod_base = OTHER; note = 2'-O-methyl ribonucleotide
  modified_base 99: mod_base = OTHER; note = 2'-O-methyl ribonucleotide
  modified_base 100: mod_base = OTHER; note = 2'-O-methyl ribonucleotide
  modified_base 101: mod_base = OTHER; note = uniform ribonucleotides (A, C, G, inosine or U), deoxynucleotides (A, G, C, inosine or T), ribonebularine, 2'-O-methylnebularine or deoxynebularine
  modified_base 102: mod_base = OTHER; note = uniform ribonucleotides (A, C, G, inosine or U), deoxynucleotides (A, G, C, inosine or T), ribonebularine, 2'-O-methylnebularine or deoxynebularine
  modified_base 103: mod_base = OTHER; note = uniform ribonucleotides (A, C, G, inosine or U), deoxynucleotides (A, G, C, inosine or T), ribonebularine, 2'-O-methylnebularine or deoxynebularine
  modified_base 1..4: mod_base = OTHER; note = phosphorothioate linkage
  modified_base 25..26: mod_base = OTHER; note = phosphorothioate linkage
  modified_base 98..100: mod_base = OTHER; note = phosphorothioate linkage
  misc_feature 1..100: note = RNA
  misc_feature 101..103: note = Optionally DNA or RNA

SEQ ID NO: 1858 - DNA, 103 bp, synthetic construct; identical to SEQ ID NO: 1797
  source 1..103: mol_type = other DNA
  modified_base 1: mod_base = OTHER; note = 2'-O-methyl ribonucleotide
  modified_base 2: mod_base = OTHER; note = 2'-O-methyl ribonucleotide
  modified_base 3: mod_base = OTHER; note = 2'-O-methyl ribonucleotide
  modified_base 21: mod_base = OTHER; note = 2'-O-methyl ribonucleotide
  modified_base 28: mod_base = OTHER; note = 2'-O-methyl ribonucleotide
  modified_base 29: mod_base = OTHER; note = 2'-O-methyl ribonucleotide
  modified_base 30: mod_base = OTHER; note = 2'-O-methyl ribonucleotide
  modified_base 31: mod_base = OTHER; note = 2'-O-methyl ribonucleotide
  modified_base 32: mod_base = OTHER; note = 2'-O-methyl ribonucleotide
  modified_base 34: mod_base = OTHER; note = 2'-O-methyl ribonucleotide
  modified_base 35: mod_base = OTHER; note = 2'-O-methyl ribonucleotide
  modified_base 36: mod_base = OTHER; note = 2'-O-methyl ribonucleotide
  modified_base 37: mod_base = OTHER; note = 2'-O-methyl ribonucleotide
  modified_base 38: mod_base = OTHER; note = 2'-O-methyl ribonucleotide
  modified_base 39: mod_base = OTHER; note = 2'-O-methyl ribonucleotide
  modified_base 40: mod_base = OTHER; note = 2'-O-methyl ribonucleotide
  modified_base 41: mod_base = OTHER; note = 2'-O-methyl ribonucleotide
  modified_base 42: mod_base = OTHER; note = 2'-O-methyl ribonucleotide
  modified_base 46: mod_base = OTHER; note = 2'-O-methyl ribonucleotide
  modified_base 48: mod_base = OTHER; note = 2'-O-methyl ribonucleotide
  modified_base 50: mod_base = OTHER; note = 2'-O-methyl ribonucleotide
  modified_base 52: mod_base = OTHER; note = 2'-O-methyl ribonucleotide
  modified_base 53: mod_base = OTHER; note = 2'-O-methyl ribonucleotide
  modified_base 54: mod_base = OTHER; note = 2'-O-methyl ribonucleotide
  modified_base 55: mod_base = OTHER; note = 2'-O-methyl ribonucleotide
  modified_base 56: mod_base = OTHER; note = 2'-O-methyl ribonucleotide
  modified_base 57: mod_base = OTHER; note = 2'-O-methyl ribonucleotide
  modified_base 60: mod_base = OTHER; note = 2'-O-methyl ribonucleotide
  modified_base 61: mod_base = OTHER; note = 2'-O-methyl ribonucleotide
  modified_base 66: mod_base = OTHER; note = 2'-O-methyl ribonucleotide
  modified_base 67: mod_base = OTHER; note = 2'-O-methyl ribonucleotide
  modified_base 70: mod_base = OTHER; note = 2'-O-methyl ribonucleotide
  modified_base 71: mod_base = OTHER; note = 2'-O-methyl ribonucleotide
  modified_base 72: mod_base = OTHER; note = 2'-O-methyl ribonucleotide
  modified_base 74: mod_base = OTHER; note = 2'-O-methyl ribonucleotide
  modified_base 75: mod_base = OTHER; note = 2'-O-methyl ribonucleotide
  modified_base 76: mod_base = OTHER; note = 2'-O-methyl ribonucleotide
  modified_base 77: mod_base = OTHER; note = 2'-O-methyl ribonucleotide
  modified_base 78: mod_base = OTHER; note = 2'-O-methyl ribonucleotide
  modified_base 79: mod_base = OTHER; note = 2'-O-methyl ribonucleotide
  modified_base 80: mod_base = OTHER; note = 2'-O-methyl ribonucleotide
  modified_base 81: mod_base = OTHER; note = 2'-O-methyl ribonucleotide
  modified_base 83: mod_base = OTHER; note = 2'-O-methyl ribonucleotide
  modified_base 84: mod_base = OTHER; note = 2'-O-methyl ribonucleotide
  modified_base 85: mod_base = OTHER; note = 2'-O-methyl ribonucleotide
  modified_base 86: mod_base = OTHER; note = 2'-O-methyl ribonucleotide
  modified_base 87: mod_base = OTHER; note = 2'-O-methyl ribonucleotide
  modified_base 88: mod_base = OTHER; note = 2'-O-methyl ribonucleotide
  modified_base 89: mod_base = OTHER; note = 2'-O-methyl ribonucleotide
  modified_base 90: mod_base = OTHER; note = 2'-O-methyl ribonucleotide
  modified_base 91: mod_base = OTHER; note = 2'-O-methyl ribonucleotide
  modified_base 92: mod_base = OTHER; note = 2'-O-methyl ribonucleotide
  modified_base 93: mod_base = OTHER; note = 2'-O-methyl ribonucleotide
  modified_base 94: mod_base = OTHER; note = 2'-O-methyl ribonucleotide
  modified_base 95: mod_base = OTHER; note = 2'-O-methyl ribonucleotide
  modified_base 96: mod_base = OTHER; note = 2'-O-methyl ribonucleotide
  modified_base 97: mod_base = OTHER; note = 2'-O-methyl ribonucleotide
  modified_base 98: mod_base = OTHER; note = 2'-O-methyl ribonucleotide
  modified_base 99: mod_base = OTHER; note = 2'-O-methyl ribonucleotide
  modified_base 100: mod_base = OTHER; note = 2'-O-methyl ribonucleotide
  modified_base 101: mod_base = OTHER; note = uniform ribonucleotides (A, C, G, inosine or U), deoxynucleotides (A, G, C, inosine or T), ribonebularine, 2'-O-methylnebularine or deoxynebularine
  modified_base 102: mod_base = OTHER; note = uniform ribonucleotides (A, C, G, inosine or U), deoxynucleotides (A, G, C, inosine or T), ribonebularine, 2'-O-methylnebularine or deoxynebularine
  modified_base 103: mod_base = OTHER; note = uniform ribonucleotides (A, C, G, inosine or U), deoxynucleotides (A, G, C, inosine or T), ribonebularine, 2'-O-methylnebularine or deoxynebularine
  modified_base 1..4: mod_base = OTHER; note = phosphorothioate linkage
  modified_base 25..26: mod_base = OTHER; note = phosphorothioate linkage
  modified_base 98..100: mod_base = OTHER; note = phosphorothioate linkage
  misc_feature 1..100: note = RNA
  misc_feature 101..103: note = Optionally DNA or RNA

SEQ ID NO: 1859 - DNA, 103 bp, synthetic construct; identical to SEQ ID NO: 1795
  source 1..103: mol_type = other DNA
  modified_base 1: mod_base = OTHER; note = 2'-O-methyl ribonucleotide
  modified_base 2: mod_base = OTHER; note = 2'-O-methyl ribonucleotide
  modified_base 3: mod_base = OTHER; note = 2'-O-methyl ribonucleotide
  modified_base 21: mod_base = OTHER; note = 2'-O-methyl ribonucleotide
  modified_base 28: mod_base = OTHER; note = 2'-O-methyl ribonucleotide
  modified_base 29: mod_base = OTHER; note = 2'-O-methyl ribonucleotide
  modified_base 30: mod_base = OTHER; note = 2'-O-methyl ribonucleotide
  modified_base 31: mod_base = OTHER; note = 2'-O-methyl ribonucleotide
  modified_base 32: mod_base = OTHER; note = 2'-O-methyl ribonucleotide
  modified_base 34: mod_base = OTHER; note = 2'-O-methyl ribonucleotide
  modified_base 35: mod_base = OTHER; note = 2'-O-methyl ribonucleotide
  modified_base 36: mod_base = OTHER; note = 2'-O-methyl ribonucleotide
  modified_base 37: mod_base = OTHER; note = 2'-O-methyl ribonucleotide
  modified_base 38: mod_base = OTHER; note = 2'-O-methyl ribonucleotide
  modified_base 39: mod_base = OTHER; note = 2'-O-methyl ribonucleotide
  modified_base 40: mod_base = OTHER; note = 2'-O-methyl ribonucleotide
  modified_base 41: mod_base = OTHER; note = 2'-O-methyl ribonucleotide
  modified_base 42: mod_base = OTHER; note = 2'-O-methyl ribonucleotide
  modified_base 46: mod_base = OTHER; note = 2'-O-methyl ribonucleotide
  modified_base 48: mod_base = OTHER; note = 2'-O-methyl ribonucleotide
  modified_base 50: mod_base = OTHER; note = 2'-O-methyl ribonucleotide
  modified_base 52: mod_base = OTHER; note = 2'-O-methyl ribonucleotide
  modified_base 53: mod_base = OTHER; note = 2'-O-methyl ribonucleotide
  modified_base 54: mod_base = OTHER; note = 2'-O-methyl ribonucleotide
  modified_base 57: mod_base = OTHER; note = 2'-O-methyl ribonucleotide
  modified_base 61: mod_base = OTHER; note = 2'-O-methyl ribonucleotide
  modified_base 66: mod_base = OTHER; note = 2'-O-methyl ribonucleotide
  modified_base 67: mod_base = OTHER; note = 2'-O-methyl ribonucleotide
  modified_base 70: mod_base = OTHER; note = 2'-O-methyl ribonucleotide
  modified_base 71: mod_base = OTHER; note = 2'-O-methyl ribonucleotide
  modified_base 72: mod_base = OTHER; note = 2'-O-methyl ribonucleotide
  modified_base 74: mod_base = OTHER; note = 2'-O-methyl ribonucleotide
  modified_base 75: mod_base = OTHER; note = 2'-O-methyl ribonucleotide
  modified_base 76: mod_base = OTHER; note = 2'-O-methyl ribonucleotide
  modified_base 77: mod_base = OTHER; note = 2'-O-methyl ribonucleotide
  modified_base 78: mod_base = OTHER; note = 2'-O-methyl ribonucleotide
  modified_base 79: mod_base = OTHER; note = 2'-O-methyl ribonucleotide
  modified_base 80: mod_base = OTHER; note = 2'-O-methyl ribonucleotide
  modified_base 82: mod_base = OTHER; note = 2'-O-methyl ribonucleotide
  modified_base 83: mod_base = OTHER; note = 2'-O-methyl ribonucleotide
  modified_base 84: mod_base = OTHER; note = 2'-O-methyl ribonucleotide
  modified_base 85: mod_base = OTHER; note = 2'-O-methyl ribonucleotide
  modified_base 86: mod_base = OTHER; note = 2'-O-methyl ribonucleotide
  modified_base 87: mod_base = OTHER; note = 2'-O-methyl ribonucleotide
  modified_base 89: mod_base = OTHER; note = 2'-O-methyl ribonucleotide
  modified_base 92: mod_base = OTHER; note = 2'-O-methyl ribonucleotide
  modified_base 93: mod_base = OTHER; note = 2'-O-methyl ribonucleotide
  modified_base 94: mod_base = OTHER; note = 2'-O-methyl ribonucleotide
  modified_base 95: mod_base = OTHER; note = 2'-O-methyl ribonucleotide
  modified_base 96: mod_base = OTHER; note = 2'-O-methyl ribonucleotide
  modified_base 97: mod_base = OTHER; note = 2'-O-methyl ribonucleotide
  modified_base 98: mod_base = OTHER; note = 2'-O-methyl ribonucleotide
  modified_base 99: mod_base = OTHER; note = 2'-O-methyl ribonucleotide
  modified_base 100: mod_base = OTHER; note = 2'-O-methyl ribonucleotide
  modified_base 101: mod_base = OTHER; note = uniform ribonucleotides (A, C, G, inosine or U), deoxynucleotides (A, G, C, inosine or T), ribonebularine, 2'-O-methylnebularine or deoxynebularine
  modified_base 102: mod_base = OTHER; note = uniform ribonucleotides (A, C, G, inosine or U), deoxynucleotides (A, G, C, inosine or T), ribonebularine, 2'-O-methylnebularine or deoxynebularine
  modified_base 103: mod_base = OTHER; note = uniform ribonucleotides (A, C, G, inosine or U), deoxynucleotides (A, G, C, inosine or T), ribonebularine, 2'-O-methylnebularine or deoxynebularine
  modified_base 1..4: mod_base = OTHER; note = phosphorothioate linkage
  modified_base 45..46: mod_base = OTHER; note = phosphorothioate linkage
  modified_base 64..65: mod_base = OTHER; note = phosphorothioate linkage
  modified_base 98..100: mod_base = OTHER; note = phosphorothioate linkage
  misc_feature 1..100: note = RNA
  misc_feature 101..103: note = Optionally DNA or RNA

SEQ ID NO: 1860 - DNA, 103 bp, synthetic construct; identical to SEQ ID NO: 1796
  source 1..103: mol_type = other DNA
  modified_base 1: mod_base = OTHER; note = 2'-O-methyl ribonucleotide
  modified_base 2: mod_base = OTHER; note = 2'-O-methyl ribonucleotide
  modified_base 3: mod_base = OTHER; note = 2'-O-methyl ribonucleotide
  modified_base 21: mod_base = OTHER; note = 2'-O-methyl ribonucleotide
  modified_base 28: mod_base = OTHER; note = 2'-O-methyl ribonucleotide
  modified_base 29: mod_base = OTHER; note = 2'-O-methyl ribonucleotide
  modified_base 30: mod_base = OTHER; note = 2'-O-methyl ribonucleotide
  modified_base 31: mod_base = OTHER; note = 2'-O-methyl ribonucleotide
  modified_base 32: mod_base = OTHER; note = 2'-O-methyl ribonucleotide
  modified_base 34: mod_base = OTHER; note = 2'-O-methyl ribonucleotide
  modified_base 35: mod_base = OTHER; note = 2'-O-methyl ribonucleotide
  modified_base 36: mod_base = OTHER; note = 2'-O-methyl ribonucleotide
  modified_base 37: mod_base = OTHER; note = 2'-O-methyl ribonucleotide
  modified_base 38: mod_base = OTHER; note = 2'-O-methyl ribonucleotide
  modified_base 39: mod_base = OTHER; note = 2'-O-methyl ribonucleotide
  modified_base 40: mod_base = OTHER; note = 2'-O-methyl ribonucleotide
  modified_base 41: mod_base = OTHER; note = 2'-O-methyl ribonucleotide
  modified_base 42: mod_base = OTHER; note = 2'-O-methyl ribonucleotide
  modified_base 46: mod_base = OTHER; note = 2'-O-methyl ribonucleotide
  modified_base 48: mod_base = OTHER; note = 2'-O-methyl ribonucleotide
  modified_base 50: mod_base = OTHER; note = 2'-O-methyl ribonucleotide
  modified_base 52: mod_base = OTHER; note = 2'-O-methyl ribonucleotide
  modified_base 53: mod_base = OTHER; note = 2'-O-methyl ribonucleotide
  modified_base 54: mod_base = OTHER; note = 2'-O-methyl ribonucleotide
  modified_base 57: mod_base = OTHER; note = 2'-O-methyl ribonucleotide
  modified_base 61: mod_base = OTHER; note = 2'-O-methyl ribonucleotide
  modified_base 66: mod_base = OTHER; note = 2'-O-methyl ribonucleotide
  modified_base 67: mod_base = OTHER; note = 2'-O-methyl ribonucleotide
  modified_base 70: mod_base = OTHER; note = 2'-O-methyl ribonucleotide
  modified_base 71: mod_base = OTHER; note = 2'-O-methyl ribonucleotide
  modified_base 72: mod_base = OTHER; note = 2'-O-methyl ribonucleotide
  modified_base 74: mod_base = OTHER; note = 2'-O-methyl ribonucleotide
  modified_base 75: mod_base = OTHER; note = 2'-O-methyl ribonucleotide
  modified_base 76: mod_base = OTHER; note = 2'-O-methyl ribonucleotide
  modified_base 77: mod_base = OTHER; note = 2'-O-methyl ribonucleotide
  modified_base 78: mod_base = OTHER; note = 2'-O-methyl ribonucleotide
  modified_base 79: mod_base = OTHER; note = 2'-O-methyl ribonucleotide
  modified_base 80: mod_base = OTHER; note = 2'-O-methyl ribonucleotide
  modified_base 82: mod_base = OTHER; note = 2'-O-methyl ribonucleotide
  modified_base 83: mod_base = OTHER; note = 2'-O-methyl ribonucleotide
  modified_base 84: mod_base = OTHER; note = 2'-O-methyl ribonucleotide
  modified_base 85: mod_base = OTHER; note = 2'-O-methyl ribonucleotide
  modified_base 86: mod_base = OTHER; note = 2'-O-methyl ribonucleotide
  modified_base 87: mod_base = OTHER; note = 2'-O-methyl ribonucleotide
  modified_base 89: mod_base = OTHER; note = 2'-O-methyl ribonucleotide
  modified_base 92: mod_base = OTHER; note = 2'-O-methyl ribonucleotide
  modified_base 93: mod_base = OTHER; note = 2'-O-methyl ribonucleotide
  modified_base 94: mod_base = OTHER; note = 2'-O-methyl ribonucleotide
  modified_base 95: mod_base = OTHER; note = 2'-O-methyl ribonucleotide
  modified_base 96: mod_base = OTHER; note = 2'-O-methyl ribonucleotide
  modified_base 97: mod_base = OTHER; note = 2'-O-methyl ribonucleotide
  modified_base 98: mod_base = OTHER; note = 2'-O-methyl ribonucleotide
  modified_base 99: mod_base = OTHER; note = 2'-O-methyl ribonucleotide
  modified_base 100: mod_base = OTHER; note = 2'-O-methyl ribonucleotide
  modified_base 101: mod_base = OTHER; note = uniform ribonucleotides (A, C, G, inosine or U), deoxynucleotides (A, G, C, inosine or T), ribonebularine, 2'-O-methylnebularine or deoxynebularine
  modified_base 102: mod_base = OTHER; note = uniform ribonucleotides (A, C, G, inosine or U), deoxynucleotides (A, G, C, inosine or T), ribonebularine, 2'-O-methylnebularine or deoxynebularine
  modified_base 103: mod_base = OTHER; note = uniform ribonucleotides (A, C, G, inosine or U), deoxynucleotides (A, G, C, inosine or T), ribonebularine, 2'-O-methylnebularine or deoxynebularine
  modified_base 1..4: mod_base = OTHER; note = phosphorothioate linkage
  modified_base 45..46: mod_base = OTHER; note = phosphorothioate linkage
  modified_base 64..65: mod_base = OTHER; note = phosphorothioate linkage
  modified_base 98..100: mod_base = OTHER; note = phosphorothioate linkage
  misc_feature 1..100: note = RNA
  misc_feature 101..103: note = Optionally DNA or RNA

SEQ ID NO: 1861 - DNA, 103 bp, synthetic construct; identical to SEQ ID NO: 1797
  source 1..103: mol_type = other DNA
  modified_base 1: mod_base = OTHER; note = 2'-O-methyl ribonucleotide
  modified_base 2: mod_base = OTHER; note = 2'-O-methyl ribonucleotide
  modified_base 3: mod_base = OTHER; note = 2'-O-methyl ribonucleotide
  modified_base 21: mod_base = OTHER; note = 2'-O-methyl ribonucleotide
  modified_base 28: mod_base = OTHER; note = 2'-O-methyl ribonucleotide
  modified_base 29: mod_base = OTHER; note = 2'-O-methyl ribonucleotide
  modified_base 30: mod_base = OTHER; note = 2'-O-methyl ribonucleotide
  modified_base 31: mod_base = OTHER; note = 2'-O-methyl ribonucleotide
  modified_base 32: mod_base = OTHER; note = 2'-O-methyl ribonucleotide
  modified_base 34: mod_base = OTHER; note = 2'-O-methyl ribonucleotide
  modified_base 35: mod_base = OTHER; note = 2'-O-methyl ribonucleotide
  modified_base 36: mod_base = OTHER; note = 2'-O-methyl ribonucleotide
  modified_base 37: mod_base = OTHER; note = 2'-O-methyl ribonucleotide
  modified_base 38: mod_base = OTHER; note = 2'-O-methyl ribonucleotide
  modified_base 39: mod_base = OTHER; note = 2'-O-methyl ribonucleotide
  modified_base 40: mod_base = OTHER; note = 2'-O-methyl ribonucleotide
  modified_base 41: mod_base = OTHER; note = 2'-O-methyl ribonucleotide
  modified_base 42: mod_base = OTHER; note = 2'-O-methyl ribonucleotide
  modified_base 46: mod_base = OTHER; note = 2'-O-methyl ribonucleotide
  modified_base 48: mod_base = OTHER; note = 2'-O-methyl ribonucleotide
  modified_base 50: mod_base = OTHER; note = 2'-O-methyl ribonucleotide
  modified_base 52: mod_base = OTHER; note = 2'-O-methyl ribonucleotide
  modified_base 53: mod_base = OTHER; note = 2'-O-methyl ribonucleotide
  modified_base 54: mod_base = OTHER; note = 2'-O-methyl ribonucleotide
  modified_base 55: mod_base = OTHER; note = 2'-O-methyl ribonucleotide
  modified_base 56: mod_base = OTHER; note = 2'-O-methyl ribonucleotide
  modified_base 57: mod_base = OTHER; note = 2'-O-methyl ribonucleotide
  modified_base 60: mod_base = OTHER; note = 2'-O-methyl ribonucleotide
  modified_base 61: mod_base = OTHER; note = 2'-O-methyl ribonucleotide
  modified_base 66: mod_base = OTHER; note = 2'-O-methyl ribonucleotide
  modified_base 67: mod_base = OTHER; note = 2'-O-methyl ribonucleotide
  modified_base 70: mod_base = OTHER; note = 2'-O-methyl ribonucleotide
  modified_base 71: mod_base = OTHER; note = 2'-O-methyl ribonucleotide
  modified_base 72: mod_base = OTHER; note = 2'-O-methyl ribonucleotide
  modified_base 74: mod_base = OTHER; note = 2'-O-methyl ribonucleotide
  modified_base 75: mod_base = OTHER; note = 2'-O-methyl ribonucleotide
  modified_base 76: mod_base = OTHER; note = 2'-O-methyl ribonucleotide
  modified_base 77: mod_base = OTHER; note = 2'-O-methyl ribonucleotide
  modified_base 78: mod_base = OTHER; note = 2'-O-methyl ribonucleotide
  modified_base 79: mod_base = OTHER; note = 2'-O-methyl ribonucleotide
  modified_base 80: mod_base = OTHER; note = 2'-O-methyl ribonucleotide
  modified_base 81: mod_base = OTHER; note = 2'-O-methyl ribonucleotide
  modified_base 83: mod_base = OTHER; note = 2'-O-methyl ribonucleotide
  modified_base 84: mod_base = OTHER; note = 2'-O-methyl ribonucleotide
  modified_base 85: mod_base = OTHER; note = 2'-O-methyl ribonucleotide
  modified_base 86: mod_base = OTHER; note = 2'-O-methyl ribonucleotide
  modified_base 87: mod_base = OTHER; note = 2'-O-methyl ribonucleotide
  modified_base 88: mod_base = OTHER; note = 2'-O-methyl ribonucleotide
  modified_base 89: mod_base = OTHER; note = 2'-O-methyl ribonucleotide
  modified_base 90: mod_base = OTHER; note = 2'-O-methyl ribonucleotide
  modified_base 91: mod_base = OTHER; note = 2'-O-methyl ribonucleotide
  modified_base 92: mod_base = OTHER; note = 2'-O-methyl ribonucleotide
  modified_base 93: mod_base = OTHER; note = 2'-O-methyl ribonucleotide
  modified_base 94: mod_base = OTHER; note = 2'-O-methyl ribonucleotide
  modified_base 95: mod_base = OTHER; note = 2'-O-methyl ribonucleotide
  modified_base 96: mod_base = OTHER; note = 2'-O-methyl ribonucleotide
  modified_base 97: mod_base = OTHER; note = 2'-O-methyl ribonucleotide
  modified_base 98: mod_base = OTHER; note = 2'-O-methyl ribonucleotide
  modified_base 99: mod_base = OTHER; note = 2'-O-methyl ribonucleotide
  modified_base 100: mod_base = OTHER; note = 2'-O-methyl ribonucleotide
  modified_base 101: mod_base = OTHER; note = uniform ribonucleotides (A, C, G, inosine or U), deoxynucleotides (A, G, C, inosine or T), ribonebularine, 2'-O-methylnebularine or deoxynebularine
  modified_base 102: mod_base = OTHER; note = uniform ribonucleotides (A, C, G, inosine or U), deoxynucleotides (A, G, C, inosine or T), ribonebularine, 2'-O-methylnebularine or deoxynebularine
  modified_base 103: mod_base = OTHER; note = uniform ribonucleotides (A, C, G, inosine or U), deoxynucleotides (A, G, C, inosine or T), ribonebularine, 2'-O-methylnebularine or deoxynebularine
  modified_base 1..4: mod_base = OTHER; note = phosphorothioate linkage
  modified_base 45..46: mod_base = OTHER; note = phosphorothioate linkage
  modified_base 64..65: mod_base = OTHER; note = phosphorothioate linkage
  modified_base 98..100: mod_base = OTHER; note = phosphorothioate linkage
  misc_feature 1..100: note = RNA
  misc_feature 101..103: note = Optionally DNA or RNA

SEQ ID NO: 1862 - DNA, 103 bp, synthetic construct; identical to SEQ ID NO: 1795
  source 1..103: mol_type = other DNA
  modified_base 1: mod_base = OTHER; note = 2'-O-methyl ribonucleotide
  modified_base 2: mod_base = OTHER; note = 2'-O-methyl ribonucleotide
  modified_base 3: mod_base = OTHER; note = 2'-O-methyl ribonucleotide
  modified_base 21: mod_base = OTHER; note = 2'-O-methyl ribonucleotide
  modified_base 28: mod_base = OTHER; note = 2'-O-methyl ribonucleotide
  modified_base 29: mod_base = OTHER; note = 2'-O-methyl ribonucleotide
  modified_base 30: mod_base = OTHER; note = 2'-O-methyl ribonucleotide
  modified_base 31: mod_base = OTHER; note = 2'-O-methyl ribonucleotide
  modified_base 32: mod_base = OTHER; note = 2'-O-methyl ribonucleotide
  modified_base 34: mod_base = OTHER; note = 2'-O-methyl ribonucleotide
  modified_base 35: mod_base = OTHER; note = 2'-O-methyl ribonucleotide
  modified_base 36: mod_base = OTHER; note = 2'-O-methyl ribonucleotide
  modified_base 37: mod_base = OTHER; note = 2'-O-methyl ribonucleotide
  modified_base 38: mod_base = OTHER; note = 2'-O-methyl ribonucleotide
  modified_base 39: mod_base = OTHER; note = 2'-O-methyl ribonucleotide
  modified_base 40: mod_base = OTHER; note = 2'-O-methyl ribonucleotide
  modified_base 41: mod_base = OTHER; note = 2'-O-methyl ribonucleotide
  modified_base 42: mod_base = OTHER; note = 2'-O-methyl ribonucleotide
  modified_base 46: mod_base = OTHER; note = 2'-O-methyl ribonucleotide
  modified_base 48: mod_base = OTHER; note = 2'-O-methyl ribonucleotide
  modified_base 50: mod_base = OTHER; note = 2'-O-methyl ribonucleotide
  modified_base 52: mod_base = OTHER; note = 2'-O-methyl ribonucleotide
  modified_base 53: mod_base = OTHER; note = 2'-O-methyl ribonucleotide
  modified_base 54: mod_base = OTHER; note = 2'-O-methyl ribonucleotide
  modified_base 57: mod_base = OTHER; note = 2'-O-methyl ribonucleotide
  modified_base 61: mod_base = OTHER; note = 2'-O-methyl ribonucleotide
  modified_base 66: mod_base = OTHER; note = 2'-O-methyl ribonucleotide
  modified_base 67: mod_base = OTHER; note = 2'-O-methyl ribonucleotide
  modified_base 70: mod_base = OTHER; note = 2'-O-methyl ribonucleotide
  modified_base 71: mod_base = OTHER; note = 2'-O-methyl ribonucleotide
  modified_base 72: mod_base = OTHER; note = 2'-O-methyl ribonucleotide
  modified_base 74: mod_base = OTHER; note = 2'-O-methyl ribonucleotide
  modified_base 75: mod_base = OTHER; note = 2'-O-methyl ribonucleotide
  modified_base 76: mod_base = OTHER; note = 2'-O-methyl ribonucleotide
  modified_base 77: mod_base = OTHER; note = 2'-O-methyl ribonucleotide
  modified_base 78: mod_base = OTHER; note = 2'-O-methyl ribonucleotide
  modified_base 79: mod_base = OTHER; note = 2'-O-methyl ribonucleotide
  modified_base 80: mod_base = OTHER; note = 2'-O-methyl ribonucleotide
  modified_base 82: mod_base = OTHER; note = 2'-O-methyl ribonucleotide
  modified_base 83: mod_base = OTHER; note = 2'-O-methyl ribonucleotide
  modified_base 84: mod_base = OTHER; note = 2'-O-methyl ribonucleotide
  modified_base 85: mod_base = OTHER; note = 2'-O-methyl ribonucleotide
  modified_base 86: mod_base = OTHER; note = 2'-O-methyl ribonucleotide
  modified_base 87: mod_base = OTHER; note = 2'-O-methyl ribonucleotide
  modified_base 89: mod_base = OTHER; note = 2'-O-methyl ribonucleotide
  modified_base 92: mod_base = OTHER; note = 2'-O-methyl ribonucleotide
  modified_base 93: mod_base = OTHER; note = 2'-O-methyl ribonucleotide
  modified_base 94: mod_base = OTHER; note = 2'-O-methyl ribonucleotide
  modified_base 95: mod_base = OTHER; note = 2'-O-methyl ribonucleotide
  modified_base 96: mod_base = OTHER; note = 2'-O-methyl ribonucleotide
  modified_base 97: mod_base = OTHER; note = 2'-O-methyl ribonucleotide
  modified_base 98: mod_base = OTHER; note = 2'-O-methyl ribonucleotide
  modified_base 99: mod_base = OTHER; note = 2'-O-methyl ribonucleotide
  modified_base 100: mod_base = OTHER; note = 2'-O-methyl ribonucleotide
  modified_base 101: mod_base = OTHER; note = uniform ribonucleotides (A, C, G, inosine or U), deoxynucleotides (A, G, C, inosine or T), ribonebularine, 2'-O-methylnebularine or deoxynebularine
  modified_base 102: mod_base = OTHER; note = uniform ribonucleotides (A, C, G, inosine or U), deoxynucleotides (A, G, C, inosine or T), ribonebularine, 2'-O-methylnebularine or deoxynebularine
  modified_base 103: mod_base = OTHER; note = uniform ribonucleotides (A, C, G, inosine or U), deoxynucleotides (A, G, C, inosine or T), ribonebularine, 2'-O-methylnebularine or deoxynebularine
  modified_base 1..4: mod_base = OTHER; note = phosphorothioate linkage
  modified_base 25..26: mod_base = OTHER; note = phosphorothioate linkage
  modified_base 45..46: mod_base = OTHER; note = phosphorothioate linkage
  modified_base 98..100: mod_base = OTHER; note = phosphorothioate linkage
  misc_feature 1..100: note = RNA
  misc_feature 101..103: note = Optionally DNA or RNA

SEQ ID NO: 1863 - DNA, 103 bp, synthetic construct; identical to SEQ ID NO: 1796
  source 1..103: mol_type = other DNA
  modified_base 1: mod_base = OTHER; note = 2'-O-methyl ribonucleotide
  modified_base 2: mod_base = OTHER; note = 2'-O-methyl ribonucleotide
  modified_base 3: mod_base = OTHER; note = 2'-O-methyl ribonucleotide
  modified_base 21: mod_base = OTHER; note = 2'-O-methyl ribonucleotide
  modified_base 28: mod_base = OTHER; note = 2'-O-methyl ribonucleotide
  modified_base 29: mod_base = OTHER; note = 2'-O-methyl ribonucleotide
  modified_base 30: mod_base = OTHER; note = 2'-O-methyl ribonucleotide
  modified_base 31: mod_base = OTHER; note = 2'-O-methyl ribonucleotide
  modified_base 32: mod_base = OTHER; note = 2'-O-methyl ribonucleotide
  modified_base 34: mod_base = OTHER; note = 2'-O-methyl ribonucleotide
  modified_base 35: mod_base = OTHER; note = 2'-O-methyl ribonucleotide
  modified_base 36: mod_base = OTHER; note = 2'-O-methyl ribonucleotide
  modified_base 37: mod_base = OTHER; note = 2'-O-methyl ribonucleotide
  modified_base 38: mod_base = OTHER; note = 2'-O-methyl ribonucleotide
  modified_base 39: mod_base = OTHER; note = 2'-O-methyl ribonucleotide
  modified_base 40: mod_base = OTHER; note = 2'-O-methyl ribonucleotide
  modified_base 41: mod_base = OTHER; note = 2'-O-methyl ribonucleotide
  modified_base 42: mod_base = OTHER; note = 2'-O-methyl ribonucleotide
  modified_base 46: mod_base = OTHER; note = 2'-O-methyl ribonucleotide
  modified_base 48: mod_base = OTHER; note = 2'-O-methyl ribonucleotide
  modified_base 50: mod_base = OTHER; note = 2'-O-methyl ribonucleotide
  modified_base 52: mod_base = OTHER; note = 2'-O-methyl ribonucleotide
  modified_base 53: mod_base = OTHER; note = 2'-O-methyl ribonucleotide
  modified_base 54: mod_base = OTHER; note = 2'-O-methyl ribonucleotide
  modified_base 57: mod_base = OTHER; note = 2'-O-methyl ribonucleotide
  modified_base 61: mod_base = OTHER; note = 2'-O-methyl ribonucleotide
  modified_base 66: mod_base = OTHER; note = 2'-O-methyl ribonucleotide
  modified_base 67: mod_base = OTHER; note = 2'-O-methyl ribonucleotide
  modified_base 70: mod_base = OTHER; note = 2'-O-methyl ribonucleotide
  modified_base 71: mod_base = OTHER; note = 2'-O-methyl ribonucleotide
  modified_base 72: mod_base = OTHER; note = 2'-O-methyl ribonucleotide
  modified_base 74: mod_base = OTHER; note = 2'-O-methyl ribonucleotide
  modified_base 75: mod_base = OTHER; note = 2'-O-methyl ribonucleotide
  modified_base 76: mod_base = OTHER; note = 2'-O-methyl ribonucleotide
  modified_base 77: mod_base = OTHER; note = 2'-O-methyl ribonucleotide
  modified_base 78: mod_base = OTHER; note = 2'-O-methyl ribonucleotide
  modified_base 79: mod_base = OTHER; note = 2'-O-methyl ribonucleotide
  modified_base 80: mod_base = OTHER; note = 2'-O-methyl ribonucleotide
  modified_base 82: mod_base = OTHER; note = 2'-O-methyl ribonucleotide
  modified_base 83: mod_base = OTHER; note = 2'-O-methyl ribonucleotide
  modified_base 84: mod_base = OTHER; note = 2'-O-methyl ribonucleotide
  modified_base 85: mod_base = OTHER; note = 2'-O-methyl ribonucleotide
  modified_base 86: mod_base = OTHER; note = 2'-O-methyl ribonucleotide
  modified_base 87: mod_base = OTHER; note = 2'-O-methyl ribonucleotide
  modified_base 89: mod_base = OTHER; note = 2'-O-methyl ribonucleotide
  modified_base 92: mod_base = OTHER; note = 2'-O-methyl ribonucleotide
  modified_base 93: mod_base = OTHER; note = 2'-O-methyl ribonucleotide
  modified_base 94: mod_base = OTHER; note = 2'-O-methyl ribonucleotide
  modified_base 95: mod_base = OTHER; note = 2'-O-methyl ribonucleotide
  modified_base 96: mod_base = OTHER; note = 2'-O-methyl ribonucleotide
  modified_base 97: mod_base = OTHER; note = 2'-O-methyl ribonucleotide
  modified_base 98: mod_base = OTHER; note = 2'-O-methyl ribonucleotide
  modified_base 99: mod_base = OTHER; note = 2'-O-methyl ribonucleotide
  modified_base 100: mod_base = OTHER; note = 2'-O-methyl ribonucleotide
  modified_base 101: mod_base = OTHER; note = uniform ribonucleotides (A, C, G, inosine or U), deoxynucleotides (A, G, C, inosine or T), ribonebularine, 2'-O-methylnebularine or deoxynebularine
  modified_base 102: mod_base = OTHER; note = uniform ribonucleotides (A, C, G, inosine or U), deoxynucleotides (A, G, C, inosine or T), ribonebularine, 2'-O-methylnebularine or deoxynebularine
  modified_base 103: mod_base = OTHER; note = uniform ribonucleotides (A, C, G, inosine or U), deoxynucleotides (A, G, C, inosine or T), ribonebularine, 2'-O-methylnebularine or deoxynebularine
  modified_base 1..4: mod_base = OTHER; note = phosphorothioate linkage
  modified_base 25..26: mod_base = OTHER; note = phosphorothioate linkage
  modified_base 45..46: mod_base = OTHER; note = phosphorothioate linkage
  modified_base 98..100: mod_base = OTHER; note = phosphorothioate linkage
  misc_feature 1..100: note = RNA
  misc_feature 101..103: note = Optionally DNA or RNA

SEQ ID NO: 1864 - DNA, 103 bp, synthetic construct; identical to SEQ ID NO: 1797
  source 1..103: mol_type = other DNA
  modified_base 1: mod_base = OTHER; note = 2'-O-methyl ribonucleotide
  modified_base 2: mod_base = OTHER; note = 2'-O-methyl ribonucleotide
  modified_base 3: mod_base = OTHER; note = 2'-O-methyl ribonucleotide
  modified_base 21: mod_base = OTHER; note = 2'-O-methyl ribonucleotide
  modified_base 28: mod_base = OTHER; note = 2'-O-methyl ribonucleotide
  modified_base 29: mod_base = OTHER; note = 2'-O-methyl ribonucleotide
  modified_base 30: mod_base = OTHER; note = 2'-O-methyl ribonucleotide
  modified_base 31: mod_base = OTHER; note = 2'-O-methyl ribonucleotide
  modified_base 32: mod_base = OTHER; note = 2'-O-methyl ribonucleotide
  modified_base 34: mod_base = OTHER; note = 2'-O-methyl ribonucleotide
  modified_base 35: mod_base = OTHER; note = 2'-O-methyl ribonucleotide
  modified_base 36: mod_base = OTHER; note = 2'-O-methyl ribonucleotide
  modified_base 37: mod_base = OTHER; note = 2'-O-methyl ribonucleotide
  modified_base 38: mod_base = OTHER; note = 2'-O-methyl ribonucleotide
  modified_base 39: mod_base = OTHER; note = 2'-O-methyl ribonucleotide
  modified_base 40: mod_base = OTHER; note = 2'-O-methyl ribonucleotide
  modified_base 41: mod_base = OTHER; note = 2'-O-methyl ribonucleotide
  modified_base 42: mod_base = OTHER; note = 2'-O-methyl ribonucleotide
  modified_base 46: mod_base = OTHER; note = 2'-O-methyl ribonucleotide
  modified_base 48: mod_base = OTHER; note = 2'-O-methyl ribonucleotide
  modified_base 50: mod_base = OTHER; note = 2'-O-methyl ribonucleotide
  modified_base 52: mod_base = OTHER; note = 2'-O-methyl ribonucleotide
  modified_base 53: mod_base = OTHER; note = 2'-O-methyl ribonucleotide
  modified_base 54: mod_base = OTHER; note = 2'-O-methyl ribonucleotide
  modified_base 55: mod_base = OTHER; note = 2'-O-methyl ribonucleotide
  modified_base 56: mod_base = OTHER; note = 2'-O-methyl ribonucleotide
  modified_base 57: mod_base = OTHER; note = 2'-O-methyl ribonucleotide
  modified_base 60: mod_base = OTHER; note = 2'-O-methyl ribonucleotide
  modified_base 61: mod_base = OTHER; note = 2'-O-methyl ribonucleotide
  modified_base 66: mod_base = OTHER; note = 2'-O-methyl ribonucleotide
  modified_base 67: mod_base = OTHER; note = 2'-O-methyl ribonucleotide
  modified_base 70: mod_base = OTHER; note = 2'-O-methyl ribonucleotide
  modified_base 71: mod_base = OTHER; note = 2'-O-methyl ribonucleotide
  modified_base 72: mod_base = OTHER; note = 2'-O-methyl ribonucleotide
  modified_base 74: mod_base = OTHER; note = 2'-O-methyl ribonucleotide
  modified_base 75: mod_base = OTHER; note = 2'-O-methyl ribonucleotide
  modified_base 76: mod_base = OTHER; note = 2'-O-methyl ribonucleotide
  modified_base 77: mod_base = OTHER; note = 2'-O-methyl ribonucleotide
  modified_base 78: mod_base = OTHER; note = 2'-O-methyl ribonucleotide
  modified_base 79: mod_base = OTHER; note = 2'-O-methyl ribonucleotide
  modified_base 80: mod_base = OTHER; note = 2'-O-methyl ribonucleotide
  modified_base 81: mod_base = OTHER; note = 2'-O-methyl ribonucleotide
  modified_base 83: mod_base = OTHER; note = 2'-O-methyl ribonucleotide
  modified_base 84: mod_base = OTHER; note = 2'-O-methyl ribonucleotide
  modified_base 85: mod_base = OTHER; note = 2'-O-methyl ribonucleotide
  modified_base 86: mod_base = OTHER; note = 2'-O-methyl ribonucleotide
  modified_base 87: mod_base = OTHER; note = 2'-O-methyl ribonucleotide
  modified_base 88: mod_base = OTHER; note = 2'-O-methyl ribonucleotide
  modified_base 89: mod_base = OTHER; note = 2'-O-methyl ribonucleotide
  modified_base 90: mod_base = OTHER; note = 2'-O-methyl ribonucleotide
  modified_base 91: mod_base = OTHER; note = 2'-O-methyl ribonucleotide
  modified_base 92: mod_base = OTHER; note = 2'-O-methyl ribonucleotide
  modified_base 93: mod_base = OTHER; note = 2'-O-methyl ribonucleotide
  modified_base 94: mod_base = OTHER; note = 2'-O-methyl ribonucleotide
  modified_base 95: mod_base = OTHER; note = 2'-O-methyl ribonucleotide
  modified_base 96: mod_base = OTHER; note = 2'-O-methyl ribonucleotide
  modified_base 97: mod_base = OTHER; note = 2'-O-methyl ribonucleotide
  modified_base 98: mod_base = OTHER; note = 2'-O-methyl ribonucleotide
  modified_base 99: mod_base = OTHER; note = 2'-O-methyl ribonucleotide
  modified_base 100: mod_base = OTHER; note = 2'-O-methyl ribonucleotide
  modified_base 101: mod_base = OTHER; note = uniform ribonucleotides (A, C, G, inosine or U), deoxynucleotides (A, G, C, inosine or T), ribonebularine, 2'-O-methylnebularine or deoxynebularine
  modified_base 102: mod_base = OTHER; note = uniform ribonucleotides (A, C, G, inosine or U), deoxynucleotides (A, G, C, inosine or T), ribonebularine, 2'-O-methylnebularine or deoxynebularine
  modified_base 103: mod_base = OTHER; note = uniform ribonucleotides (A, C, G, inosine or U), deoxynucleotides (A, G, C, inosine or T), ribonebularine, 2'-O-methylnebularine or deoxynebularine
  modified_base 1..4: mod_base = OTHER; note = phosphorothioate linkage
  modified_base 25..26: mod_base = OTHER; note = phosphorothioate linkage
  modified_base 45..46: mod_base = OTHER; note = phosphorothioate linkage
  modified_base 98..100: mod_base = OTHER; note = phosphorothioate linkage
  misc_feature 1..100: note = RNA
  misc_feature 101..103: note = Optionally DNA or RNA

SEQ ID NO: 1865 - DNA, 103 bp, synthetic construct; identical to SEQ ID NO: 1795
  source 1..103: mol_type = other DNA
  modified_base 1: mod_base = OTHER; note = 2'-O-methyl ribonucleotide
  modified_base 2: mod_base = OTHER; note = 2'-O-methyl ribonucleotide
  modified_base 3: mod_base = OTHER; note = 2'-O-methyl ribonucleotide
  modified_base 21: mod_base = OTHER; note = 2'-O-methyl ribonucleotide
  modified_base 28: mod_base = OTHER; note = 2'-O-methyl ribonucleotide
  modified_base 29: mod_base = OTHER; note = 2'-O-methyl ribonucleotide
  modified_base 30: mod_base = OTHER; note = 2'-O-methyl ribonucleotide
  modified_base 31: mod_base = OTHER; note = 2'-O-methyl ribonucleotide
  modified_base 32: mod_base = OTHER; note = 2'-O-methyl ribonucleotide
  modified_base 34: mod_base = OTHER; note = 2'-O-methyl ribonucleotide
  modified_base 35: mod_base = OTHER; note = 2'-O-methyl ribonucleotide
  modified_base 36: mod_base = OTHER; note = 2'-O-methyl ribonucleotide
  modified_base 37: mod_base = OTHER; note = 2'-O-methyl ribonucleotide
  modified_base 38: mod_base = OTHER; note = 2'-O-methyl ribonucleotide
  modified_base 39: mod_base = OTHER; note = 2'-O-methyl ribonucleotide
  modified_base 40: mod_base = OTHER; note = 2'-O-methyl ribonucleotide
  modified_base 41: mod_base = OTHER; note = 2'-O-methyl ribonucleotide
  modified_base 42: mod_base = OTHER; note = 2'-O-methyl ribonucleotide
  modified_base 46: mod_base = OTHER; note = 2'-O-methyl ribonucleotide
  modified_base 48: mod_base = OTHER; note = 2'-O-methyl ribonucleotide
  modified_base 50: mod_base = OTHER; note = 2'-O-methyl ribonucleotide
  modified_base 52: mod_base = OTHER; note = 2'-O-methyl ribonucleotide
  modified_base 53: mod_base = OTHER; note = 2'-O-methyl ribonucleotide
  modified_base 54: mod_base = OTHER; note = 2'-O-methyl ribonucleotide
  modified_base 57: mod_base = OTHER; note = 2'-O-methyl ribonucleotide
  modified_base 61: mod_base = OTHER; note = 2'-O-methyl ribonucleotide
  modified_base 66: mod_base = OTHER; note = 2'-O-methyl ribonucleotide
  modified_base 67: mod_base = OTHER; note = 2'-O-methyl ribonucleotide
  modified_base 70: mod_base = OTHER; note = 2'-O-methyl ribonucleotide
  modified_base 71: mod_base = OTHER; note = 2'-O-methyl ribonucleotide
  modified_base 72: mod_base = OTHER; note = 2'-O-methyl ribonucleotide
  modified_base 74: mod_base = OTHER; note = 2'-O-methyl ribonucleotide
  modified_base 75: mod_base = OTHER; note = 2'-O-methyl ribonucleotide
  modified_base 76: mod_base = OTHER; note = 2'-O-methyl ribonucleotide
  modified_base 77: mod_base = OTHER; note = 2'-O-methyl ribonucleotide
  modified_base 78: mod_base = OTHER; note = 2'-O-methyl ribonucleotide
  modified_base 79: mod_base = OTHER; note = 2'-O-methyl ribonucleotide
  modified_base 80: mod_base = OTHER; note = 2'-O-methyl ribonucleotide
  modified_base 82: mod_base = OTHER; note = 2'-O-methyl ribonucleotide
  modified_base 83: mod_base = OTHER; note = 2'-O-methyl ribonucleotide
  modified_base 84: mod_base = OTHER; note = 2'-O-methyl ribonucleotide
  modified_base 85: mod_base = OTHER; note = 2'-O-methyl ribonucleotide
  modified_base 86: mod_base = OTHER; note = 2'-O-methyl ribonucleotide
  modified_base 87: mod_base = OTHER; note = 2'-O-methyl ribonucleotide
  modified_base 89: mod_base = OTHER; note = 2'-O-methyl ribonucleotide
  modified_base 92: mod_base = OTHER; note = 2'-O-methyl ribonucleotide
  modified_base 93: mod_base = OTHER; note = 2'-O-methyl ribonucleotide
  modified_base 94: mod_base = OTHER; note = 2'-O-methyl ribonucleotide
  modified_base 95: mod_base = OTHER; note = 2'-O-methyl ribonucleotide
  modified_base 96: mod_base = OTHER; note = 2'-O-methyl ribonucleotide
  modified_base 97: mod_base = OTHER; note = 2'-O-methyl ribonucleotide
  modified_base 98: mod_base = OTHER; note = 2'-O-methyl ribonucleotide
  modified_base 99: mod_base = OTHER; note = 2'-O-methyl ribonucleotide
  modified_base 100: mod_base = OTHER; note = 2'-O-methyl ribonucleotide
  modified_base 101: mod_base = OTHER; note = uniform ribonucleotides (A, C, G, inosine or U), deoxynucleotides (A, G, C, inosine or T), ribonebularine, 2'-O-methylnebularine or deoxynebularine
  modified_base 102: mod_base = OTHER; note = uniform ribonucleotides (A, C, G, inosine or U), deoxynucleotides (A, G, C, inosine or T), ribonebularine, 2'-O-methylnebularine or deoxynebularine
  modified_base 103: mod_base = OTHER; note = uniform ribonucleotides (A, C, G, inosine or U), deoxynucleotides (A, G, C, inosine or T), ribonebularine, 2'-O-methylnebularine or deoxynebularine
  modified_base 1..4: mod_base = OTHER; note = phosphorothioate linkage
  modified_base 25..26: mod_base = OTHER; note = phosphorothioate linkage
  modified_base 64..65: mod_base = OTHER; note = phosphorothioate linkage
  modified_base 98..100: mod_base = OTHER; note = phosphorothioate linkage
  misc_feature 1..100: note = RNA
  misc_feature 101..103: note = Optionally DNA or RNA

SEQ ID NO: 1866 - DNA, 103 bp, synthetic construct; identical to SEQ ID NO: 1796
  source 1..103: mol_type = other DNA
  modified_base 1: mod_base = OTHER; note = 2'-O-methyl ribonucleotide
  modified_base 2: mod_base = OTHER; note = 2'-O-methyl ribonucleotide
  modified_base 3: mod_base = OTHER; note = 2'-O-methyl ribonucleotide
  modified_base 21: mod_base = OTHER; note = 2'-O-methyl ribonucleotide
  modified_base 28: mod_base = OTHER; note = 2'-O-methyl ribonucleotide
  modified_base 29: mod_base = OTHER; note = 2'-O-methyl ribonucleotide
  modified_base 30: mod_base = OTHER; note = 2'-O-methyl ribonucleotide
  modified_base 31: mod_base = OTHER; note = 2'-O-methyl ribonucleotide
  modified_base 32: mod_base = OTHER; note = 2'-O-methyl ribonucleotide
  modified_base 34: mod_base = OTHER; note = 2'-O-methyl ribonucleotide
  modified_base 35: mod_base = OTHER; note = 2'-O-methyl ribonucleotide
  modified_base 36: mod_base = OTHER; note = 2'-O-methyl ribonucleotide
  modified_base 37: mod_base = OTHER; note = 2'-O-methyl ribonucleotide
  modified_base 38: mod_base = OTHER; note = 2'-O-methyl ribonucleotide
  modified_base 39: mod_base = OTHER; note = 2'-O-methyl ribonucleotide
  modified_base 40: mod_base = OTHER; note = 2'-O-methyl ribonucleotide
  modified_base 41: mod_base = OTHER; note = 2'-O-methyl ribonucleotide
  modified_base 42: mod_base = OTHER; note = 2'-O-methyl ribonucleotide
  modified_base 46: mod_base = OTHER; note = 2'-O-methyl ribonucleotide
  modified_base 48: mod_base = OTHER; note = 2'-O-methyl ribonucleotide
  modified_base 50: mod_base = OTHER; note = 2'-O-methyl ribonucleotide
  modified_base 52: mod_base = OTHER; note = 2'-O-methyl ribonucleotide
  modified_base 53: mod_base = OTHER; note = 2'-O-methyl ribonucleotide
  modified_base 54: mod_base = OTHER; note = 2'-O-methyl ribonucleotide
  modified_base 57: mod_base = OTHER; note = 2'-O-methyl ribonucleotide
  modified_base 61: mod_base = OTHER; note = 2'-O-methyl ribonucleotide
  modified_base 66: mod_base = OTHER; note = 2'-O-methyl ribonucleotide
  modified_base 67: mod_base = OTHER; note = 2'-O-methyl ribonucleotide
  modified_base 70: mod_base = OTHER; note = 2'-O-methyl ribonucleotide
  modified_base 71: mod_base = OTHER; note = 2'-O-methyl ribonucleotide
  modified_base 72: mod_base = OTHER; note = 2'-O-methyl ribonucleotide
  modified_base 74: mod_base = OTHER; note = 2'-O-methyl ribonucleotide
  modified_base 75: mod_base = OTHER; note = 2'-O-methyl ribonucleotide
  modified_base 76: mod_base = OTHER; note = 2'-O-methyl ribonucleotide
  modified_base 77: mod_base = OTHER; note = 2'-O-methyl ribonucleotide
  modified_base 78: mod_base = OTHER; note = 2'-O-methyl ribonucleotide
  modified_base 79: mod_base = OTHER; note = 2'-O-methyl ribonucleotide
  modified_base 80: mod_base = OTHER; note = 2'-O-methyl ribonucleotide
  modified_base 82: mod_base = OTHER; note = 2'-O-methyl ribonucleotide
  modified_base 83: mod_base = OTHER; note = 2'-O-methyl ribonucleotide
  modified_base 84: mod_base = OTHER; note = 2'-O-methyl ribonucleotide
  modified_base 85: mod_base = OTHER; note = 2'-O-methyl ribonucleotide
  modified_base 86: mod_base = OTHER; note = 2'-O-methyl ribonucleotide
  modified_base 87: mod_base = OTHER; note = 2'-O-methyl ribonucleotide
  modified_base 89: mod_base = OTHER; note = 2'-O-methyl ribonucleotide
  modified_base 92: mod_base = OTHER; note = 2'-O-methyl ribonucleotide
  modified_base 93: mod_base = OTHER; note = 2'-O-methyl ribonucleotide
  modified_base 94: mod_base = OTHER; note = 2'-O-methyl ribonucleotide
  modified_base 95: mod_base = OTHER; note = 2'-O-methyl ribonucleotide
  modified_base 96: mod_base = OTHER; note = 2'-O-methyl ribonucleotide
  modified_base 97: mod_base = OTHER; note = 2'-O-methyl ribonucleotide
  modified_base 98: mod_base = OTHER; note = 2'-O-methyl ribonucleotide
  modified_base 99: mod_base = OTHER; note = 2'-O-methyl ribonucleotide
  modified_base 100: mod_base = OTHER; note = 2'-O-methyl ribonucleotide
  modified_base 101: mod_base = OTHER; note = uniform ribonucleotides (A, C, G, inosine or U), deoxynucleotides (A, G, C, inosine or T), ribonebularine, 2'-O-methylnebularine or deoxynebularine
  modified_base 102: mod_base = OTHER; note = uniform ribonucleotides (A, C, G, inosine or U), deoxynucleotides (A, G, C, inosine or T), ribonebularine, 2'-O-methylnebularine or deoxynebularine
  modified_base 103: mod_base = OTHER; note = uniform ribonucleotides (A, C, G, inosine or U), deoxynucleotides (A, G, C, inosine or T), ribonebularine, 2'-O-methylnebularine or deoxynebularine
  modified_base 1..4: mod_base = OTHER; note = phosphorothioate linkage
  modified_base 25..26: mod_base = OTHER; note = phosphorothioate linkage
  modified_base 64..65: mod_base = OTHER; note = phosphorothioate linkage
  modified_base 98..100: mod_base = OTHER; note = phosphorothioate linkage
  misc_feature 1..100: note = RNA
  misc_feature 101..103: note = Optionally DNA or RNA

SEQ ID NO: 1867 - DNA, 103 bp, synthetic construct; identical to SEQ ID NO: 1797
  source 1..103: mol_type = other DNA
  modified_base 1: mod_base = OTHER; note = 2'-O-methyl ribonucleotide
  modified_base 2: mod_base = OTHER; note = 2'-O-methyl ribonucleotide
  modified_base 3: mod_base = OTHER; note = 2'-O-methyl ribonucleotide
  modified_base 21: mod_base = OTHER; note = 2'-O-methyl ribonucleotide
  modified_base 28: mod_base = OTHER; note = 2'-O-methyl ribonucleotide
  modified_base 29: mod_base = OTHER; note = 2'-O-methyl ribonucleotide
  modified_base 30: mod_base = OTHER; note = 2'-O-methyl ribonucleotide
  modified_base 31: mod_base = OTHER; note = 2'-O-methyl ribonucleotide
  modified_base 32: mod_base = OTHER; note = 2'-O-methyl ribonucleotide
  modified_base 34: mod_base = OTHER; note = 2'-O-methyl ribonucleotide
  modified_base 35: mod_base = OTHER; note = 2'-O-methyl ribonucleotide
  modified_base 36: mod_base = OTHER; note = 2'-O-methyl ribonucleotide
  modified_base 37: mod_base = OTHER; note = 2'-O-methyl ribonucleotide
  modified_base 38: mod_base = OTHER; note = 2'-O-methyl ribonucleotide
  modified_base 39: mod_base = OTHER; note = 2'-O-methyl ribonucleotide
  modified_base 40: mod_base = OTHER; note = 2'-O-methyl ribonucleotide
  modified_base 41: mod_base = OTHER; note = 2'-O-methyl ribonucleotide
  modified_base 42: mod_base = OTHER; note = 2'-O-methyl ribonucleotide
  modified_base 46: mod_base = OTHER; note = 2'-O-methyl ribonucleotide
  modified_base 48: mod_base = OTHER; note = 2'-O-methyl ribonucleotide
  modified_base 50: mod_base = OTHER; note = 2'-O-methyl ribonucleotide
  modified_base 52: mod_base = OTHER; note = 2'-O-methyl ribonucleotide
  modified_base 53: mod_base = OTHER; note = 2'-O-methyl ribonucleotide
  modified_base 54: mod_base = OTHER; note = 2'-O-methyl ribonucleotide
  modified_base 55: mod_base = OTHER; note = 2'-O-methyl ribonucleotide
  modified_base 56: mod_base = OTHER; note = 2'-O-methyl ribonucleotide
  modified_base 57: mod_base = OTHER; note = 2'-O-methyl ribonucleotide
  modified_base 60: mod_base = OTHER; note = 2'-O-methyl ribonucleotide
  modified_base 61: mod_base = OTHER; note = 2'-O-methyl ribonucleotide
  modified_base 66: mod_base = OTHER; note = 2'-O-methyl ribonucleotide
  modified_base 67: mod_base = OTHER; note = 2'-O-methyl ribonucleotide
  modified_base 70: mod_base = OTHER; note = 2'-O-methyl ribonucleotide
  modified_base 71: mod_base = OTHER; note = 2'-O-methyl ribonucleotide
  modified_base 72: mod_base = OTHER; note = 2'-O-methyl ribonucleotide
  modified_base 74: mod_base = OTHER; note = 2'-O-methyl ribonucleotide
  modified_base 75: mod_base = OTHER; note = 2'-O-methyl ribonucleotide
  modified_base 76: mod_base = OTHER; note = 2'-O-methyl ribonucleotide
  modified_base 77: mod_base = OTHER; note = 2'-O-methyl ribonucleotide
  modified_base 78: mod_base = OTHER; note = 2'-O-methyl ribonucleotide
  modified_base 79: mod_base = OTHER; note = 2'-O-methyl ribonucleotide
  modified_base 80: mod_base = OTHER; note = 2'-O-methyl ribonucleotide
  modified_base 81: mod_base = OTHER; note = 2'-O-methyl ribonucleotide
  modified_base 83: mod_base = OTHER; note = 2'-O-methyl ribonucleotide
  modified_base 84: mod_base = OTHER; note = 2'-O-methyl ribonucleotide
  modified_base 85: mod_base = OTHER; note = 2'-O-methyl ribonucleotide
  modified_base 86: mod_base = OTHER; note = 2'-O-methyl ribonucleotide
  modified_base 87: mod_base = OTHER; note = 2'-O-methyl ribonucleotide
  modified_base 88: mod_base = OTHER; note = 2'-O-methyl ribonucleotide
  modified_base 89: mod_base = OTHER; note = 2'-O-methyl ribonucleotide
  modified_base 90: mod_base = OTHER; note = 2'-O-methyl ribonucleotide
  modified_base 91: mod_base = OTHER; note = 2'-O-methyl ribonucleotide
  modified_base 92: mod_base = OTHER; note = 2'-O-methyl ribonucleotide
  modified_base 93: mod_base = OTHER; note = 2'-O-methyl ribonucleotide
  modified_base 94: mod_base = OTHER; note = 2'-O-methyl ribonucleotide
  modified_base 95: mod_base = OTHER; note = 2'-O-methyl ribonucleotide
  modified_base 96: mod_base = OTHER; note = 2'-O-methyl ribonucleotide
  modified_base 97: mod_base = OTHER; note = 2'-O-methyl ribonucleotide
  modified_base 98: mod_base = OTHER; note = 2'-O-methyl ribonucleotide
  modified_base 99: mod_base = OTHER; note = 2'-O-methyl ribonucleotide
  modified_base 100: mod_base = OTHER; note = 2'-O-methyl ribonucleotide
  modified_base 101: mod_base = OTHER; note = uniform ribonucleotides (A, C, G, inosine or U), deoxynucleotides (A, G, C, inosine or T), ribonebularine, 2'-O-methylnebularine or deoxynebularine
  modified_base 102: mod_base = OTHER; note = uniform ribonucleotides (A, C, G, inosine or U), deoxynucleotides (A, G, C, inosine or T), ribonebularine, 2'-O-methylnebularine or deoxynebularine
  modified_base 103: mod_base = OTHER; note = uniform ribonucleotides (A, C, G, inosine or U), deoxynucleotides (A, G, C, inosine or T), ribonebularine, 2'-O-methylnebularine or deoxynebularine
  modified_base 1..4: mod_base = OTHER; note = phosphorothioate linkage
  modified_base 25..26: mod_base = OTHER; note = phosphorothioate linkage
  modified_base 64..65: mod_base = OTHER; note = phosphorothioate linkage
  modified_base 98..100: mod_base = OTHER; note = phosphorothioate linkage
  misc_feature 1..100: note = RNA
  misc_feature 101..103: note = Optionally DNA or RNA

SEQ ID NO: 1868 - DNA, 103 bp, synthetic construct; identical to SEQ ID NO: 1795
  source 1..103: mol_type = other DNA
  modified_base 1: mod_base = OTHER; note = 2'-O-methyl ribonucleotide
  modified_base 2: mod_base = OTHER; note = 2'-O-methyl ribonucleotide
  modified_base 3: mod_base = OTHER; note = 2'-O-methyl ribonucleotide
  modified_base 21: mod_base = OTHER; note = 2'-O-methyl ribonucleotide
  modified_base 28: mod_base = OTHER; note = 2'-O-methyl ribonucleotide
  modified_base 29: mod_base = OTHER; note = 2'-O-methyl ribonucleotide
  modified_base 30: mod_base = OTHER; note = 2'-O-methyl ribonucleotide
  modified_base 31: mod_base = OTHER; note = 2'-O-methyl ribonucleotide
  modified_base 32: mod_base = OTHER; note = 2'-O-methyl ribonucleotide
  modified_base 34: mod_base = OTHER; note = 2'-O-methyl ribonucleotide
  modified_base 35: mod_base = OTHER; note = 2'-O-methyl ribonucleotide
  modified_base 36: mod_base = OTHER; note = 2'-O-methyl ribonucleotide
  modified_base 37: mod_base = OTHER; note = 2'-O-methyl ribonucleotide
  modified_base 38: mod_base = OTHER; note = 2'-O-methyl ribonucleotide
  modified_base 39: mod_base = OTHER; note = 2'-O-methyl ribonucleotide
  modified_base 40: mod_base = OTHER; note = 2'-O-methyl ribonucleotide
  modified_base 41: mod_base = OTHER; note = 2'-O-methyl ribonucleotide
  modified_base 42: mod_base = OTHER; note = 2'-O-methyl ribonucleotide
  modified_base 46: mod_base = OTHER; note = 2'-O-methyl ribonucleotide
  modified_base 48: mod_base = OTHER; note = 2'-O-methyl ribonucleotide
  modified_base 50: mod_base = OTHER; note = 2'-O-methyl ribonucleotide
  modified_base 52: mod_base = OTHER; note = 2'-O-methyl ribonucleotide
  modified_base 53: mod_base = OTHER; note = 2'-O-methyl ribonucleotide
  modified_base 54: mod_base = OTHER; note = 2'-O-methyl ribonucleotide
  modified_base 57: mod_base = OTHER; note = 2'-O-methyl ribonucleotide
  modified_base 61: mod_base = OTHER; note = 2'-O-methyl ribonucleotide
  modified_base 66: mod_base = OTHER; note = 2'-O-methyl ribonucleotide
  modified_base 67: mod_base = OTHER; note = 2'-O-methyl ribonucleotide
  modified_base 70: mod_base = OTHER; note = 2'-O-methyl ribonucleotide
  modified_base 71: mod_base = OTHER; note = 2'-O-methyl ribonucleotide
  modified_base 72: mod_base = OTHER; note = 2'-O-methyl ribonucleotide
  modified_base 74: mod_base = OTHER; note = 2'-O-methyl ribonucleotide
  modified_base 75: mod_base = OTHER; note = 2'-O-methyl ribonucleotide
  modified_base 76: mod_base = OTHER; note = 2'-O-methyl ribonucleotide
  modified_base 77: mod_base = OTHER; note = 2'-O-methyl ribonucleotide
  modified_base 78: mod_base = OTHER; note = 2'-O-methyl ribonucleotide
  modified_base 79: mod_base = OTHER; note = 2'-O-methyl ribonucleotide
  modified_base 80: mod_base = OTHER; note = 2'-O-methyl ribonucleotide
  modified_base 82: mod_base = OTHER; note = 2'-O-methyl ribonucleotide
  modified_base 83: mod_base = OTHER; note = 2'-O-methyl ribonucleotide
  modified_base 84: mod_base = OTHER; note = 2'-O-methyl ribonucleotide
  modified_base 85: mod_base = OTHER; note = 2'-O-methyl ribonucleotide
  modified_base 86: mod_base = OTHER; note = 2'-O-methyl ribonucleotide
  modified_base 87: mod_base = OTHER; note = 2'-O-methyl ribonucleotide
  modified_base 89: mod_base = OTHER; note = 2'-O-methyl ribonucleotide
  modified_base 92: mod_base = OTHER; note = 2'-O-methyl ribonucleotide
  modified_base 93: mod_base = OTHER; note = 2'-O-methyl ribonucleotide
  modified_base 94: mod_base = OTHER; note = 2'-O-methyl ribonucleotide
  modified_base 95: mod_base = OTHER; note = 2'-O-methyl ribonucleotide
  modified_base 96: mod_base = OTHER; note = 2'-O-methyl ribonucleotide
  modified_base 97: mod_base = OTHER; note = 2'-O-methyl ribonucleotide
  modified_base 98: mod_base = OTHER; note = 2'-O-methyl ribonucleotide
  modified_base 99: mod_base = OTHER; note = 2'-O-methyl ribonucleotide
  modified_base 100: mod_base = OTHER; note = 2'-O-methyl ribonucleotide
  modified_base 101: mod_base = OTHER; note = uniform ribonucleotides (A, C, G, inosine or U), deoxynucleotides (A, G, C, inosine or T), ribonebularine, 2'-O-methylnebularine or deoxynebularine
  modified_base 102: mod_base = OTHER; note = uniform ribonucleotides (A, C, G, inosine or U), deoxynucleotides (A, G, C, inosine or T), ribonebularine, 2'-O-methylnebularine or deoxynebularine
  modified_base 103: mod_base = OTHER; note = uniform ribonucleotides (A, C, G, inosine or U), deoxynucleotides (A, G, C, inosine or T), ribonebularine, 2'-O-methylnebularine or deoxynebularine
  modified_base 1..4: mod_base = OTHER; note = phosphorothioate linkage
  modified_base 25..26: mod_base = OTHER; note = phosphorothioate linkage
  modified_base 45..46: mod_base = OTHER; note = phosphorothioate linkage
  modified_base 64..65: mod_base = OTHER; note = phosphorothioate linkage
  modified_base 98..100: mod_base = OTHER; note = phosphorothioate linkage
  misc_feature 1..100: note = RNA
  misc_feature 101..103: note = Optionally DNA or RNA

SEQ ID NO: 1869 - DNA, 103 bp, synthetic construct; identical to SEQ ID NO: 1796
  source 1..103: mol_type = other DNA
  modified_base 1: mod_base = OTHER; note = 2'-O-methyl ribonucleotide
  modified_base 2: mod_base = OTHER; note = 2'-O-methyl ribonucleotide
  modified_base 3: mod_base = OTHER; note = 2'-O-methyl ribonucleotide
  modified_base 21: mod_base = OTHER; note = 2'-O-methyl ribonucleotide
  modified_base 28: mod_base = OTHER; note = 2'-O-methyl ribonucleotide
  modified_base 29: mod_base = OTHER; note = 2'-O-methyl ribonucleotide
  modified_base 30: mod_base = OTHER; note = 2'-O-methyl ribonucleotide
  modified_base 31: mod_base = OTHER; note = 2'-O-methyl ribonucleotide
  modified_base 32: mod_base = OTHER; note = 2'-O-methyl ribonucleotide
  modified_base 34: mod_base = OTHER; note = 2'-O-methyl ribonucleotide
  modified_base 35: mod_base = OTHER; note = 2'-O-methyl ribonucleotide
  modified_base 36: mod_base = OTHER; note = 2'-O-methyl ribonucleotide
  modified_base 37: mod_base = OTHER; note = 2'-O-methyl ribonucleotide
  modified_base 38: mod_base = OTHER; note = 2'-O-methyl ribonucleotide
  modified_base 39: mod_base = OTHER; note = 2'-O-methyl ribonucleotide
  modified_base 40: mod_base = OTHER; note = 2'-O-methyl ribonucleotide
  modified_base 41: mod_base = OTHER; note = 2'-O-methyl ribonucleotide
  modified_base 42: mod_base = OTHER; note = 2'-O-methyl ribonucleotide
  modified_base 46: mod_base = OTHER; note = 2'-O-methyl ribonucleotide
  modified_base 48: mod_base = OTHER; note = 2'-O-methyl ribonucleotide
  modified_base 50: mod_base = OTHER; note = 2'-O-methyl ribonucleotide
  modified_base 52: mod_base = OTHER; note = 2'-O-methyl ribonucleotide
  modified_base 53: mod_base = OTHER; note = 2'-O-methyl ribonucleotide
  modified_base 54: mod_base = OTHER; note = 2'-O-methyl ribonucleotide
  modified_base 57: mod_base = OTHER; note = 2'-O-methyl ribonucleotide
  modified_base 61: mod_base = OTHER; note = 2'-O-methyl ribonucleotide
  modified_base 66: mod_base = OTHER; note = 2'-O-methyl ribonucleotide
  modified_base 67: mod_base = OTHER; note = 2'-O-methyl ribonucleotide
  modified_base 70: mod_base = OTHER; note = 2'-O-methyl ribonucleotide
  modified_base 71: mod_base = OTHER; note = 2'-O-methyl ribonucleotide
  modified_base 72: mod_base = OTHER; note = 2'-O-methyl ribonucleotide
  modified_base 74: mod_base = OTHER; note = 2'-O-methyl ribonucleotide
  modified_base 75: mod_base = OTHER; note = 2'-O-methyl ribonucleotide
  modified_base 76: mod_base = OTHER; note = 2'-O-methyl ribonucleotide
  modified_base 77: mod_base = OTHER; note = 2'-O-methyl ribonucleotide
  modified_base 78: mod_base = OTHER; note = 2'-O-methyl ribonucleotide
  modified_base 79: mod_base = OTHER; note = 2'-O-methyl ribonucleotide
  modified_base 80: mod_base = OTHER; note = 2'-O-methyl ribonucleotide
  modified_base 82: mod_base = OTHER; note = 2'-O-methyl ribonucleotide
  modified_base 83: mod_base = OTHER; note = 2'-O-methyl ribonucleotide
  modified_base 84: mod_base = OTHER; note = 2'-O-methyl ribonucleotide
  modified_base 85: mod_base = OTHER; note = 2'-O-methyl ribonucleotide
  modified_base 86: mod_base = OTHER; note = 2'-O-methyl ribonucleotide
  modified_base 87: mod_base = OTHER; note = 2'-O-methyl ribonucleotide
  modified_base 89: mod_base = OTHER; note = 2'-O-methyl ribonucleotide
  modified_base 92: mod_base = OTHER; note = 2'-O-methyl ribonucleotide
  modified_base 93: mod_base = OTHER; note = 2'-O-methyl ribonucleotide
  modified_base 94: mod_base = OTHER; note = 2'-O-methyl ribonucleotide
  modified_base 95: mod_base = OTHER; note = 2'-O-methyl ribonucleotide
  modified_base 96: mod_base = OTHER; note = 2'-O-methyl ribonucleotide
  modified_base 97: mod_base = OTHER; note = 2'-O-methyl ribonucleotide
  modified_base 98: mod_base = OTHER; note = 2'-O-methyl ribonucleotide
  modified_base 99: mod_base = OTHER; note = 2'-O-methyl ribonucleotide
  modified_base 100: mod_base = OTHER; note = 2'-O-methyl ribonucleotide
  modified_base 101: mod_base = OTHER; note = uniform ribonucleotides (A, C, G, inosine or U), deoxynucleotides (A, G, C, inosine or T), ribonebularine, 2'-O-methylnebularine or deoxynebularine
  modified_base 102: mod_base = OTHER; note = uniform ribonucleotides (A, C, G, inosine or U), deoxynucleotides (A, G, C, inosine or T), ribonebularine, 2'-O-methylnebularine or deoxynebularine
  modified_base 103: mod_base = OTHER; note = uniform ribonucleotides (A, C, G, inosine or U), deoxynucleotides (A, G, C, inosine or T), ribonebularine, 2'-O-methylnebularine or deoxynebularine
  modified_base 1..4: mod_base = OTHER; note = phosphorothioate linkage
  modified_base 25..26: mod_base = OTHER; note = phosphorothioate linkage
  modified_base 45..46: mod_base = OTHER; note = phosphorothioate linkage
  modified_base 64..65: mod_base = OTHER; note = phosphorothioate linkage
  modified_base 98..100: mod_base = OTHER; note = phosphorothioate linkage
  misc_feature 1..100: note = RNA
  misc_feature 101..103: note = Optionally DNA or RNA

SEQ ID NO: 1870 - DNA, 103 bp, synthetic construct; identical to SEQ ID NO: 1797
  source 1..103: mol_type = other DNA
  modified_base 1: mod_base = OTHER; note = 2'-O-methyl ribonucleotide
  modified_base 2: mod_base = OTHER; note = 2'-O-methyl ribonucleotide
  modified_base 3: mod_base = OTHER; note = 2'-O-methyl ribonucleotide
  modified_base 21: mod_base = OTHER; note = 2'-O-methyl ribonucleotide
  modified_base 28: mod_base = OTHER; note = 2'-O-methyl ribonucleotide
  modified_base 29: mod_base = OTHER; note = 2'-O-methyl ribonucleotide
  modified_base 30: mod_base = OTHER; note = 2'-O-methyl ribonucleotide
  modified_base 31: mod_base = OTHER; note = 2'-O-methyl ribonucleotide
  modified_base 32: mod_base = OTHER; note = 2'-O-methyl ribonucleotide
  modified_base 34: mod_base = OTHER; note = 2'-O-methyl ribonucleotide
  modified_base 35: mod_base = OTHER; note = 2'-O-methyl ribonucleotide
  modified_base 36: mod_base = OTHER; note = 2'-O-methyl ribonucleotide
  modified_base 37: mod_base = OTHER; note = 2'-O-methyl ribonucleotide
  modified_base 38: mod_base = OTHER; note = 2'-O-methyl ribonucleotide
  modified_base 39: mod_base = OTHER; note = 2'-O-methyl ribonucleotide
  modified_base 40: mod_base = OTHER; note = 2'-O-methyl ribonucleotide
  modified_base 41: mod_base = OTHER; note = 2'-O-methyl ribonucleotide
  modified_base 42: mod_base = OTHER; note = 2'-O-methyl ribonucleotide
  modified_base 46: mod_base = OTHER; note = 2'-O-methyl ribonucleotide
  modified_base 48: mod_base = OTHER; note = 2'-O-methyl ribonucleotide
  modified_base 50: mod_base = OTHER; note = 2'-O-methyl ribonucleotide
  modified_base 52: mod_base = OTHER; note = 2'-O-methyl ribonucleotide
  modified_base 53: mod_base = OTHER; note = 2'-O-methyl ribonucleotide
  modified_base 54: mod_base = OTHER; note = 2'-O-methyl ribonucleotide
  modified_base 55: mod_base = OTHER; note = 2'-O-methyl ribonucleotide
  modified_base 56: mod_base = OTHER; note = 2'-O-methyl ribonucleotide
  modified_base 57: mod_base = OTHER; note = 2'-O-methyl ribonucleotide
  modified_base 60: mod_base = OTHER; note = 2'-O-methyl ribonucleotide
  modified_base 61: mod_base = OTHER; note = 2'-O-methyl ribonucleotide
  modified_base 66: mod_base = OTHER; note = 2'-O-methyl ribonucleotide
  modified_base 67: mod_base = OTHER; note = 2'-O-methyl ribonucleotide
  modified_base 70: mod_base = OTHER; note = 2'-O-methyl ribonucleotide
  modified_base 71: mod_base = OTHER; note = 2'-O-methyl ribonucleotide
  modified_base 72: mod_base = OTHER; note = 2'-O-methyl ribonucleotide
  modified_base 74: mod_base = OTHER; note = 2'-O-methyl ribonucleotide
  modified_base 75: mod_base = OTHER; note = 2'-O-methyl ribonucleotide
  modified_base 76: mod_base = OTHER; note = 2'-O-methyl ribonucleotide
  modified_base 77: mod_base = OTHER; note = 2'-O-methyl ribonucleotide
  modified_base 78: mod_base = OTHER; note = 2'-O-methyl ribonucleotide
  modified_base 79: mod_base = OTHER; note = 2'-O-methyl ribonucleotide
  modified_base 80: mod_base = OTHER; note = 2'-O-methyl ribonucleotide
  modified_base 81: mod_base = OTHER; note = 2'-O-methyl ribonucleotide
  modified_base 83: mod_base = OTHER; note = 2'-O-methyl ribonucleotide
  modified_base 84: mod_base = OTHER; note = 2'-O-methyl ribonucleotide
  modified_base 85: mod_base = OTHER; note = 2'-O-methyl ribonucleotide
  modified_base 86: mod_base = OTHER; note = 2'-O-methyl ribonucleotide
  modified_base 87: mod_base = OTHER; note = 2'-O-methyl ribonucleotide
  modified_base 88: mod_base = OTHER; note = 2'-O-methyl ribonucleotide
  modified_base 89: mod_base = OTHER; note = 2'-O-methyl ribonucleotide
  modified_base 90: mod_base = OTHER; note = 2'-O-methyl ribonucleotide
  modified_base 91: mod_base = OTHER; note = 2'-O-methyl ribonucleotide
  modified_base 92: mod_base = OTHER; note = 2'-O-methyl ribonucleotide
  modified_base 93: mod_base = OTHER; note = 2'-O-methyl ribonucleotide
  modified_base 94: mod_base = OTHER; note = 2'-O-methyl ribonucleotide
  modified_base 95: mod_base = OTHER; note = 2'-O-methyl ribonucleotide
  modified_base 96: mod_base = OTHER; note = 2'-O-methyl ribonucleotide
  modified_base 97: mod_base = OTHER; note = 2'-O-methyl ribonucleotide
  modified_base 98: mod_base = OTHER; note = 2'-O-methyl ribonucleotide
  modified_base 99: mod_base = OTHER; note = 2'-O-methyl ribonucleotide
  modified_base 100: mod_base = OTHER; note = 2'-O-methyl ribonucleotide
  modified_base 101: mod_base = OTHER; note = uniform ribonucleotides (A, C, G, inosine or U), deoxynucleotides (A, G, C, inosine or T), ribonebularine, 2'-O-methylnebularine or deoxynebularine
  modified_base 102: mod_base = OTHER; note = uniform ribonucleotides (A, C, G, inosine or U), deoxynucleotides (A, G, C, inosine or T), ribonebularine, 2'-O-methylnebularine or deoxynebularine
  modified_base 103: mod_base = OTHER; note = uniform ribonucleotides (A, C, G, inosine or U), deoxynucleotides (A, G, C, inosine or T), ribonebularine, 2'-O-methylnebularine or deoxynebularine
  modified_base 1..4: mod_base = OTHER; note = phosphorothioate linkage
  modified_base 25..26: mod_base = OTHER; note = phosphorothioate linkage
  modified_base 45..46: mod_base = OTHER; note = phosphorothioate linkage
  modified_base 64..65: mod_base = OTHER; note = phosphorothioate linkage
  modified_base 98..100: mod_base = OTHER; note = phosphorothioate linkage
  misc_feature 1..100: note = RNA
  misc_feature 101..103: note = Optionally DNA or RNA

SEQ ID NO: 1871 - DNA, 103 bp, synthetic construct; identical to SEQ ID NO: 1797
  source 1..103: mol_type = other DNA
  modified_base 1: mod_base = OTHER; note = 2'-O-methyl ribonucleotide
  modified_base 2: mod_base = OTHER; note = 2'-O-methyl ribonucleotide
  modified_base 3: mod_base = OTHER; note = 2'-O-methyl ribonucleotide
  modified_base 21: mod_base = OTHER; note = 2'-O-methyl ribonucleotide
  modified_base 28: mod_base = OTHER; note = 2'-O-methyl ribonucleotide
  modified_base 29: mod_base = OTHER; note = 2'-O-methyl ribonucleotide
  modified_base 30: mod_base = OTHER; note = 2'-O-methyl ribonucleotide
  modified_base 31: mod_base = OTHER; note = 2'-O-methyl ribonucleotide
  modified_base 32: mod_base = OTHER; note = 2'-O-methyl ribonucleotide
  modified_base 34: mod_base = OTHER; note = 2'-O-methyl ribonucleotide
  modified_base 35: mod_base = OTHER; note = 2'-O-methyl ribonucleotide
  modified_base 36: mod_base = OTHER; note = 2'-O-methyl ribonucleotide
  modified_base 37: mod_base = OTHER; note = 2'-O-methyl ribonucleotide
  modified_base 38: mod_base = OTHER; note = 2'-O-methyl ribonucleotide
  modified_base 39: mod_base = OTHER; note = 2'-O-methyl ribonucleotide
  modified_base 40: mod_base = OTHER; note = 2'-O-methyl ribonucleotide
  modified_base 41: mod_base = OTHER; note = 2'-O-methyl ribonucleotide
  modified_base 42: mod_base = OTHER; note = 2'-O-methyl ribonucleotide
  modified_base 46: mod_base = OTHER; note = 2'-O-methyl ribonucleotide
  modified_base 48: mod_base = OTHER; note = 2'-O-methyl ribonucleotide
  modified_base 50: mod_base = OTHER; note = 2'-O-methyl ribonucleotide
  modified_base 52: mod_base = OTHER; note = 2'-O-methyl ribonucleotide
  modified_base 53: mod_base = OTHER; note = 2'-O-methyl ribonucleotide
  modified_base 54: mod_base = OTHER; note = 2'-O-methyl ribonucleotide
  modified_base 57: mod_base = OTHER; note = 2'-O-methyl ribonucleotide
  modified_base 61: mod_base = OTHER; note = 2'-O-methyl ribonucleotide
  modified_base 66: mod_base = OTHER; note = 2'-O-methyl ribonucleotide
  modified_base 67: mod_base = OTHER; note = 2'-O-methyl ribonucleotide
  modified_base 70: mod_base = OTHER; note = 2'-O-methyl ribonucleotide
  modified_base 71: mod_base = OTHER; note = 2'-O-methyl ribonucleotide
  modified_base 72: mod_base = OTHER; note = 2'-O-methyl ribonucleotide
  modified_base 74: mod_base = OTHER; note = 2'-O-methyl ribonucleotide
  modified_base 75: mod_base = OTHER; note = 2'-O-methyl ribonucleotide
  modified_base 76: mod_base = OTHER; note = 2'-O-methyl ribonucleotide
  modified_base 77: mod_base = OTHER; note = 2'-O-methyl ribonucleotide
  modified_base 78: mod_base = OTHER; note = 2'-O-methyl ribonucleotide
  modified_base 79: mod_base = OTHER; note = 2'-O-methyl ribonucleotide
  modified_base 80: mod_base = OTHER; note = 2'-O-methyl ribonucleotide
  modified_base 82: mod_base = OTHER; note = 2'-O-methyl ribonucleotide
  modified_base 83: mod_base = OTHER; note = 2'-O-methyl ribonucleotide
  modified_base 84: mod_base = OTHER; note = 2'-O-methyl ribonucleotide
  modified_base 85: mod_base = OTHER; note = 2'-O-methyl ribonucleotide
  modified_base 86: mod_base = OTHER; note = 2'-O-methyl ribonucleotide
  modified_base 87: mod_base = OTHER; note = 2'-O-methyl ribonucleotide
  modified_base 89: mod_base = OTHER; note = 2'-O-methyl ribonucleotide
  modified_base 92: mod_base = OTHER; note = 2'-O-methyl ribonucleotide
  modified_base 93: mod_base = OTHER; note = 2'-O-methyl ribonucleotide
  modified_base 94: mod_base = OTHER; note = 2'-O-methyl ribonucleotide
  modified_base 95: mod_base = OTHER; note = 2'-O-methyl ribonucleotide
  modified_base 96: mod_base = OTHER; note = 2'-O-methyl ribonucleotide
  modified_base 97: mod_base = OTHER; note = 2'-O-methyl ribonucleotide
  modified_base 98: mod_base = OTHER; note = 2'-O-methyl ribonucleotide
  modified_base 99: mod_base = OTHER; note = 2'-O-methyl ribonucleotide
  modified_base 100: mod_base = OTHER; note = 2'-O-methyl ribonucleotide
  modified_base 101: mod_base = OTHER; note = uniform ribonucleotides (A, C, G, inosine or U), deoxynucleotides (A, G, C, inosine or T), ribonebularine, 2'-O-methylnebularine or deoxynebularine
  modified_base 102: mod_base = OTHER; note = uniform ribonucleotides (A, C, G, inosine or U), deoxynucleotides (A, G, C, inosine or T), ribonebularine, 2'-O-methylnebularine or deoxynebularine
  modified_base 103: mod_base = OTHER; note = uniform ribonucleotides (A, C, G, inosine or U), deoxynucleotides (A, G, C, inosine or T), ribonebularine, 2'-O-methylnebularine or deoxynebularine
  modified_base 1..3: mod_base = OTHER; note = phosphorothioate linkage
  modified_base 98..100: mod_base = OTHER; note = phosphorothioate linkage
  misc_feature 1..100: note = RNA
  misc_feature 101..103: note = Optionally DNA or RNA

SEQ ID NO: 1872 - DNA, 103 bp, synthetic construct; identical to SEQ ID NO: 1797
  source 1..103: mol_type = other DNA
  modified_base 1: mod_base = OTHER; note = 2'-O-methyl ribonucleotide
  modified_base 2: mod_base = OTHER; note = 2'-O-methyl ribonucleotide
  modified_base 3: mod_base = OTHER; note = 2'-O-methyl ribonucleotide
  modified_base 21: mod_base = OTHER; note = 2'-O-methyl ribonucleotide
  modified_base 28: mod_base = OTHER; note = 2'-O-methyl ribonucleotide
  modified_base 29: mod_base = OTHER; note = 2'-O-methyl ribonucleotide
  modified_base 30: mod_base = OTHER; note = 2'-O-methyl ribonucleotide
  modified_base 31: mod_base = OTHER; note = 2'-O-methyl ribonucleotide
  modified_base 32: mod_base = OTHER; note = 2'-O-methyl ribonucleotide
  modified_base 33: mod_base = OTHER; note = 2'-O-methyl ribonucleotide
  modified_base 34: mod_base = OTHER; note = 2'-O-methyl ribonucleotide
  modified_base 35: mod_base = OTHER; note = 2'-O-methyl ribonucleotide
  modified_base 36: mod_base = OTHER; note = 2'-O-methyl ribonucleotide
  modified_base 37: mod_base = OTHER; note = 2'-O-methyl ribonucleotide
  modified_base 38: mod_base = OTHER; note = 2'-O-methyl ribonucleotide
  modified_base 39: mod_base = OTHER; note = 2'-O-methyl ribonucleotide
  modified_base 40: mod_base = OTHER; note = 2'-O-methyl ribonucleotide
  modified_base 41: mod_base = OTHER; note = 2'-O-methyl ribonucleotide
  modified_base 42: mod_base = OTHER; note = 2'-O-methyl ribonucleotide
  modified_base 46: mod_base = OTHER; note = 2'-O-methyl ribonucleotide
  modified_base 48: mod_base = OTHER; note = 2'-O-methyl ribonucleotide
  modified_base 50: mod_base = OTHER; note = 2'-O-methyl ribonucleotide
  modified_base 52: mod_base = OTHER; note = 2'-O-methyl ribonucleotide
  modified_base 53: mod_base = OTHER; note = 2'-O-methyl ribonucleotide
  modified_base 54: mod_base = OTHER; note = 2'-O-methyl ribonucleotide
  modified_base 55: mod_base = OTHER; note = 2'-O-methyl ribonucleotide
  modified_base 56: mod_base = OTHER; note = 2'-O-methyl ribonucleotide
  modified_base 57: mod_base = OTHER; note = 2'-O-methyl ribonucleotide
  modified_base 60: mod_base = OTHER; note = 2'-O-methyl ribonucleotide
  modified_base 61: mod_base = OTHER; note = 2'-O-methyl ribonucleotide
  modified_base 66: mod_base = OTHER; note = 2'-O-methyl ribonucleotide
  modified_base 67: mod_base = OTHER; note = 2'-O-methyl ribonucleotide
  modified_base 70: mod_base = OTHER; note = 2'-O-methyl ribonucleotide
  modified_base 71: mod_base = OTHER; note = 2'-O-methyl ribonucleotide
  modified_base 72: mod_base = OTHER; note = 2'-O-methyl ribonucleotide
  modified_base 73: mod_base = OTHER; note = 2'-O-methyl ribonucleotide
  modified_base 74: mod_base = OTHER; note = 2'-O-methyl ribonucleotide
  modified_base 75: mod_base = OTHER; note = 2'-O-methyl ribonucleotide
  modified_base 76: mod_base = OTHER; note = 2'-O-methyl ribonucleotide
  modified_base 77: mod_base = OTHER; note = 2'-O-methyl ribonucleotide
  modified_base 78: mod_base = OTHER; note = 2'-O-methyl ribonucleotide
  modified_base 79: mod_base = OTHER; note = 2'-O-methyl ribonucleotide
  modified_base 80: mod_base = OTHER; note = 2'-O-methyl ribonucleotide
  modified_base 81: mod_base = OTHER; note = 2'-O-methyl ribonucleotide
  modified_base 83: mod_base = OTHER; note = 2'-O-methyl ribonucleotide
  modified_base 84: mod_base = OTHER; note = 2'-O-methyl ribonucleotide
  modified_base 85: mod_base = OTHER; note = 2'-O-methyl ribonucleotide
  modified_base 86: mod_base = OTHER; note = 2'-O-methyl ribonucleotide
  modified_base 87: mod_base = OTHER; note = 2'-O-methyl ribonucleotide
  modified_base 88: mod_base = OTHER; note = 2'-O-methyl ribonucleotide
  modified_base 89: mod_base = OTHER; note = 2'-O-methyl ribonucleotide
  modified_base 90: mod_base = OTHER; note = 2'-O-methyl ribonucleotide
  modified_base 91: mod_base = OTHER; note = 2'-O-methyl ribonucleotide
  modified_base 92: mod_base = OTHER; note = 2'-O-methyl ribonucleotide
  modified_base 93: mod_base = OTHER; note = 2'-O-methyl ribonucleotide
  modified_base 94: mod_base = OTHER; note = 2'-O-methyl ribonucleotide
  modified_base 95: mod_base = OTHER; note = 2'-O-methyl ribonucleotide
  modified_base 96: mod_base = OTHER; note = 2'-O-methyl ribonucleotide
  modified_base 97: mod_base = OTHER; note = 2'-O-methyl ribonucleotide
  modified_base 98: mod_base = OTHER; note = 2'-O-methyl ribonucleotide
  modified_base 99: mod_base = OTHER; note = 2'-O-methyl ribonucleotide
  modified_base 100: mod_base = OTHER; note = 2'-O-methyl ribonucleotide
  modified_base 101: mod_base = OTHER; note = uniform ribonucleotides (A, C, G, inosine or U), deoxynucleotides (A, G, C, inosine or T), ribonebularine, 2'-O-methylnebularine or deoxynebularine
  modified_base 102: mod_base = OTHER; note = uniform ribonucleotides (A, C, G, inosine or U), deoxynucleotides (A, G, C, inosine or T), ribonebularine, 2'-O-methylnebularine or deoxynebularine
  modified_base 103: mod_base = OTHER; note = uniform ribonucleotides (A, C, G, inosine or U), deoxynucleotides (A, G, C, inosine or T), ribonebularine, 2'-O-methylnebularine or deoxynebularine
  modified_base 1..3: mod_base = OTHER; note = phosphorothioate linkage
  modified_base 98..100: mod_base = OTHER; note = phosphorothioate linkage
  misc_feature 1..100: note = RNA
  misc_feature 101..103: note = Optionally DNA or RNA

SEQ ID NO: 1873 - DNA, 103 bp, synthetic construct; identical to SEQ ID NO: 1795
  source 1..103: mol_type = other DNA
  modified_base 1: mod_base = OTHER; note = 2'-O-methyl ribonucleotide
  modified_base 2: mod_base = OTHER; note = 2'-O-methyl ribonucleotide
  modified_base 3: mod_base = OTHER; note = 2'-O-methyl ribonucleotide
  modified_base 21: mod_base = OTHER; note = 2'-O-methyl ribonucleotide
  modified_base 28: mod_base = OTHER; note = 2'-O-methyl ribonucleotide
  modified_base 29: mod_base = OTHER; note = 2'-O-methyl ribonucleotide
  modified_base 30: mod_base = OTHER; note = 2'-O-methyl ribonucleotide
  modified_base 31: mod_base = OTHER; note = 2'-O-methyl ribonucleotide
  modified_base 32: mod_base = OTHER; note = 2'-O-methyl ribonucleotide
  modified_base 34: mod_base = OTHER; note = 2'-O-methyl ribonucleotide
  modified_base 35: mod_base = OTHER; note = 2'-O-methyl ribonucleotide
  modified_base 36: mod_base = OTHER; note = 2'-O-methyl ribonucleotide
  modified_base 37: mod_base = OTHER; note = 2'-O-methyl ribonucleotide
  modified_base 38: mod_base = OTHER; note = 2'-O-methyl ribonucleotide
  modified_base 39: mod_base = OTHER; note = 2'-O-methyl ribonucleotide
  modified_base 40: mod_base = OTHER; note = 2'-O-methyl ribonucleotide
  modified_base 41: mod_base = OTHER; note = 2'-O-methyl ribonucleotide
  modified_base 42: mod_base = OTHER; note = 2'-O-methyl ribonucleotide
  modified_base 46: mod_base = OTHER; note = 2'-O-methyl ribonucleotide
  modified_base 48: mod_base = OTHER; note = 2'-O-methyl ribonucleotide
  modified_base 50: mod_base = OTHER; note = 2'-O-methyl ribonucleotide
  modified_base 52: mod_base = OTHER; note = 2'-O-methyl ribonucleotide
  modified_base 53: mod_base = OTHER; note = 2'-O-methyl ribonucleotide
  modified_base 54: mod_base = OTHER; note = 2'-O-methyl ribonucleotide
  modified_base 57: mod_base = OTHER; note = 2'-O-methyl ribonucleotide
  modified_base 61: mod_base = OTHER; note = 2'-O-methyl ribonucleotide
  modified_base 66: mod_base = OTHER; note = 2'-O-methyl ribonucleotide
  modified_base 67: mod_base = OTHER; note = 2'-O-methyl ribonucleotide
  modified_base 70: mod_base = OTHER; note = 2'-O-methyl ribonucleotide
  modified_base 71: mod_base = OTHER; note = 2'-O-methyl ribonucleotide
  modified_base 72: mod_base = OTHER; note = 2'-O-methyl ribonucleotide
  modified_base 74: mod_base = OTHER; note = 2'-O-methyl ribonucleotide
  modified_base 75: mod_base = OTHER; note = 2'-O-methyl ribonucleotide
  modified_base 76: mod_base = OTHER; note = 2'-O-methyl ribonucleotide
  modified_base 77: mod_base = OTHER; note = 2'-O-methyl ribonucleotide
  modified_base 78: mod_base = OTHER; note = 2'-O-methyl ribonucleotide
  modified_base 79: mod_base = OTHER; note = 2'-O-methyl ribonucleotide
  modified_base 80: mod_base = OTHER; note = 2'-O-methyl ribonucleotide
  modified_base 82: mod_base = OTHER; note = 2'-O-methyl ribonucleotide
  modified_base 83: mod_base = OTHER; note = 2'-O-methyl ribonucleotide
  modified_base 84: mod_base = OTHER; note = 2'-O-methyl ribonucleotide
  modified_base 85: mod_base = OTHER; note = 2'-O-methyl ribonucleotide
  modified_base 86: mod_base = OTHER; note = 2'-O-methyl ribonucleotide
  modified_base 87: mod_base = OTHER; note = 2'-O-methyl ribonucleotide
  modified_base 89: mod_base = OTHER; note = 2'-O-methyl ribonucleotide
  modified_base 92: mod_base = OTHER; note = 2'-O-methyl ribonucleotide
  modified_base 93: mod_base = OTHER; note = 2'-O-methyl ribonucleotide
  modified_base 94: mod_base = OTHER; note = 2'-O-methyl ribonucleotide
  modified_base 95: mod_base = OTHER; note = 2'-O-methyl ribonucleotide
  modified_base 96: mod_base = OTHER; note = 2'-O-methyl ribonucleotide
  modified_base 97: mod_base = OTHER; note = 2'-O-methyl ribonucleotide
  modified_base 98: mod_base = OTHER; note = 2'-O-methyl ribonucleotide
  modified_base 99: mod_base = OTHER; note = 2'-O-methyl ribonucleotide
  modified_base 100: mod_base = OTHER; note = 2'-O-methyl ribonucleotide
  modified_base 101: mod_base = OTHER; note = uniform ribonucleotides (A, C, G, inosine or U), deoxynucleotides (A, G, C, inosine or T), ribonebularine, 2'-O-methylnebularine or deoxynebularine
  modified_base 102: mod_base = OTHER; note = uniform ribonucleotides (A, C, G, inosine or U), deoxynucleotides (A, G, C, inosine or T), ribonebularine, 2'-O-methylnebularine or deoxynebularine
  modified_base 103: mod_base = OTHER; note = uniform ribonucleotides (A, C, G, inosine or U), deoxynucleotides (A, G, C, inosine or T), ribonebularine, 2'-O-methylnebularine or deoxynebularine
  modified_base 1..3: mod_base = OTHER; note = phosphorothioate linkage
  modified_base 98..100: mod_base = OTHER; note = phosphorothioate linkage
  misc_feature 1..100: note = RNA
  misc_feature 101..103: note = Optionally DNA or RNA

SEQ ID NO: 1874 - DNA, 103 bp, synthetic construct; identical to SEQ ID NO: 1796
  source 1..103: mol_type = other DNA
  modified_base 1: mod_base = OTHER; note = 2'-O-methyl ribonucleotide
  modified_base 2: mod_base = OTHER; note = 2'-O-methyl ribonucleotide
  modified_base 3: mod_base = OTHER; note = 2'-O-methyl ribonucleotide
  modified_base 21: mod_base = OTHER; note = 2'-O-methyl ribonucleotide
  modified_base 28: mod_base = OTHER; note = 2'-O-methyl ribonucleotide
  modified_base 29: mod_base = OTHER; note = 2'-O-methyl ribonucleotide
  modified_base 30: mod_base = OTHER; note = 2'-O-methyl ribonucleotide
  modified_base 31: mod_base = OTHER; note = 2'-O-methyl ribonucleotide
  modified_base 32: mod_base = OTHER; note = 2'-O-methyl ribonucleotide
  modified_base 34: mod_base = OTHER; note = 2'-O-methyl ribonucleotide
  modified_base 35: mod_base = OTHER; note = 2'-O-methyl ribonucleotide
  modified_base 36: mod_base = OTHER; note = 2'-O-methyl ribonucleotide
  modified_base 37: mod_base = OTHER; note = 2'-O-methyl ribonucleotide
  modified_base 38: mod_base = OTHER; note = 2'-O-methyl ribonucleotide
  modified_base 39: mod_base = OTHER; note = 2'-O-methyl ribonucleotide
  modified_base 40: mod_base = OTHER; note = 2'-O-methyl ribonucleotide
  modified_base 41: mod_base = OTHER; note = 2'-O-methyl ribonucleotide
  modified_base 42: mod_base = OTHER; note = 2'-O-methyl ribonucleotide
  modified_base 46: mod_base = OTHER; note = 2'-O-methyl ribonucleotide
  modified_base 48: mod_base = OTHER; note = 2'-O-methyl ribonucleotide
  modified_base 50: mod_base = OTHER; note = 2'-O-methyl ribonucleotide
  modified_base 52: mod_base = OTHER; note = 2'-O-methyl ribonucleotide
  modified_base 53: mod_base = OTHER; note = 2'-O-methyl ribonucleotide
  modified_base 54: mod_base = OTHER; note = 2'-O-methyl ribonucleotide
  modified_base 57: mod_base = OTHER; note = 2'-O-methyl ribonucleotide
  modified_base 61: mod_base = OTHER; note = 2'-O-methyl ribonucleotide
  modified_base 66: mod_base = OTHER; note = 2'-O-methyl ribonucleotide
  modified_base 67: mod_base = OTHER; note = 2'-O-methyl ribonucleotide
  modified_base 70: mod_base = OTHER; note = 2'-O-methyl ribonucleotide
  modified_base 71: mod_base = OTHER; note = 2'-O-methyl ribonucleotide
  modified_base 72: mod_base = OTHER; note = 2'-O-methyl ribonucleotide
  modified_base 74: mod_base = OTHER; note = 2'-O-methyl ribonucleotide
  modified_base 75: mod_base = OTHER; note = 2'-O-methyl ribonucleotide
  modified_base 76: mod_base = OTHER; note = 2'-O-methyl ribonucleotide
  modified_base 77: mod_base = OTHER; note = 2'-O-methyl ribonucleotide
  modified_base 78: mod_base = OTHER; note = 2'-O-methyl ribonucleotide
  modified_base 79: mod_base = OTHER; note = 2'-O-methyl ribonucleotide
  modified_base 80: mod_base = OTHER; note = 2'-O-methyl ribonucleotide
  modified_base 82: mod_base = OTHER; note = 2'-O-methyl ribonucleotide
  modified_base 83: mod_base = OTHER; note = 2'-O-methyl ribonucleotide
  modified_base 84: mod_base = OTHER; note = 2'-O-methyl ribonucleotide
  modified_base 85: mod_base = OTHER; note = 2'-O-methyl ribonucleotide
  modified_base 86: mod_base = OTHER; note = 2'-O-methyl ribonucleotide
  modified_base 87: mod_base = OTHER; note = 2'-O-methyl ribonucleotide
  modified_base 89: mod_base = OTHER; note = 2'-O-methyl ribonucleotide
  modified_base 92: mod_base = OTHER; note = 2'-O-methyl ribonucleotide
  modified_base 93: mod_base = OTHER; note = 2'-O-methyl ribonucleotide
  modified_base 94: mod_base = OTHER; note = 2'-O-methyl ribonucleotide
  modified_base 95: mod_base = OTHER; note = 2'-O-methyl ribonucleotide
  modified_base 96: mod_base = OTHER; note = 2'-O-methyl ribonucleotide
  modified_base 97: mod_base = OTHER; note = 2'-O-methyl ribonucleotide
  modified_base 98: mod_base = OTHER; note = 2'-O-methyl ribonucleotide
  modified_base 99: mod_base = OTHER; note = 2'-O-methyl ribonucleotide
  modified_base 100: mod_base = OTHER; note = 2'-O-methyl ribonucleotide
  modified_base 101: mod_base = OTHER; note = uniform ribonucleotides (A, C, G, inosine or U), deoxynucleotides (A, G, C, inosine or T), ribonebularine, 2'-O-methylnebularine or deoxynebularine
  modified_base 102: mod_base = OTHER; note = uniform ribonucleotides (A, C, G, inosine or U), deoxynucleotides (A, G, C, inosine or T), ribonebularine, 2'-O-methylnebularine or deoxynebularine
  modified_base 103: mod_base = OTHER; note = uniform ribonucleotides (A, C, G, inosine or U), deoxynucleotides (A, G, C, inosine or T), ribonebularine, 2'-O-methylnebularine or deoxynebularine
  modified_base 1..3: mod_base = OTHER; note = phosphorothioate linkage
  modified_base 98..100: mod_base = OTHER; note = phosphorothioate linkage
  misc_feature 1..100: note = RNA
  misc_feature 101..103: note = Optionally DNA or RNA

SEQ ID NO: 1875 - DNA, 103 bp, synthetic construct; identical to SEQ ID NO: 1795
  source 1..103: mol_type = other DNA
  modified_base 1: mod_base = OTHER; note = 2'-O-methyl ribonucleotide
  modified_base 2: mod_base = OTHER; note = 2'-O-methyl ribonucleotide
  modified_base 3: mod_base = OTHER; note = 2'-O-methyl ribonucleotide
  modified_base 21: mod_base = OTHER; note = 2'-O-methyl ribonucleotide
  modified_base 28: mod_base = OTHER; note = 2'-O-methyl ribonucleotide
  modified_base 29: mod_base = OTHER; note = 2'-O-methyl ribonucleotide
  modified_base 30: mod_base = OTHER; note = 2'-O-methyl ribonucleotide
  modified_base 31: mod_base = OTHER; note = 2'-O-methyl ribonucleotide
  modified_base 32: mod_base = OTHER; note = 2'-O-methyl ribonucleotide
  modified_base 34: mod_base = OTHER; note = 2'-O-methyl ribonucleotide
  modified_base 35: mod_base = OTHER; note = 2'-O-methyl ribonucleotide
  modified_base 36: mod_base = OTHER; note = 2'-O-methyl ribonucleotide
  modified_base 37: mod_base = OTHER; note = 2'-O-methyl ribonucleotide
  modified_base 38: mod_base = OTHER; note = 2'-O-methyl ribonucleotide
  modified_base 39: mod_base = OTHER; note = 2'-O-methyl ribonucleotide
  modified_base 40: mod_base = OTHER; note = 2'-O-methyl ribonucleotide
  modified_base 41: mod_base = OTHER; note = 2'-O-methyl ribonucleotide
  modified_base 42: mod_base = OTHER; note = 2'-O-methyl ribonucleotide
  modified_base 46: mod_base = OTHER; note = 2'-O-methyl ribonucleotide
  modified_base 48: mod_base = OTHER; note = 2'-O-methyl ribonucleotide
  modified_base 50: mod_base = OTHER; note = 2'-O-methyl ribonucleotide
  modified_base 52: mod_base = OTHER; note = 2'-O-methyl ribonucleotide
  modified_base 53: mod_base = OTHER; note = 2'-O-methyl ribonucleotide
  modified_base 54: mod_base = OTHER; note = 2'-O-methyl ribonucleotide
  modified_base 57: mod_base = OTHER; note = 2'-O-methyl ribonucleotide
  modified_base 61: mod_base = OTHER; note = 2'-O-methyl ribonucleotide
  modified_base 66: mod_base = OTHER; note = 2'-O-methyl ribonucleotide
  modified_base 67: mod_base = OTHER; note = 2'-O-methyl ribonucleotide
  modified_base 70: mod_base = OTHER; note = 2'-O-methyl ribonucleotide
  modified_base 71: mod_base = OTHER; note = 2'-O-methyl ribonucleotide
  modified_base 72: mod_base = OTHER; note = 2'-O-methyl ribonucleotide
  modified_base 74: mod_base = OTHER; note = 2'-O-methyl ribonucleotide
  modified_base 75: mod_base = OTHER; note = 2'-O-methyl ribonucleotide
  modified_base 76: mod_base = OTHER; note = 2'-O-methyl ribonucleotide
  modified_base 77: mod_base = OTHER; note = 2'-O-methyl ribonucleotide
  modified_base 78: mod_base = OTHER; note = 2'-O-methyl ribonucleotide
  modified_base 79: mod_base = OTHER; note = 2'-O-methyl ribonucleotide
  modified_base 80: mod_base = OTHER; note = 2'-O-methyl ribonucleotide
  modified_base 82: mod_base = OTHER; note = 2'-O-methyl ribonucleotide
  modified_base 83: mod_base = OTHER; note = 2'-O-methyl ribonucleotide
  modified_base 84: mod_base = OTHER; note = 2'-O-methyl ribonucleotide
  modified_base 85: mod_base = OTHER; note = 2'-O-methyl ribonucleotide
  modified_base 86: mod_base = OTHER; note = 2'-O-methyl ribonucleotide
  modified_base 87: mod_base = OTHER; note = 2'-O-methyl ribonucleotide
  modified_base 89: mod_base = OTHER; note = 2'-O-methyl ribonucleotide
  modified_base 92: mod_base = OTHER; note = 2'-O-methyl ribonucleotide
  modified_base 93: mod_base = OTHER; note = 2'-O-methyl ribonucleotide
  modified_base 94: mod_base = OTHER; note = 2'-O-methyl ribonucleotide
  modified_base 95: mod_base = OTHER; note = 2'-O-methyl ribonucleotide
  modified_base 96: mod_base = OTHER; note = 2'-O-methyl ribonucleotide
  modified_base 97: mod_base = OTHER; note = 2'-O-methyl ribonucleotide
  modified_base 98: mod_base = OTHER; note = 2'-O-methyl ribonucleotide
  modified_base 99: mod_base = OTHER; note = 2'-O-methyl ribonucleotide
  modified_base 100: mod_base = OTHER; note = 2'-O-methyl ribonucleotide
  modified_base 101: mod_base = OTHER; note = uniform ribonucleotides (A, C, G, inosine or U), deoxynucleotides (A, G, C, inosine or T), ribonebularine, 2'-O-methylnebularine or deoxynebularine
  modified_base 102: mod_base = OTHER; note = uniform ribonucleotides (A, C, G, inosine or U), deoxynucleotides (A, G, C, inosine or T), ribonebularine, 2'-O-methylnebularine or deoxynebularine
  modified_base 103: mod_base = OTHER; note = uniform ribonucleotides (A, C, G, inosine or U), deoxynucleotides (A, G, C, inosine or T), ribonebularine, 2'-O-methylnebularine or deoxynebularine
  modified_base 1..3: mod_base = OTHER; note = phosphorothioate linkage
  modified_base 64..65: mod_base = OTHER; note = phosphorothioate linkage
  modified_base 98..100: mod_base = OTHER; note = phosphorothioate linkage
  misc_feature 1..100: note = RNA
  misc_feature 101..103: note = Optionally DNA or RNA

SEQ ID NO: 1876 - DNA, 103 bp, synthetic construct; identical to SEQ ID NO: 1796
  source 1..103: mol_type = other DNA
  modified_base 1: mod_base = OTHER; note = 2'-O-methyl ribonucleotide
  modified_base 2: mod_base = OTHER; note = 2'-O-methyl ribonucleotide
  modified_base 3: mod_base = OTHER; note = 2'-O-methyl ribonucleotide
  modified_base 21: mod_base = OTHER; note = 2'-O-methyl ribonucleotide
  modified_base 28: mod_base = OTHER; note = 2'-O-methyl ribonucleotide
  modified_base 29: mod_base = OTHER; note = 2'-O-methyl ribonucleotide
  modified_base 30: mod_base = OTHER; note = 2'-O-methyl ribonucleotide
  modified_base 31: mod_base = OTHER; note = 2'-O-methyl ribonucleotide
  modified_base 32: mod_base = OTHER; note = 2'-O-methyl ribonucleotide
  modified_base 34: mod_base = OTHER; note = 2'-O-methyl ribonucleotide
  modified_base 35: mod_base = OTHER; note = 2'-O-methyl ribonucleotide
  modified_base 36: mod_base = OTHER; note = 2'-O-methyl ribonucleotide
  modified_base 37: mod_base = OTHER; note = 2'-O-methyl ribonucleotide
  modified_base 38: mod_base = OTHER; note = 2'-O-methyl ribonucleotide
  modified_base 39: mod_base = OTHER; note = 2'-O-methyl ribonucleotide
  modified_base 40: mod_base = OTHER; note = 2'-O-methyl ribonucleotide
  modified_base 41: mod_base = OTHER; note = 2'-O-methyl ribonucleotide
  modified_base 42: mod_base = OTHER; note = 2'-O-methyl ribonucleotide
  modified_base 46: mod_base = OTHER; note = 2'-O-methyl ribonucleotide
  modified_base 48: mod_base = OTHER; note = 2'-O-methyl ribonucleotide
  modified_base 50: mod_base = OTHER; note = 2'-O-methyl ribonucleotide
  modified_base 52: mod_base = OTHER; note = 2'-O-methyl ribonucleotide
  modified_base 53: mod_base = OTHER; note = 2'-O-methyl ribonucleotide
  modified_base 54: mod_base = OTHER; note = 2'-O-methyl ribonucleotide
  modified_base 57: mod_base = OTHER; note = 2'-O-methyl ribonucleotide
  modified_base 61: mod_base = OTHER; note = 2'-O-methyl ribonucleotide
  modified_base 66: mod_base = OTHER; note = 2'-O-methyl ribonucleotide
  modified_base 67: mod_base = OTHER; note = 2'-O-methyl ribonucleotide
  modified_base 70: mod_base = OTHER; note = 2'-O-methyl ribonucleotide
  modified_base 71: mod_base = OTHER; note = 2'-O-methyl ribonucleotide
  modified_base 72: mod_base = OTHER; note = 2'-O-methyl ribonucleotide
  modified_base 74: mod_base = OTHER; note = 2'-O-methyl ribonucleotide
  modified_base 75: mod_base = OTHER; note = 2'-O-methyl ribonucleotide
  modified_base 76: mod_base = OTHER; note = 2'-O-methyl ribonucleotide
  modified_base 77: mod_base = OTHER; note = 2'-O-methyl ribonucleotide
  modified_base 78: mod_base = OTHER; note = 2'-O-methyl ribonucleotide
  modified_base 79: mod_base = OTHER; note = 2'-O-methyl ribonucleotide
  modified_base 80: mod_base = OTHER; note = 2'-O-methyl ribonucleotide
  modified_base 82: mod_base = OTHER; note = 2'-O-methyl ribonucleotide
  modified_base 83: mod_base = OTHER; note = 2'-O-methyl ribonucleotide
  modified_base 84: mod_base = OTHER; note = 2'-O-methyl ribonucleotide
  modified_base 85: mod_base = OTHER; note = 2'-O-methyl ribonucleotide
  modified_base 86: mod_base = OTHER; note = 2'-O-methyl ribonucleotide
  modified_base 87: mod_base = OTHER; note = 2'-O-methyl ribonucleotide
  modified_base 89: mod_base = OTHER; note = 2'-O-methyl ribonucleotide
  modified_base 92: mod_base = OTHER; note = 2'-O-methyl ribonucleotide
  modified_base 93: mod_base = OTHER; note = 2'-O-methyl ribonucleotide
  modified_base 94: mod_base = OTHER; note = 2'-O-methyl ribonucleotide
  modified_base 95: mod_base = OTHER; note = 2'-O-methyl ribonucleotide
  modified_base 96: mod_base = OTHER; note = 2'-O-methyl ribonucleotide
  modified_base 97: mod_base = OTHER; note = 2'-O-methyl ribonucleotide
  modified_base 98: mod_base = OTHER; note = 2'-O-methyl ribonucleotide
  modified_base 99: mod_base = OTHER; note = 2'-O-methyl ribonucleotide
  modified_base 100: mod_base = OTHER; note = 2'-O-methyl ribonucleotide
  modified_base 101: mod_base = OTHER; note = uniform ribonucleotides (A, C, G, inosine or U), deoxynucleotides (A, G, C, inosine or T), ribonebularine, 2'-O-methylnebularine or deoxynebularine
  modified_base 102: mod_base = OTHER; note = uniform ribonucleotides (A, C, G, inosine or U), deoxynucleotides (A, G, C, inosine or T), ribonebularine, 2'-O-methylnebularine or deoxynebularine
  modified_base 103: mod_base = OTHER; note = uniform ribonucleotides (A, C, G, inosine or U), deoxynucleotides (A, G, C, inosine or T), ribonebularine, 2'-O-methylnebularine or deoxynebularine
  modified_base 1..3: mod_base = OTHER; note = phosphorothioate linkage
  modified_base 64..65: mod_base = OTHER; note = phosphorothioate linkage
  modified_base 98..100: mod_base = OTHER; note = phosphorothioate linkage
  misc_feature 1..100: note = RNA
  misc_feature 101..103: note = Optionally DNA or RNA

SEQ ID NO: 1877 - DNA, 103 bp, synthetic construct; identical to SEQ ID NO: 1797
  source 1..103: mol_type = other DNA
  modified_base 1: mod_base = OTHER; note = 2'-O-methyl ribonucleotide
  modified_base 2: mod_base = OTHER; note = 2'-O-methyl ribonucleotide
  modified_base 3: mod_base = OTHER; note = 2'-O-methyl ribonucleotide
  modified_base 21: mod_base = OTHER; note = 2'-O-methyl ribonucleotide
  modified_base 28: mod_base = OTHER; note = 2'-O-methyl ribonucleotide
  modified_base 29: mod_base = OTHER; note = 2'-O-methyl ribonucleotide
  modified_base 30: mod_base = OTHER; note = 2'-O-methyl ribonucleotide
  modified_base 31: mod_base = OTHER; note = 2'-O-methyl ribonucleotide
  modified_base 32: mod_base = OTHER; note = 2'-O-methyl ribonucleotide
  modified_base 34: mod_base = OTHER; note = 2'-O-methyl ribonucleotide
  modified_base 35: mod_base = OTHER; note = 2'-O-methyl ribonucleotide
  modified_base 36: mod_base = OTHER; note = 2'-O-methyl ribonucleotide
  modified_base 37: mod_base = OTHER; note = 2'-O-methyl ribonucleotide
  modified_base 38: mod_base = OTHER; note = 2'-O-methyl ribonucleotide
  modified_base 39: mod_base = OTHER; note = 2'-O-methyl ribonucleotide
  modified_base 40: mod_base = OTHER; note = 2'-O-methyl ribonucleotide
  modified_base 41: mod_base = OTHER; note = 2'-O-methyl ribonucleotide
  modified_base 42: mod_base = OTHER; note = 2'-O-methyl ribonucleotide
  modified_base 46: mod_base = OTHER; note = 2'-O-methyl ribonucleotide
  modified_base 48: mod_base = OTHER; note = 2'-O-methyl ribonucleotide
  modified_base 50: mod_base = OTHER; note = 2'-O-methyl ribonucleotide
  modified_base 52: mod_base = OTHER; note = 2'-O-methyl ribonucleotide
  modified_base 53: mod_base = OTHER; note = 2'-O-methyl ribonucleotide
  modified_base 54: mod_base = OTHER; note = 2'-O-methyl ribonucleotide
  modified_base 55: mod_base = OTHER; note = 2'-O-methyl ribonucleotide
  modified_base 56: mod_base = OTHER; note = 2'-O-methyl ribonucleotide
  modified_base 57: mod_base = OTHER; note = 2'-O-methyl ribonucleotide
  modified_base 60: mod_base = OTHER; note = 2'-O-methyl ribonucleotide
  modified_base 61: mod_base = OTHER; note = 2'-O-methyl ribonucleotide
  modified_base 66: mod_base = OTHER; note = 2'-O-methyl ribonucleotide
  modified_base 67: mod_base = OTHER; note = 2'-O-methyl ribonucleotide
  modified_base 70: mod_base = OTHER; note = 2'-O-methyl ribonucleotide
  modified_base 71: mod_base = OTHER; note = 2'-O-methyl ribonucleotide
  modified_base 72: mod_base = OTHER; note = 2'-O-methyl ribonucleotide
  modified_base 74: mod_base = OTHER; note = 2'-O-methyl ribonucleotide
  modified_base 75: mod_base = OTHER; note = 2'-O-methyl ribonucleotide
  modified_base 76: mod_base = OTHER; note = 2'-O-methyl ribonucleotide
  modified_base 77: mod_base = OTHER; note = 2'-O-methyl ribonucleotide
  modified_base 78: mod_base = OTHER; note = 2'-O-methyl ribonucleotide
  modified_base 79: mod_base = OTHER; note = 2'-O-methyl ribonucleotide
  modified_base 80: mod_base = OTHER; note = 2'-O-methyl ribonucleotide
  modified_base 81: mod_base = OTHER; note = 2'-O-methyl ribonucleotide
  modified_base 83: mod_base = OTHER; note = 2'-O-methyl ribonucleotide
  modified_base 84: mod_base = OTHER; note = 2'-O-methyl ribonucleotide
  modified_base 85: mod_base = OTHER; note = 2'-O-methyl ribonucleotide
  modified_base 86: mod_base = OTHER; note = 2'-O-methyl ribonucleotide
  modified_base 87: mod_base = OTHER; note = 2'-O-methyl ribonucleotide
  modified_base 88: mod_base = OTHER; note = 2'-O-methyl ribonucleotide
  modified_base 89: mod_base = OTHER; note = 2'-O-methyl ribonucleotide
  modified_base 90: mod_base = OTHER; note = 2'-O-methyl ribonucleotide
  modified_base 91: mod_base = OTHER; note = 2'-O-methyl ribonucleotide
  modified_base 92: mod_base = OTHER; note = 2'-O-methyl ribonucleotide
  modified_base 93: mod_base = OTHER; note = 2'-O-methyl ribonucleotide
  modified_base 94: mod_base = OTHER; note = 2'-O-methyl ribonucleotide
  modified_base 95: mod_base = OTHER; note = 2'-O-methyl ribonucleotide
  modified_base 96: mod_base = OTHER; note = 2'-O-methyl ribonucleotide
  modified_base 97: mod_base = OTHER; note = 2'-O-methyl ribonucleotide
  modified_base 98: mod_base = OTHER; note = 2'-O-methyl ribonucleotide
  modified_base 99: mod_base = OTHER; note = 2'-O-methyl ribonucleotide
  modified_base 100: mod_base = OTHER; note = 2'-O-methyl ribonucleotide
  modified_base 101: mod_base = OTHER; note = uniform ribonucleotides (A, C, G, inosine or U), deoxynucleotides (A, G, C, inosine or T), ribonebularine, 2'-O-methylnebularine or deoxynebularine
  modified_base 102: mod_base = OTHER; note = uniform ribonucleotides (A, C, G, inosine or U), deoxynucleotides (A, G, C, inosine or T), ribonebularine, 2'-O-methylnebularine or deoxynebularine
  modified_base 103: mod_base = OTHER; note = uniform ribonucleotides (A, C, G, inosine or U), deoxynucleotides (A, G, C, inosine or T), ribonebularine, 2'-O-methylnebularine or deoxynebularine
  modified_base 1..3: mod_base = OTHER; note = phosphorothioate linkage
  modified_base 64..65: mod_base = OTHER; note = phosphorothioate linkage
  modified_base 98..100: mod_base = OTHER; note = phosphorothioate linkage
  misc_feature 1..100: note = RNA
  misc_feature 101..103: note = Optionally DNA or RNA

SEQ ID NO: 1878 - DNA, 103 bp, synthetic construct; identical to SEQ ID NO: 1795
  source 1..103: mol_type = other DNA
  modified_base 1: mod_base = OTHER; note = 2'-O-methyl ribonucleotide
  modified_base 2: mod_base = OTHER; note = 2'-O-methyl ribonucleotide
  modified_base 3: mod_base = OTHER; note = 2'-O-methyl ribonucleotide
  modified_base 21: mod_base = OTHER; note = 2'-O-methyl ribonucleotide
  modified_base 28: mod_base = OTHER; note = 2'-O-methyl ribonucleotide
  modified_base 29: mod_base = OTHER; note = 2'-O-methyl ribonucleotide
  modified_base 30: mod_base = OTHER; note = 2'-O-methyl ribonucleotide
  modified_base 31: mod_base = OTHER; note = 2'-O-methyl ribonucleotide
  modified_base 32: mod_base = OTHER; note = 2'-O-methyl ribonucleotide
  modified_base 34: mod_base = OTHER; note = 2'-O-methyl ribonucleotide
  modified_base 35: mod_base = OTHER; note = 2'-O-methyl ribonucleotide
  modified_base 36: mod_base = OTHER; note = 2'-O-methyl ribonucleotide
  modified_base 37: mod_base = OTHER; note = 2'-O-methyl ribonucleotide
  modified_base 38: mod_base = OTHER; note = 2'-O-methyl ribonucleotide
  modified_base 39: mod_base = OTHER; note = 2'-O-methyl ribonucleotide
  modified_base 40: mod_base = OTHER; note = 2'-O-methyl ribonucleotide
  modified_base 41: mod_base = OTHER; note = 2'-O-methyl ribonucleotide
  modified_base 42: mod_base = OTHER; note = 2'-O-methyl ribonucleotide
  modified_base 46: mod_base = OTHER; note = 2'-O-methyl ribonucleotide
  modified_base 48: mod_base = OTHER; note = 2'-O-methyl ribonucleotide
  modified_base 50: mod_base = OTHER; note = 2'-O-methyl ribonucleotide
  modified_base 52: mod_base = OTHER; note = 2'-O-methyl ribonucleotide
  modified_base 53: mod_base = OTHER; note = 2'-O-methyl ribonucleotide
  modified_base 54: mod_base = OTHER; note = 2'-O-methyl ribonucleotide
  modified_base 57: mod_base = OTHER; note = 2'-O-methyl ribonucleotide
  modified_base 61: mod_base = OTHER; note = 2'-O-methyl ribonucleotide
  modified_base 66: mod_base = OTHER; note = 2'-O-methyl ribonucleotide
  modified_base 67: mod_base = OTHER; note = 2'-O-methyl ribonucleotide
  modified_base 70: mod_base = OTHER; note = 2'-O-methyl ribonucleotide
  modified_base 71: mod_base = OTHER; note = 2'-O-methyl ribonucleotide
  modified_base 72: mod_base = OTHER; note = 2'-O-methyl ribonucleotide
  modified_base 74: mod_base = OTHER; note = 2'-O-methyl ribonucleotide
  modified_base 75: mod_base = OTHER; note = 2'-O-methyl ribonucleotide
  modified_base 76: mod_base = OTHER; note = 2'-O-methyl ribonucleotide
  modified_base 77: mod_base = OTHER; note = 2'-O-methyl ribonucleotide
  modified_base 78: mod_base = OTHER; note = 2'-O-methyl ribonucleotide
  modified_base 79: mod_base = OTHER; note = 2'-O-methyl ribonucleotide
  modified_base 80: mod_base = OTHER; note = 2'-O-methyl ribonucleotide
  modified_base 82: mod_base = OTHER; note = 2'-O-methyl ribonucleotide
  modified_base 83: mod_base = OTHER; note = 2'-O-methyl ribonucleotide
  modified_base 84: mod_base = OTHER; note = 2'-O-methyl ribonucleotide
  modified_base 85: mod_base = OTHER; note = 2'-O-methyl ribonucleotide
  modified_base 86: mod_base = OTHER; note = 2'-O-methyl ribonucleotide
  modified_base 87: mod_base = OTHER; note = 2'-O-methyl ribonucleotide
  modified_base 89: mod_base = OTHER; note = 2'-O-methyl ribonucleotide
  modified_base 92: mod_base = OTHER; note = 2'-O-methyl ribonucleotide
  modified_base 93: mod_base = OTHER; note = 2'-O-methyl ribonucleotide
  modified_base 94: mod_base = OTHER; note = 2'-O-methyl ribonucleotide
  modified_base 95: mod_base = OTHER; note = 2'-O-methyl ribonucleotide
  modified_base 96: mod_base = OTHER; note = 2'-O-methyl ribonucleotide
  modified_base 97: mod_base = OTHER; note = 2'-O-methyl ribonucleotide
  modified_base 98: mod_base = OTHER; note = 2'-O-methyl ribonucleotide
  modified_base 99: mod_base = OTHER; note = 2'-O-methyl ribonucleotide
  modified_base 100: mod_base = OTHER; note = 2'-O-methyl ribonucleotide
  modified_base 101: mod_base = OTHER; note = uniform ribonucleotides (A, C, G, inosine or U), deoxynucleotides (A, G, C, inosine or T), ribonebularine, 2'-O-methylnebularine or deoxynebularine
  modified_base 102: mod_base = OTHER; note = uniform ribonucleotides (A, C, G, inosine or U), deoxynucleotides (A, G, C, inosine or T), ribonebularine, 2'-O-methylnebularine or deoxynebularine
  modified_base 103: mod_base = OTHER; note = uniform ribonucleotides (A, C, G, inosine or U), deoxynucleotides (A, G, C, inosine or T), ribonebularine, 2'-O-methylnebularine or deoxynebularine
  modified_base 1..3: mod_base = OTHER; note = phosphorothioate linkage
  modified_base 45..46: mod_base = OTHER; note = phosphorothioate linkage
  modified_base 98..100: mod_base = OTHER; note = phosphorothioate linkage
  misc_feature 1..100: note = RNA
  misc_feature 101..103: note = Optionally DNA or RNA

SEQ ID NO: 1879 - DNA, 103 bp, synthetic construct; identical to SEQ ID NO: 1796
  source 1..103: mol_type = other DNA
  modified_base 1: mod_base = OTHER; note = 2'-O-methyl ribonucleotide
  modified_base 2: mod_base = OTHER; note = 2'-O-methyl ribonucleotide
  modified_base 3: mod_base = OTHER; note = 2'-O-methyl ribonucleotide
  modified_base 21: mod_base = OTHER; note = 2'-O-methyl ribonucleotide
  modified_base 28: mod_base = OTHER; note = 2'-O-methyl ribonucleotide
  modified_base 29: mod_base = OTHER; note = 2'-O-methyl ribonucleotide
  modified_base 30: mod_base = OTHER; note = 2'-O-methyl ribonucleotide
  modified_base 31: mod_base = OTHER; note = 2'-O-methyl ribonucleotide
  modified_base 32: mod_base = OTHER; note = 2'-O-methyl ribonucleotide
  modified_base 34: mod_base = OTHER; note = 2'-O-methyl ribonucleotide
  modified_base 35: mod_base = OTHER; note = 2'-O-methyl ribonucleotide
  modified_base 36: mod_base = OTHER; note = 2'-O-methyl ribonucleotide
  modified_base 37: mod_base = OTHER; note = 2'-O-methyl ribonucleotide
  modified_base 38: mod_base = OTHER; note = 2'-O-methyl ribonucleotide
  modified_base 39: mod_base = OTHER; note = 2'-O-methyl ribonucleotide
  modified_base 40: mod_base = OTHER; note = 2'-O-methyl ribonucleotide
  modified_base 41: mod_base = OTHER; note = 2'-O-methyl ribonucleotide
  modified_base 42: mod_base = OTHER; note = 2'-O-methyl ribonucleotide
  modified_base 46: mod_base = OTHER; note = 2'-O-methyl ribonucleotide
  modified_base 48: mod_base = OTHER; note = 2'-O-methyl ribonucleotide
  modified_base 50: mod_base = OTHER; note = 2'-O-methyl ribonucleotide
  modified_base 52: mod_base = OTHER; note = 2'-O-methyl ribonucleotide
  modified_base 53: mod_base = OTHER; note = 2'-O-methyl ribonucleotide
  modified_base 54: mod_base = OTHER; note = 2'-O-methyl ribonucleotide
  modified_base 57: mod_base = OTHER; note = 2'-O-methyl ribonucleotide
  modified_base 61: mod_base = OTHER; note = 2'-O-methyl ribonucleotide
  modified_base 66: mod_base = OTHER; note = 2'-O-methyl ribonucleotide
  modified_base 67: mod_base = OTHER; note = 2'-O-methyl ribonucleotide
  modified_base 70: mod_base = OTHER; note = 2'-O-methyl ribonucleotide
  modified_base 71: mod_base = OTHER; note = 2'-O-methyl ribonucleotide
  modified_base 72: mod_base = OTHER; note = 2'-O-methyl ribonucleotide
  modified_base 74: mod_base = OTHER; note = 2'-O-methyl ribonucleotide
  modified_base 75: mod_base = OTHER; note = 2'-O-methyl ribonucleotide
  modified_base 76: mod_base = OTHER; note = 2'-O-methyl ribonucleotide
  modified_base 77: mod_base = OTHER; note = 2'-O-methyl ribonucleotide
  modified_base 78: mod_base = OTHER; note = 2'-O-methyl ribonucleotide
  modified_base 79: mod_base = OTHER; note = 2'-O-methyl ribonucleotide
  modified_base 80: mod_base = OTHER; note = 2'-O-methyl ribonucleotide
  modified_base 82: mod_base = OTHER; note = 2'-O-methyl ribonucleotide
  modified_base 83: mod_base = OTHER; note = 2'-O-methyl ribonucleotide
  modified_base 84: mod_base = OTHER; note = 2'-O-methyl ribonucleotide
  modified_base 85: mod_base = OTHER; note = 2'-O-methyl ribonucleotide
  modified_base 86: mod_base = OTHER; note = 2'-O-methyl ribonucleotide
  modified_base 87: mod_base = OTHER; note = 2'-O-methyl ribonucleotide
  modified_base 89: mod_base = OTHER; note = 2'-O-methyl ribonucleotide
  modified_base 92: mod_base = OTHER; note = 2'-O-methyl ribonucleotide
  modified_base 93: mod_base = OTHER; note = 2'-O-methyl ribonucleotide
  modified_base 94: mod_base = OTHER; note = 2'-O-methyl ribonucleotide
  modified_base 95: mod_base = OTHER; note = 2'-O-methyl ribonucleotide
  modified_base 96: mod_base = OTHER; note = 2'-O-methyl ribonucleotide
  modified_base 97: mod_base = OTHER; note = 2'-O-methyl ribonucleotide
  modified_base 98: mod_base = OTHER; note = 2'-O-methyl ribonucleotide
  modified_base 99: mod_base = OTHER; note = 2'-O-methyl ribonucleotide
  modified_base 100: mod_base = OTHER; note = 2'-O-methyl ribonucleotide
  modified_base 101: mod_base = OTHER; note = uniform ribonucleotides (A, C, G, inosine or U), deoxynucleotides (A, G, C, inosine or T), ribonebularine, 2'-O-methylnebularine or deoxynebularine
  modified_base 102: mod_base = OTHER; note = uniform ribonucleotides (A, C, G, inosine or U), deoxynucleotides (A, G, C, inosine or T), ribonebularine, 2'-O-methylnebularine or deoxynebularine
  modified_base 103: mod_base = OTHER; note = uniform ribonucleotides (A, C, G, inosine or U), deoxynucleotides (A, G, C, inosine or T), ribonebularine, 2'-O-methylnebularine or deoxynebularine
  modified_base 1..3: mod_base = OTHER; note = phosphorothioate linkage
  modified_base 45..46: mod_base = OTHER; note = phosphorothioate linkage
  modified_base 98..100: mod_base = OTHER; note = phosphorothioate linkage
  misc_feature 1..100: note = RNA
  misc_feature 101..103: note = Optionally DNA or RNA

SEQ ID NO: 1880 - DNA, 103 bp, synthetic construct; identical to SEQ ID NO: 1797
  source 1..103: mol_type = other DNA
  modified_base 1: mod_base = OTHER; note = 2'-O-methyl ribonucleotide
  modified_base 2: mod_base = OTHER; note = 2'-O-methyl ribonucleotide
  modified_base 3: mod_base = OTHER; note = 2'-O-methyl ribonucleotide
  modified_base 21: mod_base = OTHER; note = 2'-O-methyl ribonucleotide
  modified_base 28: mod_base = OTHER; note = 2'-O-methyl ribonucleotide
  modified_base 29: mod_base = OTHER; note = 2'-O-methyl ribonucleotide
  modified_base 30: mod_base = OTHER; note = 2'-O-methyl ribonucleotide
  modified_base 31: mod_base = OTHER; note = 2'-O-methyl ribonucleotide
  modified_base 32: mod_base = OTHER; note = 2'-O-methyl ribonucleotide
  modified_base 34: mod_base = OTHER; note = 2'-O-methyl ribonucleotide
  modified_base 35: mod_base = OTHER; note = 2'-O-methyl ribonucleotide
  modified_base 36: mod_base = OTHER; note = 2'-O-methyl ribonucleotide
  modified_base 37: mod_base = OTHER; note = 2'-O-methyl ribonucleotide
  modified_base 38: mod_base = OTHER; note = 2'-O-methyl ribonucleotide
  modified_base 39: mod_base = OTHER; note = 2'-O-methyl ribonucleotide
  modified_base 40: mod_base = OTHER; note = 2'-O-methyl ribonucleotide
  modified_base 41: mod_base = OTHER; note = 2'-O-methyl ribonucleotide
  modified_base 42: mod_base = OTHER; note = 2'-O-methyl ribonucleotide
  modified_base 46: mod_base = OTHER; note = 2'-O-methyl ribonucleotide
  modified_base 48: mod_base = OTHER; note = 2'-O-methyl ribonucleotide
  modified_base 50: mod_base = OTHER; note = 2'-O-methyl ribonucleotide
  modified_base 52: mod_base = OTHER; note = 2'-O-methyl ribonucleotide
  modified_base 53: mod_base = OTHER; note = 2'-O-methyl ribonucleotide
  modified_base 54: mod_base = OTHER; note = 2'-O-methyl ribonucleotide
  modified_base 55: mod_base = OTHER; note = 2'-O-methyl ribonucleotide
  modified_base 56: mod_base = OTHER; note = 2'-O-methyl ribonucleotide
  modified_base 57: mod_base = OTHER; note = 2'-O-methyl ribonucleotide
  modified_base 60: mod_base = OTHER; note = 2'-O-methyl ribonucleotide
  modified_base 61: mod_base = OTHER; note = 2'-O-methyl ribonucleotide
  modified_base 66: mod_base = OTHER; note = 2'-O-methyl ribonucleotide
  modified_base 67: mod_base = OTHER; note = 2'-O-methyl ribonucleotide
  modified_base 70: mod_base = OTHER; note = 2'-O-methyl ribonucleotide
  modified_base 71: mod_base = OTHER; note = 2'-O-methyl ribonucleotide
  modified_base 72: mod_base = OTHER; note = 2'-O-methyl ribonucleotide
  modified_base 74: mod_base = OTHER; note = 2'-O-methyl ribonucleotide
  modified_base 75: mod_base = OTHER; note = 2'-O-methyl ribonucleotide
  modified_base 76: mod_base = OTHER; note = 2'-O-methyl ribonucleotide
  modified_base 77: mod_base = OTHER; note = 2'-O-methyl ribonucleotide
  modified_base 78: mod_base = OTHER; note = 2'-O-methyl ribonucleotide
  modified_base 79: mod_base = OTHER; note = 2'-O-methyl ribonucleotide
  modified_base 80: mod_base = OTHER; note = 2'-O-methyl ribonucleotide
  modified_base 81: mod_base = OTHER; note = 2'-O-methyl ribonucleotide
  modified_base 83: mod_base = OTHER; note = 2'-O-methyl ribonucleotide
  modified_base 84: mod_base = OTHER; note = 2'-O-methyl ribonucleotide
  modified_base 85: mod_base = OTHER; note = 2'-O-methyl ribonucleotide
  modified_base 86: mod_base = OTHER; note = 2'-O-methyl ribonucleotide
  modified_base 87: mod_base = OTHER; note = 2'-O-methyl ribonucleotide
  modified_base 88: mod_base = OTHER; note = 2'-O-methyl ribonucleotide
  modified_base 89: mod_base = OTHER; note = 2'-O-methyl ribonucleotide
  modified_base 90: mod_base = OTHER; note = 2'-O-methyl ribonucleotide
  modified_base 91: mod_base = OTHER; note = 2'-O-methyl ribonucleotide
  modified_base 92: mod_base = OTHER; note = 2'-O-methyl ribonucleotide
  modified_base 93: mod_base = OTHER; note = 2'-O-methyl ribonucleotide
  modified_base 94: mod_base = OTHER; note = 2'-O-methyl ribonucleotide
  modified_base 95: mod_base = OTHER; note = 2'-O-methyl ribonucleotide
  modified_base 96: mod_base = OTHER; note = 2'-O-methyl ribonucleotide
  modified_base 97: mod_base = OTHER; note = 2'-O-methyl ribonucleotide
  modified_base 98: mod_base = OTHER; note = 2'-O-methyl ribonucleotide
  modified_base 99: mod_base = OTHER; note = 2'-O-methyl ribonucleotide
  modified_base 100: mod_base = OTHER; note = 2'-O-methyl ribonucleotide
  modified_base 101: mod_base = OTHER; note = uniform ribonucleotides (A, C, G, inosine or U), deoxynucleotides (A, G, C, inosine or T), ribonebularine, 2'-O-methylnebularine or deoxynebularine
  modified_base 102: mod_base = OTHER; note = uniform ribonucleotides (A, C, G, inosine or U), deoxynucleotides (A, G, C, inosine or T), ribonebularine, 2'-O-methylnebularine or deoxynebularine
  modified_base 103: mod_base = OTHER; note = uniform ribonucleotides (A, C, G, inosine or U), deoxynucleotides (A, G, C, inosine or T), ribonebularine, 2'-O-methylnebularine or deoxynebularine
  modified_base 1..3: mod_base = OTHER; note = phosphorothioate linkage
  modified_base 45..46: mod_base = OTHER; note = phosphorothioate linkage
  modified_base 98..100: mod_base = OTHER; note = phosphorothioate linkage
  misc_feature 1..100: note = RNA
  misc_feature 101..103: note = Optionally DNA or RNA

SEQ ID NO: 1881 - DNA, 103 bp, synthetic construct; identical to SEQ ID NO: 1795
  source 1..103: mol_type = other DNA
  modified_base 1: mod_base = OTHER; note = 2'-O-methyl ribonucleotide
  modified_base 2: mod_base = OTHER; note = 2'-O-methyl ribonucleotide
  modified_base 3: mod_base = OTHER; note = 2'-O-methyl ribonucleotide
  modified_base 21: mod_base = OTHER; note = 2'-O-methyl ribonucleotide
  modified_base 28: mod_base = OTHER; note = 2'-O-methyl ribonucleotide
  modified_base 29: mod_base = OTHER; note = 2'-O-methyl ribonucleotide
  modified_base 30: mod_base = OTHER; note = 2'-O-methyl ribonucleotide
  modified_base 31: mod_base = OTHER; note = 2'-O-methyl ribonucleotide
  modified_base 32: mod_base = OTHER; note = 2'-O-methyl ribonucleotide
  modified_base 34: mod_base = OTHER; note = 2'-O-methyl ribonucleotide
  modified_base 35: mod_base = OTHER; note = 2'-O-methyl ribonucleotide
  modified_base 36: mod_base = OTHER; note = 2'-O-methyl ribonucleotide
  modified_base 37: mod_base = OTHER; note = 2'-O-methyl ribonucleotide
  modified_base 38: mod_base = OTHER; note = 2'-O-methyl ribonucleotide
  modified_base 39: mod_base = OTHER; note = 2'-O-methyl ribonucleotide
  modified_base 40: mod_base = OTHER; note = 2'-O-methyl ribonucleotide
  modified_base 41: mod_base = OTHER; note = 2'-O-methyl ribonucleotide
  modified_base 42: mod_base = OTHER; note = 2'-O-methyl ribonucleotide
  modified_base 46: mod_base = OTHER; note = 2'-O-methyl ribonucleotide
  modified_base 48: mod_base = OTHER; note = 2'-O-methyl ribonucleotide
  modified_base 50: mod_base = OTHER; note = 2'-O-methyl ribonucleotide
  modified_base 52: mod_base = OTHER; note = 2'-O-methyl ribonucleotide
  modified_base 53: mod_base = OTHER; note = 2'-O-methyl ribonucleotide
  modified_base 54: mod_base = OTHER; note = 2'-O-methyl ribonucleotide
  modified_base 57: mod_base = OTHER; note = 2'-O-methyl ribonucleotide
  modified_base 61: mod_base = OTHER; note = 2'-O-methyl ribonucleotide
  modified_base 66: mod_base = OTHER; note = 2'-O-methyl ribonucleotide
  modified_base 67: mod_base = OTHER; note = 2'-O-methyl ribonucleotide
  modified_base 70: mod_base = OTHER; note = 2'-O-methyl ribonucleotide
  modified_base 71: mod_base = OTHER; note = 2'-O-methyl ribonucleotide
  modified_base 72: mod_base = OTHER; note = 2'-O-methyl ribonucleotide
  modified_base 74: mod_base = OTHER; note = 2'-O-methyl ribonucleotide
  modified_base 75: mod_base = OTHER; note = 2'-O-methyl ribonucleotide
  modified_base 76: mod_base = OTHER; note = 2'-O-methyl ribonucleotide
  modified_base 77: mod_base = OTHER; note = 2'-O-methyl ribonucleotide
  modified_base 78: mod_base = OTHER; note = 2'-O-methyl ribonucleotide
  modified_base 79: mod_base = OTHER; note = 2'-O-methyl ribonucleotide
  modified_base 80: mod_base = OTHER; note = 2'-O-methyl ribonucleotide
  modified_base 82: mod_base = OTHER; note = 2'-O-methyl ribonucleotide
  modified_base 83: mod_base = OTHER; note = 2'-O-methyl ribonucleotide
  modified_base 84: mod_base = OTHER; note = 2'-O-methyl ribonucleotide
  modified_base 85: mod_base = OTHER; note = 2'-O-methyl ribonucleotide
  modified_base 86: mod_base = OTHER; note = 2'-O-methyl ribonucleotide
  modified_base 87: mod_base = OTHER; note = 2'-O-methyl ribonucleotide
  modified_base 89: mod_base = OTHER; note = 2'-O-methyl ribonucleotide
  modified_base 92: mod_base = OTHER; note = 2'-O-methyl ribonucleotide
  modified_base 93: mod_base = OTHER; note = 2'-O-methyl ribonucleotide
  modified_base 94: mod_base = OTHER; note = 2'-O-methyl ribonucleotide
  modified_base 95: mod_base = OTHER; note = 2'-O-methyl ribonucleotide
  modified_base 96: mod_base = OTHER; note = 2'-O-methyl ribonucleotide
  modified_base 97: mod_base = OTHER; note = 2'-O-methyl ribonucleotide
  modified_base 98: mod_base = OTHER; note = 2'-O-methyl ribonucleotide
  modified_base 99: mod_base = OTHER; note = 2'-O-methyl ribonucleotide
  modified_base 100: mod_base = OTHER; note = 2'-O-methyl ribonucleotide
  modified_base 101: mod_base = OTHER; note = uniform ribonucleotides (A, C, G, inosine or U), deoxynucleotides (A, G, C, inosine or T), ribonebularine, 2'-O-methylnebularine or deoxynebularine
  modified_base 102: mod_base = OTHER; note = uniform ribonucleotides (A, C, G, inosine or U), deoxynucleotides (A, G, C, inosine or T), ribonebularine, 2'-O-methylnebularine or deoxynebularine
  modified_base 103: mod_base = OTHER; note = uniform ribonucleotides (A, C, G, inosine or U), deoxynucleotides (A, G, C, inosine or T), ribonebularine, 2'-O-methylnebularine or deoxynebularine
  modified_base 1..3: mod_base = OTHER; note = phosphorothioate linkage
  modified_base 25..26: mod_base = OTHER; note = phosphorothioate linkage
  modified_base 98..100: mod_base = OTHER; note = phosphorothioate linkage
  misc_feature 1..100: note = RNA
  misc_feature 101..103: note = Optionally DNA or RNA

SEQ ID NO: 1882 - DNA, 103 bp, synthetic construct; identical to SEQ ID NO: 1796
  source 1..103: mol_type = other DNA
  modified_base 1: mod_base = OTHER; note = 2'-O-methyl ribonucleotide
  modified_base 2: mod_base = OTHER; note = 2'-O-methyl ribonucleotide
  modified_base 3: mod_base = OTHER; note = 2'-O-methyl ribonucleotide
  modified_base 21: mod_base = OTHER; note = 2'-O-methyl ribonucleotide
  modified_base 28: mod_base = OTHER; note = 2'-O-methyl ribonucleotide
  modified_base 29: mod_base = OTHER; note = 2'-O-methyl ribonucleotide
  modified_base 30: mod_base = OTHER; note = 2'-O-methyl ribonucleotide
  modified_base 31: mod_base = OTHER; note = 2'-O-methyl ribonucleotide
  modified_base 32: mod_base = OTHER; note = 2'-O-methyl ribonucleotide
  modified_base 34: mod_base = OTHER; note = 2'-O-methyl ribonucleotide
  modified_base 35: mod_base = OTHER; note = 2'-O-methyl ribonucleotide
  modified_base 36: mod_base = OTHER; note = 2'-O-methyl ribonucleotide
  modified_base 37: mod_base = OTHER; note = 2'-O-methyl ribonucleotide
  modified_base 38: mod_base = OTHER; note = 2'-O-methyl ribonucleotide
  modified_base 39: mod_base = OTHER; note = 2'-O-methyl ribonucleotide
  modified_base 40: mod_base = OTHER; note = 2'-O-methyl ribonucleotide
  modified_base 41: mod_base = OTHER; note = 2'-O-methyl ribonucleotide
  modified_base 42: mod_base = OTHER; note = 2'-O-methyl ribonucleotide
  modified_base 46: mod_base = OTHER; note = 2'-O-methyl ribonucleotide
  modified_base 48: mod_base = OTHER; note = 2'-O-methyl ribonucleotide
  modified_base 50: mod_base = OTHER; note = 2'-O-methyl ribonucleotide
  modified_base 52: mod_base = OTHER; note = 2'-O-methyl ribonucleotide
  modified_base 53: mod_base = OTHER; note = 2'-O-methyl ribonucleotide
  modified_base 54: mod_base = OTHER; note = 2'-O-methyl ribonucleotide
  modified_base 57: mod_base = OTHER; note = 2'-O-methyl ribonucleotide
  modified_base 61: mod_base = OTHER; note = 2'-O-methyl ribonucleotide
  modified_base 66: mod_base = OTHER; note = 2'-O-methyl ribonucleotide
  modified_base 67: mod_base = OTHER; note = 2'-O-methyl ribonucleotide
  modified_base 70: mod_base = OTHER; note = 2'-O-methyl ribonucleotide
  modified_base 71: mod_base = OTHER; note = 2'-O-methyl ribonucleotide
  modified_base 72: mod_base = OTHER; note = 2'-O-methyl ribonucleotide
  modified_base 74: mod_base = OTHER; note = 2'-O-methyl ribonucleotide
  modified_base 75: mod_base = OTHER; note = 2'-O-methyl ribonucleotide
  modified_base 76: mod_base = OTHER; note = 2'-O-methyl ribonucleotide
  modified_base 77: mod_base = OTHER; note = 2'-O-methyl ribonucleotide
  modified_base 78: mod_base = OTHER; note = 2'-O-methyl ribonucleotide
  modified_base 79: mod_base = OTHER; note = 2'-O-methyl ribonucleotide
  modified_base 80: mod_base = OTHER; note = 2'-O-methyl ribonucleotide
  modified_base 82: mod_base = OTHER; note = 2'-O-methyl ribonucleotide
  modified_base 83: mod_base = OTHER; note = 2'-O-methyl ribonucleotide
  modified_base 84: mod_base = OTHER; note = 2'-O-methyl ribonucleotide
  modified_base 85: mod_base = OTHER; note = 2'-O-methyl ribonucleotide
  modified_base 86: mod_base = OTHER; note = 2'-O-methyl ribonucleotide
  modified_base 87: mod_base = OTHER; note = 2'-O-methyl ribonucleotide
  modified_base 89: mod_base = OTHER; note = 2'-O-methyl ribonucleotide
  modified_base 92: mod_base = OTHER; note = 2'-O-methyl ribonucleotide
  modified_base 93: mod_base = OTHER; note = 2'-O-methyl ribonucleotide
  modified_base 94: mod_base = OTHER; note = 2'-O-methyl ribonucleotide
  modified_base 95: mod_base = OTHER; note = 2'-O-methyl ribonucleotide
  modified_base 96: mod_base = OTHER; note = 2'-O-methyl ribonucleotide
  modified_base 97: mod_base = OTHER; note = 2'-O-methyl ribonucleotide
  modified_base 98: mod_base = OTHER; note = 2'-O-methyl ribonucleotide
  modified_base 99: mod_base = OTHER; note = 2'-O-methyl ribonucleotide
  modified_base 100: mod_base = OTHER; note = 2'-O-methyl ribonucleotide
  modified_base 101: mod_base = OTHER; note = uniform ribonucleotides (A, C, G, inosine or U), deoxynucleotides (A, G, C, inosine or T), ribonebularine, 2'-O-methylnebularine or deoxynebularine
  modified_base 102: mod_base = OTHER; note = uniform ribonucleotides (A, C, G, inosine or U), deoxynucleotides (A, G, C, inosine or T), ribonebularine, 2'-O-methylnebularine or deoxynebularine
  modified_base 103: mod_base = OTHER; note = uniform ribonucleotides (A, C, G, inosine or U), deoxynucleotides (A, G, C, inosine or T), ribonebularine, 2'-O-methylnebularine or deoxynebularine
  modified_base 1..3: mod_base = OTHER; note = phosphorothioate linkage
  modified_base 25..26: mod_base = OTHER; note = phosphorothioate linkage
  modified_base 98..100: mod_base = OTHER; note = phosphorothioate linkage
  misc_feature 1..100: note = RNA
  misc_feature 101..103: note = Optionally DNA or RNA

SEQ ID NO: 1883 - DNA, 103 bp, synthetic construct; identical to SEQ ID NO: 1797
  source 1..103: mol_type = other DNA
  modified_base 1: mod_base = OTHER; note = 2'-O-methyl ribonucleotide
  modified_base 2: mod_base = OTHER; note = 2'-O-methyl ribonucleotide
  modified_base 3: mod_base = OTHER; note = 2'-O-methyl ribonucleotide
  modified_base 21: mod_base = OTHER; note = 2'-O-methyl ribonucleotide
  modified_base 28: mod_base = OTHER; note = 2'-O-methyl ribonucleotide
  modified_base 29: mod_base = OTHER; note = 2'-O-methyl ribonucleotide
  modified_base 30: mod_base = OTHER; note = 2'-O-methyl ribonucleotide
  modified_base 31: mod_base = OTHER; note = 2'-O-methyl ribonucleotide
  modified_base 32: mod_base = OTHER; note = 2'-O-methyl ribonucleotide
  modified_base 34: mod_base = OTHER; note = 2'-O-methyl ribonucleotide
  modified_base 35: mod_base = OTHER; note = 2'-O-methyl ribonucleotide
  modified_base 36: mod_base = OTHER; note = 2'-O-methyl ribonucleotide
  modified_base 37: mod_base = OTHER; note = 2'-O-methyl ribonucleotide
  modified_base 38: mod_base = OTHER; note = 2'-O-methyl ribonucleotide
  modified_base 39: mod_base = OTHER; note = 2'-O-methyl ribonucleotide
  modified_base 40: mod_base = OTHER; note = 2'-O-methyl ribonucleotide
  modified_base 41: mod_base = OTHER; note = 2'-O-methyl ribonucleotide
  modified_base 42: mod_base = OTHER; note = 2'-O-methyl ribonucleotide
  modified_base 46: mod_base = OTHER; note = 2'-O-methyl ribonucleotide
  modified_base 48: mod_base = OTHER; note = 2'-O-methyl ribonucleotide
  modified_base 50: mod_base = OTHER; note = 2'-O-methyl ribonucleotide
  modified_base 52: mod_base = OTHER; note = 2'-O-methyl ribonucleotide
  modified_base 53: mod_base = OTHER; note = 2'-O-methyl ribonucleotide
  modified_base 54: mod_base = OTHER; note = 2'-O-methyl ribonucleotide
  modified_base 55: mod_base = OTHER; note = 2'-O-methyl ribonucleotide
  modified_base 56: mod_base = OTHER; note = 2'-O-methyl ribonucleotide
  modified_base 57: mod_base = OTHER; note = 2'-O-methyl ribonucleotide
  modified_base 60: mod_base = OTHER; note = 2'-O-methyl ribonucleotide
  modified_base 61: mod_base = OTHER; note = 2'-O-methyl ribonucleotide
  modified_base 66: mod_base = OTHER; note = 2'-O-methyl ribonucleotide
  modified_base 67: mod_base = OTHER; note = 2'-O-methyl ribonucleotide
  modified_base 70: mod_base = OTHER; note = 2'-O-methyl ribonucleotide
  modified_base 71: mod_base = OTHER; note = 2'-O-methyl ribonucleotide
  modified_base 72: mod_base = OTHER; note = 2'-O-methyl ribonucleotide
  modified_base 74: mod_base = OTHER; note = 2'-O-methyl ribonucleotide
  modified_base 75: mod_base = OTHER; note = 2'-O-methyl ribonucleotide
  modified_base 76: mod_base = OTHER; note = 2'-O-methyl ribonucleotide
  modified_base 77: mod_base = OTHER; note = 2'-O-methyl ribonucleotide
  modified_base 78: mod_base = OTHER; note = 2'-O-methyl ribonucleotide
  modified_base 79: mod_base = OTHER; note = 2'-O-methyl ribonucleotide
  modified_base 80: mod_base = OTHER; note = 2'-O-methyl ribonucleotide
  modified_base 81: mod_base = OTHER; note = 2'-O-methyl ribonucleotide
  modified_base 83: mod_base = OTHER; note = 2'-O-methyl ribonucleotide
  modified_base 84: mod_base = OTHER; note = 2'-O-methyl ribonucleotide
  modified_base 85: mod_base = OTHER; note = 2'-O-methyl ribonucleotide
  modified_base 86: mod_base = OTHER; note = 2'-O-methyl ribonucleotide
  modified_base 87: mod_base = OTHER; note = 2'-O-methyl ribonucleotide
  modified_base 88: mod_base = OTHER; note = 2'-O-methyl ribonucleotide
  modified_base 89: mod_base = OTHER; note = 2'-O-methyl ribonucleotide
  modified_base 90: mod_base = OTHER; note = 2'-O-methyl ribonucleotide
  modified_base 91: mod_base = OTHER; note = 2'-O-methyl ribonucleotide
  modified_base 92: mod_base = OTHER; note = 2'-O-methyl ribonucleotide
  modified_base 93: mod_base = OTHER; note = 2'-O-methyl ribonucleotide
  modified_base 94: mod_base = OTHER; note = 2'-O-methyl ribonucleotide
  modified_base 95: mod_base = OTHER; note = 2'-O-methyl ribonucleotide
  modified_base 96: mod_base = OTHER; note = 2'-O-methyl ribonucleotide
  modified_base 97: mod_base = OTHER; note = 2'-O-methyl ribonucleotide
  modified_base 98: mod_base = OTHER; note = 2'-O-methyl ribonucleotide
  modified_base 99: mod_base = OTHER; note = 2'-O-methyl ribonucleotide
  modified_base 100: mod_base = OTHER; note = 2'-O-methyl ribonucleotide
  modified_base 101: mod_base = OTHER; note = uniform ribonucleotides (A, C, G, inosine or U), deoxynucleotides (A, G, C, inosine or T), ribonebularine, 2'-O-methylnebularine or deoxynebularine
  modified_base 102: mod_base = OTHER; note = uniform ribonucleotides (A, C, G, inosine or U), deoxynucleotides (A, G, C, inosine or T), ribonebularine, 2'-O-methylnebularine or deoxynebularine
  modified_base 103: mod_base = OTHER; note = uniform ribonucleotides (A, C, G, inosine or U), deoxynucleotides (A, G, C, inosine or T), ribonebularine, 2'-O-methylnebularine or deoxynebularine
  modified_base 1..3: mod_base = OTHER; note = phosphorothioate linkage
  modified_base 25..26: mod_base = OTHER; note = phosphorothioate linkage
  modified_base 98..100: mod_base = OTHER; note = phosphorothioate linkage
  misc_feature 1..100: note = RNA
  misc_feature 101..103: note = Optionally DNA or RNA

SEQ ID NO: 1884 - DNA, 103 bp, synthetic construct; identical to SEQ ID NO: 1795
  source 1..103: mol_type = other DNA
  modified_base 1: mod_base = OTHER; note = 2'-O-methyl ribonucleotide
  modified_base 2: mod_base = OTHER; note = 2'-O-methyl ribonucleotide
  modified_base 3: mod_base = OTHER; note = 2'-O-methyl ribonucleotide
  modified_base 21: mod_base = OTHER; note = 2'-O-methyl ribonucleotide
  modified_base 28: mod_base = OTHER; note = 2'-O-methyl ribonucleotide
  modified_base 29: mod_base = OTHER; note = 2'-O-methyl ribonucleotide
  modified_base 30: mod_base = OTHER; note = 2'-O-methyl ribonucleotide
  modified_base 31: mod_base = OTHER; note = 2'-O-methyl ribonucleotide
  modified_base 32: mod_base = OTHER; note = 2'-O-methyl ribonucleotide
  modified_base 34: mod_base = OTHER; note = 2'-O-methyl ribonucleotide
  modified_base 35: mod_base = OTHER; note = 2'-O-methyl ribonucleotide
  modified_base 36: mod_base = OTHER; note = 2'-O-methyl ribonucleotide
  modified_base 37: mod_base = OTHER; note = 2'-O-methyl ribonucleotide
  modified_base 38: mod_base = OTHER; note = 2'-O-methyl ribonucleotide
  modified_base 39: mod_base = OTHER; note = 2'-O-methyl ribonucleotide
  modified_base 40: mod_base = OTHER; note = 2'-O-methyl ribonucleotide
  modified_base 41: mod_base = OTHER; note = 2'-O-methyl ribonucleotide
  modified_base 42: mod_base = OTHER; note = 2'-O-methyl ribonucleotide
  modified_base 46: mod_base = OTHER; note = 2'-O-methyl ribonucleotide
  modified_base 48: mod_base = OTHER; note = 2'-O-methyl ribonucleotide
  modified_base 50: mod_base = OTHER; note = 2'-O-methyl ribonucleotide
  modified_base 52: mod_base = OTHER; note = 2'-O-methyl ribonucleotide
  modified_base 53: mod_base = OTHER; note = 2'-O-methyl ribonucleotide
  modified_base 54: mod_base = OTHER; note = 2'-O-methyl ribonucleotide
  modified_base 57: mod_base = OTHER; note = 2'-O-methyl ribonucleotide
  modified_base 61: mod_base = OTHER; note = 2'-O-methyl ribonucleotide
  modified_base 66: mod_base = OTHER; note = 2'-O-methyl ribonucleotide
  modified_base 67: mod_base = OTHER; note = 2'-O-methyl ribonucleotide
  modified_base 70: mod_base = OTHER; note = 2'-O-methyl ribonucleotide
  modified_base 71: mod_base = OTHER; note = 2'-O-methyl ribonucleotide
  modified_base 72: mod_base = OTHER; note = 2'-O-methyl ribonucleotide
  modified_base 74: mod_base = OTHER; note = 2'-O-methyl ribonucleotide
  modified_base 75: mod_base = OTHER; note = 2'-O-methyl ribonucleotide
  modified_base 76: mod_base = OTHER; note = 2'-O-methyl ribonucleotide
  modified_base 77: mod_base = OTHER; note = 2'-O-methyl ribonucleotide
  modified_base 78: mod_base = OTHER; note = 2'-O-methyl ribonucleotide
  modified_base 79: mod_base = OTHER; note = 2'-O-methyl ribonucleotide
  modified_base 80: mod_base = OTHER; note = 2'-O-methyl ribonucleotide
  modified_base 82: mod_base = OTHER; note = 2'-O-methyl ribonucleotide
  modified_base 83: mod_base = OTHER; note = 2'-O-methyl ribonucleotide
  modified_base 84: mod_base = OTHER; note = 2'-O-methyl ribonucleotide
  modified_base 85: mod_base = OTHER; note = 2'-O-methyl ribonucleotide
  modified_base 86: mod_base = OTHER; note = 2'-O-methyl ribonucleotide
  modified_base 87: mod_base = OTHER; note = 2'-O-methyl ribonucleotide
  modified_base 89: mod_base = OTHER; note = 2'-O-methyl ribonucleotide
  modified_base 92: mod_base = OTHER; note = 2'-O-methyl ribonucleotide
  modified_base 93: mod_base = OTHER; note = 2'-O-methyl ribonucleotide
  modified_base 94: mod_base = OTHER; note = 2'-O-methyl ribonucleotide
  modified_base 95: mod_base = OTHER; note = 2'-O-methyl ribonucleotide
  modified_base 96: mod_base = OTHER; note = 2'-O-methyl ribonucleotide
  modified_base 97: mod_base = OTHER; note = 2'-O-methyl ribonucleotide
  modified_base 98: mod_base = OTHER; note = 2'-O-methyl ribonucleotide
  modified_base 99: mod_base = OTHER; note = 2'-O-methyl ribonucleotide
  modified_base 100: mod_base = OTHER; note = 2'-O-methyl ribonucleotide
  modified_base 101: mod_base = OTHER; note = uniform ribonucleotides (A, C, G, inosine or U), deoxynucleotides (A, G, C, inosine or T), ribonebularine, 2'-O-methylnebularine or deoxynebularine
  modified_base 102: mod_base = OTHER; note = uniform ribonucleotides (A, C, G, inosine or U), deoxynucleotides (A, G, C, inosine or T), ribonebularine, 2'-O-methylnebularine or deoxynebularine
  modified_base 103: mod_base = OTHER; note = uniform ribonucleotides (A, C, G, inosine or U), deoxynucleotides (A, G, C, inosine or T), ribonebularine, 2'-O-methylnebularine or deoxynebularine
  modified_base 1..3: mod_base = OTHER; note = phosphorothioate linkage
  modified_base 45..46: mod_base = OTHER; note = phosphorothioate linkage
  modified_base 64..65: mod_base = OTHER; note = phosphorothioate linkage
  modified_base 98..100: mod_base = OTHER; note = phosphorothioate linkage
  misc_feature 1..100: note = RNA
  misc_feature 101..103: note = Optionally DNA or RNA

SEQ ID NO: 1885 - DNA, 103 bp, synthetic construct; identical to SEQ ID NO: 1796
  source 1..103: mol_type = other DNA
  modified_base 1: mod_base = OTHER; note = 2'-O-methyl ribonucleotide
  modified_base 2: mod_base = OTHER; note = 2'-O-methyl ribonucleotide
  modified_base 3: mod_base = OTHER; note = 2'-O-methyl ribonucleotide
  modified_base 21: mod_base = OTHER; note = 2'-O-methyl ribonucleotide
  modified_base 28: mod_base = OTHER; note = 2'-O-methyl ribonucleotide
  modified_base 29: mod_base = OTHER; note = 2'-O-methyl ribonucleotide
  modified_base 30: mod_base = OTHER; note = 2'-O-methyl ribonucleotide
  modified_base 31: mod_base = OTHER; note = 2'-O-methyl ribonucleotide
  modified_base 32: mod_base = OTHER; note = 2'-O-methyl ribonucleotide
  modified_base 34: mod_base = OTHER; note = 2'-O-methyl ribonucleotide
  modified_base 35: mod_base = OTHER; note = 2'-O-methyl ribonucleotide
  modified_base 36: mod_base = OTHER; note = 2'-O-methyl ribonucleotide
  modified_base 37: mod_base = OTHER; note = 2'-O-methyl ribonucleotide
  modified_base 38: mod_base = OTHER; note = 2'-O-methyl ribonucleotide
  modified_base 39: mod_base = OTHER; note = 2'-O-methyl ribonucleotide
  modified_base 40: mod_base = OTHER; note = 2'-O-methyl ribonucleotide
  modified_base 41: mod_base = OTHER; note = 2'-O-methyl ribonucleotide
  modified_base 42: mod_base = OTHER; note = 2'-O-methyl ribonucleotide
  modified_base 46: mod_base = OTHER; note = 2'-O-methyl ribonucleotide
  modified_base 48: mod_base = OTHER; note = 2'-O-methyl ribonucleotide
  modified_base 50: mod_base = OTHER; note = 2'-O-methyl ribonucleotide
  modified_base 52: mod_base = OTHER; note = 2'-O-methyl ribonucleotide
  modified_base 53: mod_base = OTHER; note = 2'-O-methyl ribonucleotide
  modified_base 54: mod_base = OTHER; note = 2'-O-methyl ribonucleotide
  modified_base 57: mod_base = OTHER; note = 2'-O-methyl ribonucleotide
  modified_base 61: mod_base = OTHER; note = 2'-O-methyl ribonucleotide
  modified_base 66: mod_base = OTHER; note = 2'-O-methyl ribonucleotide
  modified_base 67: mod_base = OTHER; note = 2'-O-methyl ribonucleotide
  modified_base 70: mod_base = OTHER; note = 2'-O-methyl ribonucleotide
  modified_base 71: mod_base = OTHER; note = 2'-O-methyl ribonucleotide
  modified_base 72: mod_base = OTHER; note = 2'-O-methyl ribonucleotide
  modified_base 74: mod_base = OTHER; note = 2'-O-methyl ribonucleotide
  modified_base 75: mod_base = OTHER; note = 2'-O-methyl ribonucleotide
  modified_base 76: mod_base = OTHER; note = 2'-O-methyl ribonucleotide
  modified_base 77: mod_base = OTHER; note = 2'-O-methyl ribonucleotide
  modified_base 78: mod_base = OTHER; note = 2'-O-methyl ribonucleotide
  modified_base 79: mod_base = OTHER; note = 2'-O-methyl ribonucleotide
  modified_base 80: mod_base = OTHER; note = 2'-O-methyl ribonucleotide
  modified_base 82: mod_base = OTHER; note = 2'-O-methyl ribonucleotide
  modified_base 83: mod_base = OTHER; note = 2'-O-methyl ribonucleotide
  modified_base 84: mod_base = OTHER; note = 2'-O-methyl ribonucleotide
  modified_base 85: mod_base = OTHER; note = 2'-O-methyl ribonucleotide
  modified_base 86: mod_base = OTHER; note = 2'-O-methyl ribonucleotide
  modified_base 87: mod_base = OTHER; note = 2'-O-methyl ribonucleotide
  modified_base 89: mod_base = OTHER; note = 2'-O-methyl ribonucleotide
  modified_base 92: mod_base = OTHER; note = 2'-O-methyl ribonucleotide
  modified_base 93: mod_base = OTHER; note = 2'-O-methyl ribonucleotide
  modified_base 94: mod_base = OTHER; note = 2'-O-methyl ribonucleotide
  modified_base 95: mod_base = OTHER; note = 2'-O-methyl ribonucleotide
  modified_base 96: mod_base = OTHER; note = 2'-O-methyl ribonucleotide
  modified_base 97: mod_base = OTHER; note = 2'-O-methyl ribonucleotide
  modified_base 98: mod_base = OTHER; note = 2'-O-methyl ribonucleotide
  modified_base 99: mod_base = OTHER; note = 2'-O-methyl ribonucleotide
  modified_base 100: mod_base = OTHER; note = 2'-O-methyl ribonucleotide
  modified_base 101: mod_base = OTHER; note = uniform ribonucleotides (A, C, G, inosine or U), deoxynucleotides (A, G, C, inosine or T), ribonebularine, 2'-O-methylnebularine or deoxynebularine
  modified_base 102: mod_base = OTHER; note = uniform ribonucleotides (A, C, G, inosine or U), deoxynucleotides (A, G, C, inosine or T), ribonebularine, 2'-O-methylnebularine or deoxynebularine
  modified_base 103: mod_base = OTHER; note = uniform ribonucleotides (A, C, G, inosine or U), deoxynucleotides (A, G, C, inosine or T), ribonebularine, 2'-O-methylnebularine or deoxynebularine
  modified_base 1..3: mod_base = OTHER; note = phosphorothioate linkage
  modified_base 45..46: mod_base = OTHER; note = phosphorothioate linkage
  modified_base 64..65: mod_base = OTHER; note = phosphorothioate linkage
  modified_base 98..100: mod_base = OTHER; note = phosphorothioate linkage
  misc_feature 1..100: note = RNA
  misc_feature 101..103: note = Optionally DNA or RNA

SEQ ID NO: 1886 - DNA, 103 bp, synthetic construct; identical to SEQ ID NO: 1797
  source 1..103: mol_type = other DNA
  modified_base 1: mod_base = OTHER; note = 2'-O-methyl ribonucleotide
  modified_base 2: mod_base = OTHER; note = 2'-O-methyl ribonucleotide
  modified_base 3: mod_base = OTHER; note = 2'-O-methyl ribonucleotide
  modified_base 21: mod_base = OTHER; note = 2'-O-methyl ribonucleotide
  modified_base 28: mod_base = OTHER; note = 2'-O-methyl ribonucleotide
  modified_base 29: mod_base = OTHER; note = 2'-O-methyl ribonucleotide
  modified_base 30: mod_base = OTHER; note = 2'-O-methyl ribonucleotide
  modified_base 31: mod_base = OTHER; note = 2'-O-methyl ribonucleotide
  modified_base 32: mod_base = OTHER; note = 2'-O-methyl ribonucleotide
  modified_base 34: mod_base = OTHER; note = 2'-O-methyl ribonucleotide
  modified_base 35: mod_base = OTHER; note = 2'-O-methyl ribonucleotide
  modified_base 36: mod_base = OTHER; note = 2'-O-methyl ribonucleotide
  modified_base 37: mod_base = OTHER; note = 2'-O-methyl ribonucleotide
  modified_base 38: mod_base = OTHER; note = 2'-O-methyl ribonucleotide
  modified_base 39: mod_base = OTHER; note = 2'-O-methyl ribonucleotide
  modified_base 40: mod_base = OTHER; note = 2'-O-methyl ribonucleotide
  modified_base 41: mod_base = OTHER; note = 2'-O-methyl ribonucleotide
  modified_base 42: mod_base = OTHER; note = 2'-O-methyl ribonucleotide
  modified_base 46: mod_base = OTHER; note = 2'-O-methyl ribonucleotide
  modified_base 48: mod_base = OTHER; note = 2'-O-methyl ribonucleotide
  modified_base 50: mod_base = OTHER; note = 2'-O-methyl ribonucleotide
  modified_base 52: mod_base = OTHER; note = 2'-O-methyl ribonucleotide
  modified_base 53: mod_base = OTHER; note = 2'-O-methyl ribonucleotide
  modified_base 54: mod_base = OTHER; note = 2'-O-methyl ribonucleotide
  modified_base 55: mod_base = OTHER; note = 2'-O-methyl ribonucleotide
  modified_base 56: mod_base = OTHER; note = 2'-O-methyl ribonucleotide
  modified_base 57: mod_base = OTHER; note = 2'-O-methyl ribonucleotide
  modified_base 60: mod_base = OTHER; note = 2'-O-methyl ribonucleotide
  modified_base 61: mod_base = OTHER; note = 2'-O-methyl ribonucleotide
  modified_base 66: mod_base = OTHER; note = 2'-O-methyl ribonucleotide
  modified_base 67: mod_base = OTHER; note = 2'-O-methyl ribonucleotide
  modified_base 70: mod_base = OTHER; note = 2'-O-methyl ribonucleotide
  modified_base 71: mod_base = OTHER; note = 2'-O-methyl ribonucleotide
  modified_base 72: mod_base = OTHER; note = 2'-O-methyl ribonucleotide
  modified_base 74: mod_base = OTHER; note = 2'-O-methyl ribonucleotide
  modified_base 75: mod_base = OTHER; note = 2'-O-methyl ribonucleotide
  modified_base 76: mod_base = OTHER; note = 2'-O-methyl ribonucleotide
  modified_base 77: mod_base = OTHER; note = 2'-O-methyl ribonucleotide
  modified_base 78: mod_base = OTHER; note = 2'-O-methyl ribonucleotide
  modified_base 79: mod_base = OTHER; note = 2'-O-methyl ribonucleotide
  modified_base 80: mod_base = OTHER; note = 2'-O-methyl ribonucleotide
  modified_base 81: mod_base = OTHER; note = 2'-O-methyl ribonucleotide
  modified_base 83: mod_base = OTHER; note = 2'-O-methyl ribonucleotide
  modified_base 84: mod_base = OTHER; note = 2'-O-methyl ribonucleotide
  modified_base 85: mod_base = OTHER; note = 2'-O-methyl ribonucleotide
  modified_base 86: mod_base = OTHER; note = 2'-O-methyl ribonucleotide
  modified_base 87: mod_base = OTHER; note = 2'-O-methyl ribonucleotide
  modified_base 88: mod_base = OTHER; note = 2'-O-methyl ribonucleotide
  modified_base 89: mod_base = OTHER; note = 2'-O-methyl ribonucleotide
  modified_base 90: mod_base = OTHER; note = 2'-O-methyl ribonucleotide
  modified_base 91: mod_base = OTHER; note = 2'-O-methyl ribonucleotide
  modified_base 92: mod_base = OTHER; note = 2'-O-methyl ribonucleotide
  modified_base 93: mod_base = OTHER; note = 2'-O-methyl ribonucleotide
  modified_base 94: mod_base = OTHER; note = 2'-O-methyl ribonucleotide
  modified_base 95: mod_base = OTHER; note = 2'-O-methyl ribonucleotide
  modified_base 96: mod_base = OTHER; note = 2'-O-methyl ribonucleotide
  modified_base 97: mod_base = OTHER; note = 2'-O-methyl ribonucleotide
  modified_base 98: mod_base = OTHER; note = 2'-O-methyl ribonucleotide
  modified_base 99: mod_base = OTHER; note = 2'-O-methyl ribonucleotide
  modified_base 100: mod_base = OTHER; note = 2'-O-methyl ribonucleotide
  modified_base 101: mod_base = OTHER; note = uniform ribonucleotides (A, C, G, inosine or U), deoxynucleotides (A, G, C, inosine or T), ribonebularine, 2'-O-methylnebularine or deoxynebularine
  modified_base 102: mod_base = OTHER; note = uniform ribonucleotides (A, C, G, inosine or U), deoxynucleotides (A, G, C, inosine or T), ribonebularine, 2'-O-methylnebularine or deoxynebularine
  modified_base 103: mod_base = OTHER; note = uniform ribonucleotides (A, C, G, inosine or U), deoxynucleotides (A, G, C, inosine or T), ribonebularine, 2'-O-methylnebularine or deoxynebularine
  modified_base 1..3: mod_base = OTHER; note = phosphorothioate linkage
  modified_base 45..46: mod_base = OTHER; note = phosphorothioate linkage
  modified_base 64..65: mod_base = OTHER; note = phosphorothioate linkage
  modified_base 98..100: mod_base = OTHER; note = phosphorothioate linkage
  misc_feature 1..100: note = RNA
  misc_feature 101..103: note = Optionally DNA or RNA

SEQ ID NO: 1887 - DNA, 103 bp, synthetic construct; identical to SEQ ID NO: 1795
  source 1..103: mol_type = other DNA
  modified_base 1: mod_base = OTHER; note = 2'-O-methyl ribonucleotide
  modified_base 2: mod_base = OTHER; note = 2'-O-methyl ribonucleotide
  modified_base 3: mod_base = OTHER; note = 2'-O-methyl ribonucleotide
  modified_base 21: mod_base = OTHER; note = 2'-O-methyl ribonucleotide
  modified_base 28: mod_base = OTHER; note = 2'-O-methyl ribonucleotide
  modified_base 29: mod_base = OTHER; note = 2'-O-methyl ribonucleotide
  modified_base 30: mod_base = OTHER; note = 2'-O-methyl ribonucleotide
  modified_base 31: mod_base = OTHER; note = 2'-O-methyl ribonucleotide
  modified_base 32: mod_base = OTHER; note = 2'-O-methyl ribonucleotide
  modified_base 34: mod_base = OTHER; note = 2'-O-methyl ribonucleotide
  modified_base 35: mod_base = OTHER; note = 2'-O-methyl ribonucleotide
  modified_base 36: mod_base = OTHER; note = 2'-O-methyl ribonucleotide
  modified_base 37: mod_base = OTHER; note = 2'-O-methyl ribonucleotide
  modified_base 38: mod_base = OTHER; note = 2'-O-methyl ribonucleotide
  modified_base 39: mod_base = OTHER; note = 2'-O-methyl ribonucleotide
  modified_base 40: mod_base = OTHER; note = 2'-O-methyl ribonucleotide
  modified_base 41: mod_base = OTHER; note = 2'-O-methyl ribonucleotide
  modified_base 42: mod_base = OTHER; note = 2'-O-methyl ribonucleotide
  modified_base 46: mod_base = OTHER; note = 2'-O-methyl ribonucleotide
  modified_base 48: mod_base = OTHER; note = 2'-O-methyl ribonucleotide
  modified_base 50: mod_base = OTHER; note = 2'-O-methyl ribonucleotide
  modified_base 52: mod_base = OTHER; note = 2'-O-methyl ribonucleotide
  modified_base 53: mod_base = OTHER; note = 2'-O-methyl ribonucleotide
  modified_base 54: mod_base = OTHER; note = 2'-O-methyl ribonucleotide
  modified_base 57: mod_base = OTHER; note = 2'-O-methyl ribonucleotide
  modified_base 61: mod_base = OTHER; note = 2'-O-methyl ribonucleotide
  modified_base 66: mod_base = OTHER; note = 2'-O-methyl ribonucleotide
  modified_base 67: mod_base = OTHER; note = 2'-O-methyl ribonucleotide
  modified_base 70: mod_base = OTHER; note = 2'-O-methyl ribonucleotide
  modified_base 71: mod_base = OTHER; note = 2'-O-methyl ribonucleotide
  modified_base 72: mod_base = OTHER; note = 2'-O-methyl ribonucleotide
  modified_base 74: mod_base = OTHER; note = 2'-O-methyl ribonucleotide
  modified_base 75: mod_base = OTHER; note = 2'-O-methyl ribonucleotide
  modified_base 76: mod_base = OTHER; note = 2'-O-methyl ribonucleotide
  modified_base 77: mod_base = OTHER; note = 2'-O-methyl ribonucleotide
  modified_base 78: mod_base = OTHER; note = 2'-O-methyl ribonucleotide
  modified_base 79: mod_base = OTHER; note = 2'-O-methyl ribonucleotide
  modified_base 80: mod_base = OTHER; note = 2'-O-methyl ribonucleotide
  modified_base 82: mod_base = OTHER; note = 2'-O-methyl ribonucleotide
  modified_base 83: mod_base = OTHER; note = 2'-O-methyl ribonucleotide
  modified_base 84: mod_base = OTHER; note = 2'-O-methyl ribonucleotide
  modified_base 85: mod_base = OTHER; note = 2'-O-methyl ribonucleotide
  modified_base 86: mod_base = OTHER; note = 2'-O-methyl ribonucleotide
  modified_base 87: mod_base = OTHER; note = 2'-O-methyl ribonucleotide
  modified_base 89: mod_base = OTHER; note = 2'-O-methyl ribonucleotide
  modified_base 92: mod_base = OTHER; note = 2'-O-methyl ribonucleotide
  modified_base 93: mod_base = OTHER; note = 2'-O-methyl ribonucleotide
  modified_base 94: mod_base = OTHER; note = 2'-O-methyl ribonucleotide
  modified_base 95: mod_base = OTHER; note = 2'-O-methyl ribonucleotide
  modified_base 96: mod_base = OTHER; note = 2'-O-methyl ribonucleotide
  modified_base 97: mod_base = OTHER; note = 2'-O-methyl ribonucleotide
  modified_base 98: mod_base = OTHER; note = 2'-O-methyl ribonucleotide
  modified_base 99: mod_base = OTHER; note = 2'-O-methyl ribonucleotide
  modified_base 100: mod_base = OTHER; note = 2'-O-methyl ribonucleotide
  modified_base 101: mod_base = OTHER; note = uniform ribonucleotides (A, C, G, inosine or U), deoxynucleotides (A, G, C, inosine or T), ribonebularine, 2'-O-methylnebularine or deoxynebularine
  modified_base 102: mod_base = OTHER; note = uniform ribonucleotides (A, C, G, inosine or U), deoxynucleotides (A, G, C, inosine or T), ribonebularine, 2'-O-methylnebularine or deoxynebularine
  modified_base 103: mod_base = OTHER; note = uniform ribonucleotides (A, C, G, inosine or U), deoxynucleotides (A, G, C, inosine or T), ribonebularine, 2'-O-methylnebularine or deoxynebularine
  modified_base 1..3: mod_base = OTHER; note = phosphorothioate linkage
  modified_base 25..26: mod_base = OTHER; note = phosphorothioate linkage
  modified_base 45..46: mod_base = OTHER; note = phosphorothioate linkage
  modified_base 98..100: mod_base = OTHER; note = phosphorothioate linkage
  misc_feature 1..100: note = RNA
  misc_feature 101..103: note = Optionally DNA or RNA

SEQ ID NO: 1888 - DNA, 103 bp, synthetic construct; identical to SEQ ID NO: 1796
  source 1..103: mol_type = other DNA
  modified_base 1: mod_base = OTHER; note = 2'-O-methyl ribonucleotide
  modified_base 2: mod_base = OTHER; note = 2'-O-methyl ribonucleotide
  modified_base 3: mod_base = OTHER; note = 2'-O-methyl ribonucleotide
  modified_base 21: mod_base = OTHER; note = 2'-O-methyl ribonucleotide
  modified_base 28: mod_base = OTHER; note = 2'-O-methyl ribonucleotide
  modified_base 29: mod_base = OTHER; note = 2'-O-methyl ribonucleotide
  modified_base 30: mod_base = OTHER; note = 2'-O-methyl ribonucleotide
  modified_base 31: mod_base = OTHER; note = 2'-O-methyl ribonucleotide
  modified_base 32: mod_base = OTHER; note = 2'-O-methyl ribonucleotide
  modified_base 34: mod_base = OTHER; note = 2'-O-methyl ribonucleotide
  modified_base 35: mod_base = OTHER; note = 2'-O-methyl ribonucleotide
  modified_base 36: mod_base = OTHER; note = 2'-O-methyl ribonucleotide
  modified_base 37: mod_base = OTHER; note = 2'-O-methyl ribonucleotide
  modified_base 38: mod_base = OTHER; note = 2'-O-methyl ribonucleotide
  modified_base 39: mod_base = OTHER; note = 2'-O-methyl ribonucleotide
  modified_base 40: mod_base = OTHER; note = 2'-O-methyl ribonucleotide
  modified_base 41: mod_base = OTHER; note = 2'-O-methyl ribonucleotide
  modified_base 42: mod_base = OTHER; note = 2'-O-methyl ribonucleotide
  modified_base 46: mod_base = OTHER; note = 2'-O-methyl ribonucleotide
  modified_base 48: mod_base = OTHER; note = 2'-O-methyl ribonucleotide
  modified_base 50: mod_base = OTHER; note = 2'-O-methyl ribonucleotide
  modified_base 52: mod_base = OTHER; note = 2'-O-methyl ribonucleotide
  modified_base 53: mod_base = OTHER; note = 2'-O-methyl ribonucleotide
  modified_base 54: mod_base = OTHER; note = 2'-O-methyl ribonucleotide
  modified_base 57: mod_base = OTHER; note = 2'-O-methyl ribonucleotide
  modified_base 61: mod_base = OTHER; note = 2'-O-methyl ribonucleotide
  modified_base 66: mod_base = OTHER; note = 2'-O-methyl ribonucleotide
  modified_base 67: mod_base = OTHER; note = 2'-O-methyl ribonucleotide
  modified_base 70: mod_base = OTHER; note = 2'-O-methyl ribonucleotide
  modified_base 71: mod_base = OTHER; note = 2'-O-methyl ribonucleotide
  modified_base 72: mod_base = OTHER; note = 2'-O-methyl ribonucleotide
  modified_base 74: mod_base = OTHER; note = 2'-O-methyl ribonucleotide
  modified_base 75: mod_base = OTHER; note = 2'-O-methyl ribonucleotide
  modified_base 76: mod_base = OTHER; note = 2'-O-methyl ribonucleotide
  modified_base 77: mod_base = OTHER; note = 2'-O-methyl ribonucleotide
  modified_base 78: mod_base = OTHER; note = 2'-O-methyl ribonucleotide
  modified_base 79: mod_base = OTHER; note = 2'-O-methyl ribonucleotide
  modified_base 80: mod_base = OTHER; note = 2'-O-methyl ribonucleotide
  modified_base 82: mod_base = OTHER; note = 2'-O-methyl ribonucleotide
  modified_base 83: mod_base = OTHER; note = 2'-O-methyl ribonucleotide
  modified_base 84: mod_base = OTHER; note = 2'-O-methyl ribonucleotide
  modified_base 85: mod_base = OTHER; note = 2'-O-methyl ribonucleotide
  modified_base 86: mod_base = OTHER; note = 2'-O-methyl ribonucleotide
  modified_base 87: mod_base = OTHER; note = 2'-O-methyl ribonucleotide
  modified_base 89: mod_base = OTHER; note = 2'-O-methyl ribonucleotide
  modified_base 92: mod_base = OTHER; note = 2'-O-methyl ribonucleotide
  modified_base 93: mod_base = OTHER; note = 2'-O-methyl ribonucleotide
  modified_base 94: mod_base = OTHER; note = 2'-O-methyl ribonucleotide
  modified_base 95: mod_base = OTHER; note = 2'-O-methyl ribonucleotide
  modified_base 96: mod_base = OTHER; note = 2'-O-methyl ribonucleotide
  modified_base 97: mod_base = OTHER; note = 2'-O-methyl ribonucleotide
  modified_base 98: mod_base = OTHER; note = 2'-O-methyl ribonucleotide
  modified_base 99: mod_base = OTHER; note = 2'-O-methyl ribonucleotide
  modified_base 100: mod_base = OTHER; note = 2'-O-methyl ribonucleotide
  modified_base 101: mod_base = OTHER; note = uniform ribonucleotides (A, C, G, inosine or U), deoxynucleotides (A, G, C, inosine or T), ribonebularine, 2'-O-methylnebularine or deoxynebularine
  modified_base 102: mod_base = OTHER; note = uniform ribonucleotides (A, C, G, inosine or U), deoxynucleotides (A, G, C, inosine or T), ribonebularine, 2'-O-methylnebularine or deoxynebularine
  modified_base 103: mod_base = OTHER; note = uniform ribonucleotides (A, C, G, inosine or U), deoxynucleotides (A, G, C, inosine or T), ribonebularine, 2'-O-methylnebularine or deoxynebularine
  modified_base 1..3: mod_base = OTHER; note = phosphorothioate linkage
  modified_base 25..26: mod_base = OTHER; note = phosphorothioate linkage
  modified_base 45..46: mod_base = OTHER; note = phosphorothioate linkage
  modified_base 98..100: mod_base = OTHER; note = phosphorothioate linkage
  misc_feature 1..100: note = RNA
  misc_feature 101..103: note = Optionally DNA or RNA

SEQ ID NO: 1889 - DNA, 103 bp, synthetic construct; identical to SEQ ID NO: 1797
  source 1..103: mol_type = other DNA
  modified_base 1: mod_base = OTHER; note = 2'-O-methyl ribonucleotide
  modified_base 2: mod_base = OTHER; note = 2'-O-methyl ribonucleotide
  modified_base 3: mod_base = OTHER; note = 2'-O-methyl ribonucleotide
  modified_base 21: mod_base = OTHER; note = 2'-O-methyl ribonucleotide
  modified_base 28: mod_base = OTHER; note = 2'-O-methyl ribonucleotide
  modified_base 29: mod_base = OTHER; note = 2'-O-methyl ribonucleotide
  modified_base 30: mod_base = OTHER; note = 2'-O-methyl ribonucleotide
  modified_base 31: mod_base = OTHER; note = 2'-O-methyl ribonucleotide
  modified_base 32: mod_base = OTHER; note = 2'-O-methyl ribonucleotide
  modified_base 34: mod_base = OTHER; note = 2'-O-methyl ribonucleotide
  modified_base 35: mod_base = OTHER; note = 2'-O-methyl ribonucleotide
  modified_base 36: mod_base = OTHER; note = 2'-O-methyl ribonucleotide
  modified_base 37: mod_base = OTHER; note = 2'-O-methyl ribonucleotide
  modified_base 38: mod_base = OTHER; note = 2'-O-methyl ribonucleotide
  modified_base 39: mod_base = OTHER; note = 2'-O-methyl ribonucleotide
  modified_base 40: mod_base = OTHER; note = 2'-O-methyl ribonucleotide
  modified_base 41: mod_base = OTHER; note = 2'-O-methyl ribonucleotide
  modified_base 42: mod_base = OTHER; note = 2'-O-methyl ribonucleotide
  modified_base 46: mod_base = OTHER; note = 2'-O-methyl ribonucleotide
  modified_base 48: mod_base = OTHER; note = 2'-O-methyl ribonucleotide
  modified_base 50: mod_base = OTHER; note = 2'-O-methyl ribonucleotide
  modified_base 52: mod_base = OTHER; note = 2'-O-methyl ribonucleotide
  modified_base 53: mod_base = OTHER; note = 2'-O-methyl ribonucleotide
  modified_base 54: mod_base = OTHER; note = 2'-O-methyl ribonucleotide
  modified_base 55: mod_base = OTHER; note = 2'-O-methyl ribonucleotide
  modified_base 56: mod_base = OTHER; note = 2'-O-methyl ribonucleotide
  modified_base 57: mod_base = OTHER; note = 2'-O-methyl ribonucleotide
  modified_base 60: mod_base = OTHER; note = 2'-O-methyl ribonucleotide
  modified_base 61: mod_base = OTHER; note = 2'-O-methyl ribonucleotide
  modified_base 66: mod_base = OTHER; note = 2'-O-methyl ribonucleotide
  modified_base 67: mod_base = OTHER; note = 2'-O-methyl ribonucleotide
  modified_base 70: mod_base = OTHER; note = 2'-O-methyl ribonucleotide
  modified_base 71: mod_base = OTHER; note = 2'-O-methyl ribonucleotide
  modified_base 72: mod_base = OTHER; note = 2'-O-methyl ribonucleotide
  modified_base 74: mod_base = OTHER; note = 2'-O-methyl ribonucleotide
  modified_base 75: mod_base = OTHER; note = 2'-O-methyl ribonucleotide
  modified_base 76: mod_base = OTHER; note = 2'-O-methyl ribonucleotide
  modified_base 77: mod_base = OTHER; note = 2'-O-methyl ribonucleotide
  modified_base 78: mod_base = OTHER; note = 2'-O-methyl ribonucleotide
  modified_base 79: mod_base = OTHER; note = 2'-O-methyl ribonucleotide
  modified_base 80: mod_base = OTHER; note = 2'-O-methyl ribonucleotide
  modified_base 81: mod_base = OTHER; note = 2'-O-methyl ribonucleotide
  modified_base 83: mod_base = OTHER; note = 2'-O-methyl ribonucleotide
  modified_base 84: mod_base = OTHER; note = 2'-O-methyl ribonucleotide
  modified_base 85: mod_base = OTHER; note = 2'-O-methyl ribonucleotide
  modified_base 86: mod_base = OTHER; note = 2'-O-methyl ribonucleotide
  modified_base 87: mod_base = OTHER; note = 2'-O-methyl ribonucleotide
  modified_base 88: mod_base = OTHER; note = 2'-O-methyl ribonucleotide
  modified_base 89: mod_base = OTHER; note = 2'-O-methyl ribonucleotide
  modified_base 90: mod_base = OTHER; note = 2'-O-methyl ribonucleotide
  modified_base 91: mod_base = OTHER; note = 2'-O-methyl ribonucleotide
  modified_base 92: mod_base = OTHER; note = 2'-O-methyl ribonucleotide
  modified_base 93: mod_base = OTHER; note = 2'-O-methyl ribonucleotide
  modified_base 94: mod_base = OTHER; note = 2'-O-methyl ribonucleotide
  modified_base 95: mod_base = OTHER; note = 2'-O-methyl ribonucleotide
  modified_base 96: mod_base = OTHER; note = 2'-O-methyl ribonucleotide
  modified_base 97: mod_base = OTHER; note = 2'-O-methyl ribonucleotide
  modified_base 98: mod_base = OTHER; note = 2'-O-methyl ribonucleotide
  modified_base 99: mod_base = OTHER; note = 2'-O-methyl ribonucleotide
  modified_base 100: mod_base = OTHER; note = 2'-O-methyl ribonucleotide
  modified_base 101: mod_base = OTHER; note = uniform ribonucleotides (A, C, G, inosine or U), deoxynucleotides (A, G, C, inosine or T), ribonebularine, 2'-O-methylnebularine or deoxynebularine
  modified_base 102: mod_base = OTHER; note = uniform ribonucleotides (A, C, G, inosine or U), deoxynucleotides (A, G, C, inosine or T), ribonebularine, 2'-O-methylnebularine or deoxynebularine
  modified_base 103: mod_base = OTHER; note = uniform ribonucleotides (A, C, G, inosine or U), deoxynucleotides (A, G, C, inosine or T), ribonebularine, 2'-O-methylnebularine or deoxynebularine
  modified_base 1..3: mod_base = OTHER; note = phosphorothioate linkage
  modified_base 25..26: mod_base = OTHER; note = phosphorothioate linkage
  modified_base 45..46: mod_base = OTHER; note = phosphorothioate linkage
  modified_base 98..100: mod_base = OTHER; note = phosphorothioate linkage
  misc_feature 1..100: note = RNA
  misc_feature 101..103: note = Optionally DNA or RNA

SEQ ID NO: 1890 - DNA, 103 bp, synthetic construct; identical to SEQ ID NO: 1795
  source 1..103: mol_type = other DNA
  modified_base 1: mod_base = OTHER; note = 2'-O-methyl ribonucleotide
  modified_base 2: mod_base = OTHER; note = 2'-O-methyl ribonucleotide
  modified_base 3: mod_base = OTHER; note = 2'-O-methyl ribonucleotide
  modified_base 21: mod_base = OTHER; note = 2'-O-methyl ribonucleotide
  modified_base 28: mod_base = OTHER; note = 2'-O-methyl ribonucleotide
  modified_base 29: mod_base = OTHER; note = 2'-O-methyl ribonucleotide
  modified_base 30: mod_base = OTHER; note = 2'-O-methyl ribonucleotide
  modified_base 31: mod_base = OTHER; note = 2'-O-methyl ribonucleotide
  modified_base 32: mod_base = OTHER; note = 2'-O-methyl ribonucleotide
  modified_base 34: mod_base = OTHER; note = 2'-O-methyl ribonucleotide
  modified_base 35: mod_base = OTHER; note = 2'-O-methyl ribonucleotide
  modified_base 36: mod_base = OTHER; note = 2'-O-methyl ribonucleotide
  modified_base 37: mod_base = OTHER; note = 2'-O-methyl ribonucleotide
  modified_base 38: mod_base = OTHER; note = 2'-O-methyl ribonucleotide
  modified_base 39: mod_base = OTHER; note = 2'-O-methyl ribonucleotide
  modified_base 40: mod_base = OTHER; note = 2'-O-methyl ribonucleotide
  modified_base 41: mod_base = OTHER; note = 2'-O-methyl ribonucleotide
  modified_base 42: mod_base = OTHER; note = 2'-O-methyl ribonucleotide
  modified_base 46: mod_base = OTHER; note = 2'-O-methyl ribonucleotide
  modified_base 48: mod_base = OTHER; note = 2'-O-methyl ribonucleotide
  modified_base 50: mod_base = OTHER; note = 2'-O-methyl ribonucleotide
  modified_base 52: mod_base = OTHER; note = 2'-O-methyl ribonucleotide
  modified_base 53: mod_base = OTHER; note = 2'-O-methyl ribonucleotide
  modified_base 54: mod_base = OTHER; note = 2'-O-methyl ribonucleotide
  modified_base 57: mod_base = OTHER; note = 2'-O-methyl ribonucleotide
  modified_base 61: mod_base = OTHER; note = 2'-O-methyl ribonucleotide
  modified_base 66: mod_base = OTHER; note = 2'-O-methyl ribonucleotide
  modified_base 67: mod_base = OTHER; note = 2'-O-methyl ribonucleotide
  modified_base 70: mod_base = OTHER; note = 2'-O-methyl ribonucleotide
  modified_base 71: mod_base = OTHER; note = 2'-O-methyl ribonucleotide
  modified_base 72: mod_base = OTHER; note = 2'-O-methyl ribonucleotide
  modified_base 74: mod_base = OTHER; note = 2'-O-methyl ribonucleotide
  modified_base 75: mod_base = OTHER; note = 2'-O-methyl ribonucleotide
  modified_base 76: mod_base = OTHER; note = 2'-O-methyl ribonucleotide
  modified_base 77: mod_base = OTHER; note = 2'-O-methyl ribonucleotide
  modified_base 78: mod_base = OTHER; note = 2'-O-methyl ribonucleotide
  modified_base 79: mod_base = OTHER; note = 2'-O-methyl ribonucleotide
  modified_base 80: mod_base = OTHER; note = 2'-O-methyl ribonucleotide
  modified_base 82: mod_base = OTHER; note = 2'-O-methyl ribonucleotide
  modified_base 83: mod_base = OTHER; note = 2'-O-methyl ribonucleotide
  modified_base 84: mod_base = OTHER; note = 2'-O-methyl ribonucleotide
  modified_base 85: mod_base = OTHER; note = 2'-O-methyl ribonucleotide
  modified_base 86: mod_base = OTHER; note = 2'-O-methyl ribonucleotide
  modified_base 87: mod_base = OTHER; note = 2'-O-methyl ribonucleotide
  modified_base 89: mod_base = OTHER; note = 2'-O-methyl ribonucleotide
  modified_base 92: mod_base = OTHER; note = 2'-O-methyl ribonucleotide
  modified_base 93: mod_base = OTHER; note = 2'-O-methyl ribonucleotide
  modified_base 94: mod_base = OTHER; note = 2'-O-methyl ribonucleotide
  modified_base 95: mod_base = OTHER; note = 2'-O-methyl ribonucleotide
  modified_base 96: mod_base = OTHER; note = 2'-O-methyl ribonucleotide
  modified_base 97: mod_base = OTHER; note = 2'-O-methyl ribonucleotide
  modified_base 98: mod_base = OTHER; note = 2'-O-methyl ribonucleotide
  modified_base 99: mod_base = OTHER; note = 2'-O-methyl ribonucleotide
  modified_base 100: mod_base = OTHER; note = 2'-O-methyl ribonucleotide
  modified_base 101: mod_base = OTHER; note = uniform ribonucleotides (A, C, G, inosine or U), deoxynucleotides (A, G, C, inosine or T), ribonebularine, 2'-O-methylnebularine or deoxynebularine
  modified_base 102: mod_base = OTHER; note = uniform ribonucleotides (A, C, G, inosine or U), deoxynucleotides (A, G, C, inosine or T), ribonebularine, 2'-O-methylnebularine or deoxynebularine
  modified_base 103: mod_base = OTHER; note = uniform ribonucleotides (A, C, G, inosine or U), deoxynucleotides (A, G, C, inosine or T), ribonebularine, 2'-O-methylnebularine or deoxynebularine
  modified_base 1..3: mod_base = OTHER; note = phosphorothioate linkage
  modified_base 25..26: mod_base = OTHER; note = phosphorothioate linkage
  modified_base 64..65: mod_base = OTHER; note = phosphorothioate linkage
  modified_base 98..100: mod_base = OTHER; note = phosphorothioate linkage
  misc_feature 1..100: note = RNA
  misc_feature 101..103: note = Optionally DNA or RNA

SEQ ID NO: 1891 - DNA, 103 bp, synthetic construct; identical to SEQ ID NO: 1796
  source 1..103: mol_type = other DNA
  modified_base 1: mod_base = OTHER; note = 2'-O-methyl ribonucleotide
  modified_base 2: mod_base = OTHER; note = 2'-O-methyl ribonucleotide
  modified_base 3: mod_base = OTHER; note = 2'-O-methyl ribonucleotide
  modified_base 21: mod_base = OTHER; note = 2'-O-methyl ribonucleotide
  modified_base 28: mod_base = OTHER; note = 2'-O-methyl ribonucleotide
  modified_base 29: mod_base = OTHER; note = 2'-O-methyl ribonucleotide
  modified_base 30: mod_base = OTHER; note = 2'-O-methyl ribonucleotide
  modified_base 31: mod_base = OTHER; note = 2'-O-methyl ribonucleotide
  modified_base 32: mod_base = OTHER; note = 2'-O-methyl ribonucleotide
  modified_base 34: mod_base = OTHER; note = 2'-O-methyl ribonucleotide
  modified_base 35: mod_base = OTHER; note = 2'-O-methyl ribonucleotide
  modified_base 36: mod_base = OTHER; note = 2'-O-methyl ribonucleotide
  modified_base 37: mod_base = OTHER; note = 2'-O-methyl ribonucleotide
  modified_base 38: mod_base = OTHER; note = 2'-O-methyl ribonucleotide
  modified_base 39: mod_base = OTHER; note = 2'-O-methyl ribonucleotide
  modified_base 40: mod_base = OTHER; note = 2'-O-methyl ribonucleotide
  modified_base 41: mod_base = OTHER; note = 2'-O-methyl ribonucleotide
  modified_base 42: mod_base = OTHER; note = 2'-O-methyl ribonucleotide
  modified_base 46: mod_base = OTHER; note = 2'-O-methyl ribonucleotide
  modified_base 48: mod_base = OTHER; note = 2'-O-methyl ribonucleotide
  modified_base 50: mod_base = OTHER; note = 2'-O-methyl ribonucleotide
  modified_base 52: mod_base = OTHER; note = 2'-O-methyl ribonucleotide
  modified_base 53: mod_base = OTHER; note = 2'-O-methyl ribonucleotide
  modified_base 54: mod_base = OTHER; note = 2'-O-methyl ribonucleotide
  modified_base 57: mod_base = OTHER; note = 2'-O-methyl ribonucleotide
  modified_base 61: mod_base = OTHER; note = 2'-O-methyl ribonucleotide
  modified_base 66: mod_base = OTHER; note = 2'-O-methyl ribonucleotide
  modified_base 67: mod_base = OTHER; note = 2'-O-methyl ribonucleotide
  modified_base 70: mod_base = OTHER; note = 2'-O-methyl ribonucleotide
  modified_base 71: mod_base = OTHER; note = 2'-O-methyl ribonucleotide
  modified_base 72: mod_base = OTHER; note = 2'-O-methyl ribonucleotide
  modified_base 74: mod_base = OTHER; note = 2'-O-methyl ribonucleotide
  modified_base 75: mod_base = OTHER; note = 2'-O-methyl ribonucleotide
  modified_base 76: mod_base = OTHER; note = 2'-O-methyl ribonucleotide
  modified_base 77: mod_base = OTHER; note = 2'-O-methyl ribonucleotide
  modified_base 78: mod_base = OTHER; note = 2'-O-methyl ribonucleotide
  modified_base 79: mod_base = OTHER; note = 2'-O-methyl ribonucleotide
  modified_base 80: mod_base = OTHER; note = 2'-O-methyl ribonucleotide
  modified_base 82: mod_base = OTHER; note = 2'-O-methyl ribonucleotide
  modified_base 83: mod_base = OTHER; note = 2'-O-methyl ribonucleotide
  modified_base 84: mod_base = OTHER; note = 2'-O-methyl ribonucleotide
  modified_base 85: mod_base = OTHER; note = 2'-O-methyl ribonucleotide
  modified_base 86: mod_base = OTHER; note = 2'-O-methyl ribonucleotide
  modified_base 87: mod_base = OTHER; note = 2'-O-methyl ribonucleotide
  modified_base 89: mod_base = OTHER; note = 2'-O-methyl ribonucleotide
  modified_base 92: mod_base = OTHER; note = 2'-O-methyl ribonucleotide
  modified_base 93: mod_base = OTHER; note = 2'-O-methyl ribonucleotide
  modified_base 94: mod_base = OTHER; note = 2'-O-methyl ribonucleotide
  modified_base 95: mod_base = OTHER; note = 2'-O-methyl ribonucleotide
  modified_base 96: mod_base = OTHER; note = 2'-O-methyl ribonucleotide
  modified_base 97: mod_base = OTHER; note = 2'-O-methyl ribonucleotide
  modified_base 98: mod_base = OTHER; note = 2'-O-methyl ribonucleotide
  modified_base 99: mod_base = OTHER; note = 2'-O-methyl ribonucleotide
  modified_base 100: mod_base = OTHER; note = 2'-O-methyl ribonucleotide
  modified_base 101: mod_base = OTHER; note = uniform ribonucleotides (A, C, G, inosine or U), deoxynucleotides (A, G, C, inosine or T), ribonebularine, 2'-O-methylnebularine or deoxynebularine
  modified_base 102: mod_base = OTHER; note = uniform ribonucleotides (A, C, G, inosine or U), deoxynucleotides (A, G, C, inosine or T), ribonebularine, 2'-O-methylnebularine or deoxynebularine
  modified_base 103: mod_base = OTHER; note = uniform ribonucleotides (A, C, G, inosine or U), deoxynucleotides (A, G, C, inosine or T), ribonebularine, 2'-O-methylnebularine or deoxynebularine
  modified_base 1..3: mod_base = OTHER; note = phosphorothioate linkage
  modified_base 25..26: mod_base = OTHER; note = phosphorothioate linkage
  modified_base 64..65: mod_base = OTHER; note = phosphorothioate linkage
  modified_base 98..100: mod_base = OTHER; note = phosphorothioate linkage
  misc_feature 1..100: note = RNA
  misc_feature 101..103: note = Optionally DNA or RNA

SEQ ID NO: 1892 - DNA, 103 bp, synthetic construct; identical to SEQ ID NO: 1797
  source 1..103: mol_type = other DNA
  modified_base 1: mod_base = OTHER; note = 2'-O-methyl ribonucleotide
  modified_base 2: mod_base = OTHER; note = 2'-O-methyl ribonucleotide
  modified_base 3: mod_base = OTHER; note = 2'-O-methyl ribonucleotide
  modified_base 21: mod_base = OTHER; note = 2'-O-methyl ribonucleotide
  modified_base 28: mod_base = OTHER; note = 2'-O-methyl ribonucleotide
  modified_base 29: mod_base = OTHER; note = 2'-O-methyl ribonucleotide
  modified_base 30: mod_base = OTHER; note = 2'-O-methyl ribonucleotide
  modified_base 31: mod_base = OTHER; note = 2'-O-methyl ribonucleotide
  modified_base 32: mod_base = OTHER; note = 2'-O-methyl ribonucleotide
  modified_base 34: mod_base = OTHER; note = 2'-O-methyl ribonucleotide
  modified_base 35: mod_base = OTHER; note = 2'-O-methyl ribonucleotide
  modified_base 36: mod_base = OTHER; note = 2'-O-methyl ribonucleotide
  modified_base 37: mod_base = OTHER; note = 2'-O-methyl ribonucleotide
  modified_base 38: mod_base = OTHER; note = 2'-O-methyl ribonucleotide
  modified_base 39: mod_base = OTHER; note = 2'-O-methyl ribonucleotide
  modified_base 40: mod_base = OTHER; note = 2'-O-methyl ribonucleotide
  modified_base 41: mod_base = OTHER; note = 2'-O-methyl ribonucleotide
  modified_base 42: mod_base = OTHER; note = 2'-O-methyl ribonucleotide
  modified_base 46: mod_base = OTHER; note = 2'-O-methyl ribonucleotide
  modified_base 48: mod_base = OTHER; note = 2'-O-methyl ribonucleotide
  modified_base 50: mod_base = OTHER; note = 2'-O-methyl ribonucleotide
  modified_base 52: mod_base = OTHER; note = 2'-O-methyl ribonucleotide
  modified_base 53: mod_base = OTHER; note = 2'-O-methyl ribonucleotide
  modified_base 54: mod_base = OTHER; note = 2'-O-methyl ribonucleotide
  modified_base 55: mod_base = OTHER; note = 2'-O-methyl ribonucleotide
  modified_base 56: mod_base = OTHER; note = 2'-O-methyl ribonucleotide
  modified_base 57: mod_base = OTHER; note = 2'-O-methyl ribonucleotide
  modified_base 60: mod_base = OTHER; note = 2'-O-methyl ribonucleotide
  modified_base 61: mod_base = OTHER; note = 2'-O-methyl ribonucleotide
  modified_base 66: mod_base = OTHER; note = 2'-O-methyl ribonucleotide
  modified_base 67: mod_base = OTHER; note = 2'-O-methyl ribonucleotide
  modified_base 70: mod_base = OTHER; note = 2'-O-methyl ribonucleotide
  modified_base 71: mod_base = OTHER; note = 2'-O-methyl ribonucleotide
  modified_base 72: mod_base = OTHER; note = 2'-O-methyl ribonucleotide
  modified_base 74: mod_base = OTHER; note = 2'-O-methyl ribonucleotide
  modified_base 75: mod_base = OTHER; note = 2'-O-methyl ribonucleotide
  modified_base 76: mod_base = OTHER; note = 2'-O-methyl ribonucleotide
  modified_base 77: mod_base = OTHER; note = 2'-O-methyl ribonucleotide
  modified_base 78: mod_base = OTHER; note = 2'-O-methyl ribonucleotide
  modified_base 79: mod_base = OTHER; note = 2'-O-methyl ribonucleotide
  modified_base 80: mod_base = OTHER; note = 2'-O-methyl ribonucleotide
  modified_base 81: mod_base = OTHER; note = 2'-O-methyl ribonucleotide
  modified_base 83: mod_base = OTHER; note = 2'-O-methyl ribonucleotide
  modified_base 84: mod_base = OTHER; note = 2'-O-methyl ribonucleotide
  modified_base 85: mod_base = OTHER; note = 2'-O-methyl ribonucleotide
  modified_base 86: mod_base = OTHER; note = 2'-O-methyl ribonucleotide
  modified_base 87: mod_base = OTHER; note = 2'-O-methyl ribonucleotide
  modified_base 88: mod_base = OTHER; note = 2'-O-methyl ribonucleotide
  modified_base 89: mod_base = OTHER; note = 2'-O-methyl ribonucleotide
  modified_base 90: mod_base = OTHER; note = 2'-O-methyl ribonucleotide
  modified_base 91: mod_base = OTHER; note = 2'-O-methyl ribonucleotide
  modified_base 92: mod_base = OTHER; note = 2'-O-methyl ribonucleotide
  modified_base 93: mod_base = OTHER; note = 2'-O-methyl ribonucleotide
  modified_base 94: mod_base = OTHER; note = 2'-O-methyl ribonucleotide
  modified_base 95: mod_base = OTHER; note = 2'-O-methyl ribonucleotide
  modified_base 96: mod_base = OTHER; note = 2'-O-methyl ribonucleotide
  modified_base 97: mod_base = OTHER; note = 2'-O-methyl ribonucleotide
  modified_base 98: mod_base = OTHER; note = 2'-O-methyl ribonucleotide
  modified_base 99: mod_base = OTHER; note = 2'-O-methyl ribonucleotide
  modified_base 100: mod_base = OTHER; note = 2'-O-methyl ribonucleotide
  modified_base 101: mod_base = OTHER; note = uniform ribonucleotides (A, C, G, inosine or U), deoxynucleotides (A, G, C, inosine or T), ribonebularine, 2'-O-methylnebularine or deoxynebularine
  modified_base 102: mod_base = OTHER; note = uniform ribonucleotides (A, C, G, inosine or U), deoxynucleotides (A, G, C, inosine or T), ribonebularine, 2'-O-methylnebularine or deoxynebularine
  modified_base 103: mod_base = OTHER; note = uniform ribonucleotides (A, C, G, inosine or U), deoxynucleotides (A, G, C, inosine or T), ribonebularine, 2'-O-methylnebularine or deoxynebularine
  modified_base 1..3: mod_base = OTHER; note = phosphorothioate linkage
  modified_base 25..26: mod_base = OTHER; note = phosphorothioate linkage
  modified_base 64..65: mod_base = OTHER; note = phosphorothioate linkage
  modified_base 98..100: mod_base = OTHER; note = phosphorothioate linkage
  misc_feature 1..100: note = RNA
  misc_feature 101..103: note = Optionally DNA or RNA

SEQ ID NO: 1893 - DNA, 103 bp, synthetic construct; identical to SEQ ID NO: 1795
  source 1..103: mol_type = other DNA
  modified_base 1: mod_base = OTHER; note = 2'-O-methyl ribonucleotide
  modified_base 2: mod_base = OTHER; note = 2'-O-methyl ribonucleotide
  modified_base 3: mod_base = OTHER; note = 2'-O-methyl ribonucleotide
  modified_base 21: mod_base = OTHER; note = 2'-O-methyl ribonucleotide
  modified_base 28: mod_base = OTHER; note = 2'-O-methyl ribonucleotide
  modified_base 29: mod_base = OTHER; note = 2'-O-methyl ribonucleotide
  modified_base 30: mod_base = OTHER; note = 2'-O-methyl ribonucleotide
  modified_base 31: mod_base = OTHER; note = 2'-O-methyl ribonucleotide
  modified_base 32: mod_base = OTHER; note = 2'-O-methyl ribonucleotide
  modified_base 34: mod_base = OTHER; note = 2'-O-methyl ribonucleotide
  modified_base 35: mod_base = OTHER; note = 2'-O-methyl ribonucleotide
  modified_base 36: mod_base = OTHER; note = 2'-O-methyl ribonucleotide
  modified_base 37: mod_base = OTHER; note = 2'-O-methyl ribonucleotide
  modified_base 38: mod_base = OTHER; note = 2'-O-methyl ribonucleotide
  modified_base 39: mod_base = OTHER; note = 2'-O-methyl ribonucleotide
  modified_base 40: mod_base = OTHER; note = 2'-O-methyl ribonucleotide
  modified_base 41: mod_base = OTHER; note = 2'-O-methyl ribonucleotide
  modified_base 42: mod_base = OTHER; note = 2'-O-methyl ribonucleotide
  modified_base 46: mod_base = OTHER; note = 2'-O-methyl ribonucleotide
  modified_base 48: mod_base = OTHER; note = 2'-O-methyl ribonucleotide
  modified_base 50: mod_base = OTHER; note = 2'-O-methyl ribonucleotide
  modified_base 52: mod_base = OTHER; note = 2'-O-methyl ribonucleotide
  modified_base 53: mod_base = OTHER; note = 2'-O-methyl ribonucleotide
  modified_base 54: mod_base = OTHER; note = 2'-O-methyl ribonucleotide
  modified_base 57: mod_base = OTHER; note = 2'-O-methyl ribonucleotide
  modified_base 61: mod_base = OTHER; note = 2'-O-methyl ribonucleotide
  modified_base 66: mod_base = OTHER; note = 2'-O-methyl ribonucleotide
  modified_base 67: mod_base = OTHER; note = 2'-O-methyl ribonucleotide
  modified_base 70: mod_base = OTHER; note = 2'-O-methyl ribonucleotide
  modified_base 71: mod_base = OTHER; note = 2'-O-methyl ribonucleotide
  modified_base 72: mod_base = OTHER; note = 2'-O-methyl ribonucleotide
  modified_base 74: mod_base = OTHER; note = 2'-O-methyl ribonucleotide
  modified_base 75: mod_base = OTHER; note = 2'-O-methyl ribonucleotide
  modified_base 76: mod_base = OTHER; note = 2'-O-methyl ribonucleotide
  modified_base 77: mod_base = OTHER; note = 2'-O-methyl ribonucleotide
  modified_base 78: mod_base = OTHER; note = 2'-O-methyl ribonucleotide
  modified_base 79: mod_base = OTHER; note = 2'-O-methyl ribonucleotide
  modified_base 80: mod_base = OTHER; note = 2'-O-methyl ribonucleotide
  modified_base 82: mod_base = OTHER; note = 2'-O-methyl ribonucleotide
  modified_base 83: mod_base = OTHER; note = 2'-O-methyl ribonucleotide
  modified_base 84: mod_base = OTHER; note = 2'-O-methyl ribonucleotide
  modified_base 85: mod_base = OTHER; note = 2'-O-methyl ribonucleotide
  modified_base 86: mod_base = OTHER; note = 2'-O-methyl ribonucleotide
  modified_base 87: mod_base = OTHER; note = 2'-O-methyl ribonucleotide
  modified_base 89: mod_base = OTHER; note = 2'-O-methyl ribonucleotide
  modified_base 92: mod_base = OTHER; note = 2'-O-methyl ribonucleotide
  modified_base 93: mod_base = OTHER; note = 2'-O-methyl ribonucleotide
  modified_base 94: mod_base = OTHER; note = 2'-O-methyl ribonucleotide
  modified_base 95: mod_base = OTHER; note = 2'-O-methyl ribonucleotide
  modified_base 96: mod_base = OTHER; note = 2'-O-methyl ribonucleotide
  modified_base 97: mod_base = OTHER; note = 2'-O-methyl ribonucleotide
  modified_base 98: mod_base = OTHER; note = 2'-O-methyl ribonucleotide
  modified_base 99: mod_base = OTHER; note = 2'-O-methyl ribonucleotide
  modified_base 100: mod_base = OTHER; note = 2'-O-methyl ribonucleotide
  modified_base 101: mod_base = OTHER; note = uniform ribonucleotides (A, C, G, inosine or U), deoxynucleotides (A, G, C, inosine or T), ribonebularine, 2'-O-methylnebularine or deoxynebularine
  modified_base 102: mod_base = OTHER; note = uniform ribonucleotides (A, C, G, inosine or U), deoxynucleotides (A, G, C, inosine or T), ribonebularine, 2'-O-methylnebularine or deoxynebularine
  modified_base 103: mod_base = OTHER; note = uniform ribonucleotides (A, C, G, inosine or U), deoxynucleotides (A, G, C, inosine or T), ribonebularine, 2'-O-methylnebularine or deoxynebularine
  modified_base 1..3: mod_base = OTHER; note = phosphorothioate linkage
  modified_base 25..26: mod_base = OTHER; note = phosphorothioate linkage
  modified_base 45..46: mod_base = OTHER; note = phosphorothioate linkage
  modified_base 64..65: mod_base = OTHER; note = phosphorothioate linkage
  modified_base 98..100: mod_base = OTHER; note = phosphorothioate linkage
  misc_feature 1..100: note = RNA
  misc_feature 101..103: note = Optionally DNA or RNA

SEQ ID NO: 1894 - DNA, 103 bp, synthetic construct; identical to SEQ ID NO: 1796
  source 1..103: mol_type = other DNA
  modified_base 1: mod_base = OTHER; note = 2'-O-methyl ribonucleotide
  modified_base 2: mod_base = OTHER; note = 2'-O-methyl ribonucleotide
  modified_base 3: mod_base = OTHER; note = 2'-O-methyl ribonucleotide
  modified_base 21: mod_base = OTHER; note = 2'-O-methyl ribonucleotide
  modified_base 28: mod_base = OTHER; note = 2'-O-methyl ribonucleotide
  modified_base 29: mod_base = OTHER; note = 2'-O-methyl ribonucleotide
  modified_base 30: mod_base = OTHER; note = 2'-O-methyl ribonucleotide
  modified_base 31: mod_base = OTHER; note = 2'-O-methyl ribonucleotide
  modified_base 32: mod_base = OTHER; note = 2'-O-methyl ribonucleotide
  modified_base 34: mod_base = OTHER; note = 2'-O-methyl ribonucleotide
  modified_base 35: mod_base = OTHER; note = 2'-O-methyl ribonucleotide
  modified_base 36: mod_base = OTHER; note = 2'-O-methyl ribonucleotide
  modified_base 37: mod_base = OTHER; note = 2'-O-methyl ribonucleotide
  modified_base 38: mod_base = OTHER; note = 2'-O-methyl ribonucleotide
  modified_base 39: mod_base = OTHER; note = 2'-O-methyl ribonucleotide
  modified_base 40: mod_base = OTHER; note = 2'-O-methyl ribonucleotide
  modified_base 41: mod_base = OTHER; note = 2'-O-methyl ribonucleotide
  modified_base 42: mod_base = OTHER; note = 2'-O-methyl ribonucleotide
  modified_base 46: mod_base = OTHER; note = 2'-O-methyl ribonucleotide
  modified_base 48: mod_base = OTHER; note = 2'-O-methyl ribonucleotide
  modified_base 50: mod_base = OTHER; note = 2'-O-methyl ribonucleotide
  modified_base 52: mod_base = OTHER; note = 2'-O-methyl ribonucleotide
  modified_base 53: mod_base = OTHER; note = 2'-O-methyl ribonucleotide
  modified_base 54: mod_base = OTHER; note = 2'-O-methyl ribonucleotide
  modified_base 57: mod_base = OTHER; note = 2'-O-methyl ribonucleotide
  modified_base 61: mod_base = OTHER; note = 2'-O-methyl ribonucleotide
  modified_base 66: mod_base = OTHER; note = 2'-O-methyl ribonucleotide
  modified_base 67: mod_base = OTHER; note = 2'-O-methyl ribonucleotide
  modified_base 70: mod_base = OTHER; note = 2'-O-methyl ribonucleotide
  modified_base 71: mod_base = OTHER; note = 2'-O-methyl ribonucleotide
  modified_base 72: mod_base = OTHER; note = 2'-O-methyl ribonucleotide
  modified_base 74: mod_base = OTHER; note = 2'-O-methyl ribonucleotide
  modified_base 75: mod_base = OTHER; note = 2'-O-methyl ribonucleotide
  modified_base 76: mod_base = OTHER; note = 2'-O-methyl ribonucleotide
  modified_base 77: mod_base = OTHER; note = 2'-O-methyl ribonucleotide
  modified_base 78: mod_base = OTHER; note = 2'-O-methyl ribonucleotide
  modified_base 79: mod_base = OTHER; note = 2'-O-methyl ribonucleotide
  modified_base 80: mod_base = OTHER; note = 2'-O-methyl ribonucleotide
  modified_base 82: mod_base = OTHER; note = 2'-O-methyl ribonucleotide
  modified_base 83: mod_base = OTHER; note = 2'-O-methyl ribonucleotide
  modified_base 84: mod_base = OTHER; note = 2'-O-methyl ribonucleotide
  modified_base 85: mod_base = OTHER; note = 2'-O-methyl ribonucleotide
  modified_base 86: mod_base = OTHER; note = 2'-O-methyl ribonucleotide
  modified_base 87: mod_base = OTHER; note = 2'-O-methyl ribonucleotide
  modified_base 89: mod_base = OTHER; note = 2'-O-methyl ribonucleotide
  modified_base 92: mod_base = OTHER; note = 2'-O-methyl ribonucleotide
  modified_base 93: mod_base = OTHER; note = 2'-O-methyl ribonucleotide
  modified_base 94: mod_base = OTHER; note = 2'-O-methyl ribonucleotide
  modified_base 95: mod_base = OTHER; note = 2'-O-methyl ribonucleotide
  modified_base 96: mod_base = OTHER; note = 2'-O-methyl ribonucleotide
  modified_base 97: mod_base = OTHER; note = 2'-O-methyl ribonucleotide
  modified_base 98: mod_base = OTHER; note = 2'-O-methyl ribonucleotide
  modified_base 99: mod_base = OTHER; note = 2'-O-methyl ribonucleotide
  modified_base 100: mod_base = OTHER; note = 2'-O-methyl ribonucleotide
  modified_base 101: mod_base = OTHER; note = uniform ribonucleotides (A, C, G, inosine or U), deoxynucleotides (A, G, C, inosine or T), ribonebularine, 2'-O-methylnebularine or deoxynebularine
  modified_base 102: mod_base = OTHER; note = uniform ribonucleotides (A, C, G, inosine or U), deoxynucleotides (A, G, C, inosine or T), ribonebularine, 2'-O-methylnebularine or deoxynebularine
  modified_base 103: mod_base = OTHER; note = uniform ribonucleotides (A, C, G, inosine or U), deoxynucleotides (A, G, C, inosine or T), ribonebularine, 2'-O-methylnebularine or deoxynebularine
  modified_base 1..3: mod_base = OTHER; note = phosphorothioate linkage
  modified_base 25..26: mod_base = OTHER; note = phosphorothioate linkage
  modified_base 45..46: mod_base = OTHER; note = phosphorothioate linkage
  modified_base 64..65: mod_base = OTHER; note = phosphorothioate linkage
  modified_base 98..100: mod_base = OTHER; note = phosphorothioate linkage
  misc_feature 1..100: note = RNA
  misc_feature 101..103: note = Optionally DNA or RNA

SEQ ID NO: 1895 - DNA, 103 bp, synthetic construct; identical to SEQ ID NO: 1797
  source 1..103: mol_type = other DNA
  modified_base 1: mod_base = OTHER; note = 2'-O-methyl ribonucleotide
  modified_base 2: mod_base = OTHER; note = 2'-O-methyl ribonucleotide
  modified_base 3: mod_base = OTHER; note = 2'-O-methyl ribonucleotide
  modified_base 21: mod_base = OTHER; note = 2'-O-methyl ribonucleotide
  modified_base 28: mod_base = OTHER; note = 2'-O-methyl ribonucleotide
  modified_base 29: mod_base = OTHER; note = 2'-O-methyl ribonucleotide
  modified_base 30: mod_base = OTHER; note = 2'-O-methyl ribonucleotide
  modified_base 31: mod_base = OTHER; note = 2'-O-methyl ribonucleotide
  modified_base 32: mod_base = OTHER; note = 2'-O-methyl ribonucleotide
  modified_base 34: mod_base = OTHER; note = 2'-O-methyl ribonucleotide
  modified_base 35: mod_base = OTHER; note = 2'-O-methyl ribonucleotide
  modified_base 36: mod_base = OTHER; note = 2'-O-methyl ribonucleotide
  modified_base 37: mod_base = OTHER; note = 2'-O-methyl ribonucleotide
  modified_base 38: mod_base = OTHER; note = 2'-O-methyl ribonucleotide
  modified_base 39: mod_base = OTHER; note = 2'-O-methyl ribonucleotide
  modified_base 40: mod_base = OTHER; note = 2'-O-methyl ribonucleotide
  modified_base 41: mod_base = OTHER; note = 2'-O-methyl ribonucleotide
  modified_base 42: mod_base = OTHER; note = 2'-O-methyl ribonucleotide
  modified_base 46: mod_base = OTHER; note = 2'-O-methyl ribonucleotide
  modified_base 48: mod_base = OTHER; note = 2'-O-methyl ribonucleotide
  modified_base 50: mod_base = OTHER; note = 2'-O-methyl ribonucleotide
  modified_base 52: mod_base = OTHER; note = 2'-O-methyl ribonucleotide
  modified_base 53: mod_base = OTHER; note = 2'-O-methyl ribonucleotide
  modified_base 54: mod_base = OTHER; note = 2'-O-methyl ribonucleotide
  modified_base 55: mod_base = OTHER; note = 2'-O-methyl ribonucleotide
  modified_base 56: mod_base = OTHER; note = 2'-O-methyl ribonucleotide
  modified_base 57: mod_base = OTHER; note = 2'-O-methyl ribonucleotide
  modified_base 60: mod_base = OTHER; note = 2'-O-methyl ribonucleotide
  modified_base 61: mod_base = OTHER; note = 2'-O-methyl ribonucleotide
  modified_base 66: mod_base = OTHER; note = 2'-O-methyl ribonucleotide
  modified_base 67: mod_base = OTHER; note = 2'-O-methyl ribonucleotide
  modified_base 70: mod_base = OTHER; note = 2'-O-methyl ribonucleotide
  modified_base 71: mod_base = OTHER; note = 2'-O-methyl ribonucleotide
  modified_base 72: mod_base = OTHER; note = 2'-O-methyl ribonucleotide
  modified_base 74: mod_base = OTHER; note = 2'-O-methyl ribonucleotide
  modified_base 75: mod_base = OTHER; note = 2'-O-methyl ribonucleotide
  modified_base 76: mod_base = OTHER; note = 2'-O-methyl ribonucleotide
  modified_base 77: mod_base = OTHER; note = 2'-O-methyl ribonucleotide
  modified_base 78: mod_base = OTHER; note = 2'-O-methyl ribonucleotide
  modified_base 79: mod_base = OTHER; note = 2'-O-methyl ribonucleotide
  modified_base 80: mod_base = OTHER; note = 2'-O-methyl ribonucleotide
  modified_base 81: mod_base = OTHER; note = 2'-O-methyl ribonucleotide
  modified_base 83: mod_base = OTHER; note = 2'-O-methyl ribonucleotide
  modified_base 84: mod_base = OTHER; note = 2'-O-methyl ribonucleotide
  modified_base 85: mod_base = OTHER; note = 2'-O-methyl ribonucleotide
  modified_base 86: mod_base = OTHER; note = 2'-O-methyl ribonucleotide
  modified_base 87: mod_base = OTHER; note = 2'-O-methyl ribonucleotide
  modified_base 88: mod_base = OTHER; note = 2'-O-methyl ribonucleotide
  modified_base 89: mod_base = OTHER; note = 2'-O-methyl ribonucleotide
  modified_base 90: mod_base = OTHER; note = 2'-O-methyl ribonucleotide
  modified_base 91: mod_base = OTHER; note = 2'-O-methyl ribonucleotide
  modified_base 92: mod_base = OTHER; note = 2'-O-methyl ribonucleotide
  modified_base 93: mod_base = OTHER; note = 2'-O-methyl ribonucleotide
  modified_base 94: mod_base = OTHER; note = 2'-O-methyl ribonucleotide
  modified_base 95: mod_base = OTHER; note = 2'-O-methyl ribonucleotide
  modified_base 96: mod_base = OTHER; note = 2'-O-methyl ribonucleotide
  modified_base 97: mod_base = OTHER; note = 2'-O-methyl ribonucleotide
  modified_base 98: mod_base = OTHER; note = 2'-O-methyl ribonucleotide
  modified_base 99: mod_base = OTHER; note = 2'-O-methyl ribonucleotide
  modified_base 100: mod_base = OTHER; note = 2'-O-methyl ribonucleotide
  modified_base 101: mod_base = OTHER; note = uniform ribonucleotides (A, C, G, inosine or U), deoxynucleotides (A, G, C, inosine or T), ribonebularine, 2'-O-methylnebularine or deoxynebularine
  modified_base 102: mod_base = OTHER; note = uniform ribonucleotides (A, C, G, inosine or U), deoxynucleotides (A, G, C, inosine or T), ribonebularine, 2'-O-methylnebularine or deoxynebularine
  modified_base 103: mod_base = OTHER; note = uniform ribonucleotides (A, C, G, inosine or U), deoxynucleotides (A, G, C, inosine or T), ribonebularine, 2'-O-methylnebularine or deoxynebularine
  modified_base 1..3: mod_base = OTHER; note = phosphorothioate linkage
  modified_base 25..26: mod_base = OTHER; note = phosphorothioate linkage
  modified_base 45..46: mod_base = OTHER; note = phosphorothioate linkage
  modified_base 64..65: mod_base = OTHER; note = phosphorothioate linkage
  modified_base 98..100: mod_base = OTHER; note = phosphorothioate linkage
  misc_feature 1..100: note = RNA
  misc_feature 101..103: note = Optionally DNA or RNA

SEQ ID NO: 1896 - RNA, 100 nt, synthetic construct
  source 1..100: mol_type = other RNA
  modified_base 1: mod_base = OTHER; note = 2'-O-methyl ribonucleotide
  modified_base 2: mod_base = OTHER; note = 2'-O-methyl ribonucleotide
  modified_base 3: mod_base = OTHER; note = 2'-O-methyl ribonucleotide
  modified_base 21: mod_base = OTHER; note = 2'-O-methyl ribonucleotide
  modified_base 28: mod_base = OTHER; note = 2'-O-methyl ribonucleotide
  modified_base 29: mod_base = OTHER; note = 2'-O-methyl ribonucleotide
  modified_base 30: mod_base = OTHER; note = 2'-O-methyl ribonucleotide
  modified_base 31: mod_base = OTHER; note = 2'-O-methyl ribonucleotide
  modified_base 32: mod_base = OTHER; note = 2'-O-methyl ribonucleotide
  modified_base 33: mod_base = OTHER; note = 2'-O-methyl ribonucleotide
  modified_base 34: mod_base = OTHER; note = 2'-O-methyl ribonucleotide
  modified_base 35: mod_base = OTHER; note = 2'-O-methyl ribonucleotide
  modified_base 36: mod_base = OTHER; note = 2'-O-methyl ribonucleotide
  modified_base 37: mod_base = OTHER; note = 2'-O-methyl ribonucleotide
  modified_base 38: mod_base = OTHER; note = 2'-O-methyl ribonucleotide
  modified_base 39: mod_base = OTHER; note = 2'-O-methyl ribonucleotide
  modified_base 40: mod_base = OTHER; note = 2'-O-methyl ribonucleotide
  modified_base 41: mod_base = OTHER; note = 2'-O-methyl ribonucleotide
  modified_base 42: mod_base = OTHER; note = 2'-O-methyl ribonucleotide
  modified_base 46: mod_base = OTHER; note = 2'-O-methyl ribonucleotide
  modified_base 48: mod_base = OTHER; note = 2'-O-methyl ribonucleotide
  modified_base 50: mod_base = OTHER; note = 2'-O-methyl ribonucleotide
  modified_base 52: mod_base = OTHER; note = 2'-O-methyl ribonucleotide
  modified_base 53: mod_base = OTHER; note = 2'-O-methyl ribonucleotide
  modified_base 54: mod_base = OTHER; note = 2'-O-methyl ribonucleotide
  modified_base 55: mod_base = OTHER; note = 2'-O-methyl ribonucleotide
  modified_base 56: mod_base = OTHER; note = 2'-O-methyl ribonucleotide
  modified_base 57: mod_base = OTHER; note = 2'-O-methyl ribonucleotide
  modified_base 60: mod_base = OTHER; note = 2'-O-methyl ribonucleotide
  modified_base 61: mod_base = OTHER; note = 2'-O-methyl ribonucleotide
  modified_base 66: mod_base = OTHER; note = 2'-O-methyl ribonucleotide
  modified_base 67: mod_base = OTHER; note = 2'-O-methyl ribonucleotide
  modified_base 70: mod_base = OTHER; note = 2'-O-methyl ribonucleotide
  modified_base 71: mod_base = OTHER; note = 2'-O-methyl ribonucleotide
  modified_base 72: mod_base = OTHER; note = 2'-O-methyl ribonucleotide
  modified_base 73: mod_base = OTHER; note = 2'-O-methyl ribonucleotide
  modified_base 74: mod_base = OTHER; note = 2'-O-methyl ribonucleotide
  modified_base 75: mod_base = OTHER; note = 2'-O-methyl ribonucleotide
  modified_base 76: mod_base = OTHER; note = 2'-O-methyl ribonucleotide
  modified_base 77: mod_base = OTHER; note = 2'-O-methyl ribonucleotide
  modified_base 78: mod_base = OTHER; note = 2'-O-methyl ribonucleotide
  modified_base 79: mod_base = OTHER; note = 2'-O-methyl ribonucleotide
  modified_base 80: mod_base = OTHER; note = 2'-O-methyl ribonucleotide
  modified_base 81: mod_base = OTHER; note = 2'-O-methyl ribonucleotide
  modified_base 83: mod_base = OTHER; note = 2'-O-methyl ribonucleotide
  modified_base 84: mod_base = OTHER; note = 2'-O-methyl ribonucleotide
  modified_base 85: mod_base = OTHER; note = 2'-O-methyl ribonucleotide
  modified_base 86: mod_base = OTHER; note = 2'-O-methyl ribonucleotide
  modified_base 87: mod_base = OTHER; note = 2'-O-methyl ribonucleotide
  modified_base 88: mod_base = OTHER; note = 2'-O-methyl ribonucleotide
  modified_base 89: mod_base = OTHER; note = 2'-O-methyl ribonucleotide
  modified_base 90: mod_base = OTHER; note = 2'-O-methyl ribonucleotide
  modified_base 91: mod_base = OTHER; note = 2'-O-methyl ribonucleotide
  modified_base 92: mod_base = OTHER; note = 2'-O-methyl ribonucleotide
  modified_base 93: mod_base = OTHER; note = 2'-O-methyl ribonucleotide
  modified_base 94: mod_base = OTHER; note = 2'-O-methyl ribonucleotide
  modified_base 95: mod_base = OTHER; note = 2'-O-methyl ribonucleotide
  modified_base 96: mod_base = OTHER; note = 2'-O-methyl ribonucleotide
  modified_base 97: mod_base = OTHER; note = 2'-O-methyl ribonucleotide
  modified_base 98: mod_base = OTHER; note = 2'-O-methyl ribonucleotide
  modified_base 99: mod_base = OTHER; note = 2'-O-methyl ribonucleotide
  modified_base 100: mod_base = OTHER; note = 2'-O-methyl ribonucleotide
  modified_base 9: mod_base = OTHER; note = nebularine
  modified_base 14: mod_base = OTHER; note = nebularine
  modified_base 1..4: mod_base = OTHER; note = phosphorothioate linkage
  modified_base 97..100: mod_base = OTHER; note = phosphorothioate linkage
caggttccntgggntgctctgttttagagctagaaatagcaagttaaaataaggctagtccgttatcaacttgaaaaagtggcaccgagtcggtgctttt

SEQ ID NO: 1897 - RNA, 100 nt, synthetic construct
  source 1..100: mol_type = other RNA
  modified_base 1: mod_base = OTHER; note = 2'-O-methyl ribonucleotide
  modified_base 2: mod_base = OTHER; note = 2'-O-methyl ribonucleotide
  modified_base 3: mod_base = OTHER; note = 2'-O-methyl ribonucleotide
  modified_base 21: mod_base = OTHER; note = 2'-O-methyl ribonucleotide
  modified_base 28: mod_base = OTHER; note = 2'-O-methyl ribonucleotide
  modified_base 29: mod_base = OTHER; note = 2'-O-methyl ribonucleotide
  modified_base 30: mod_base = OTHER; note = 2'-O-methyl ribonucleotide
  modified_base 31: mod_base = OTHER; note = 2'-O-methyl ribonucleotide
  modified_base 32: mod_base = OTHER; note = 2'-O-methyl ribonucleotide
  modified_base 33: mod_base = OTHER; note = 2'-O-methyl ribonucleotide
  modified_base 34: mod_base = OTHER; note = 2'-O-methyl ribonucleotide
  modified_base 35: mod_base = OTHER; note = 2'-O-methyl ribonucleotide
  modified_base 36: mod_base = OTHER; note = 2'-O-methyl ribonucleotide
  modified_base 37: mod_base = OTHER; note = 2'-O-methyl ribonucleotide
  modified_base 38: mod_base = OTHER; note = 2'-O-methyl ribonucleotide
  modified_base 39: mod_base = OTHER; note = 2'-O-methyl ribonucleotide
  modified_base 40: mod_base = OTHER; note = 2'-O-methyl ribonucleotide
  modified_base 41: mod_base = OTHER; note = 2'-O-methyl ribonucleotide
  modified_base 42: mod_base = OTHER; note = 2'-O-methyl ribonucleotide
  modified_base 46: mod_base = OTHER; note = 2'-O-methyl ribonucleotide
  modified_base 48: mod_base = OTHER; note = 2'-O-methyl ribonucleotide
  modified_base 50: mod_base = OTHER; note = 2'-O-methyl ribonucleotide
  modified_base 52: mod_base = OTHER; note = 2'-O-methyl ribonucleotide
  modified_base 53: mod_base = OTHER; note = 2'-O-methyl ribonucleotide
  modified_base 54: mod_base = OTHER; note = 2'-O-methyl ribonucleotide
  modified_base 55: mod_base = OTHER; note = 2'-O-methyl ribonucleotide
  modified_base 56: mod_base = OTHER; note = 2'-O-methyl ribonucleotide
  modified_base 57: mod_base = OTHER; note = 2'-O-methyl ribonucleotide
  modified_base 60: mod_base = OTHER; note = 2'-O-methyl ribonucleotide
  modified_base 61: mod_base = OTHER; note = 2'-O-methyl ribonucleotide
  modified_base 66: mod_base = OTHER; note = 2'-O-methyl ribonucleotide
  modified_base 67: mod_base = OTHER; note = 2'-O-methyl ribonucleotide
  modified_base 70: mod_base = OTHER; note = 2'-O-methyl ribonucleotide
  modified_base 71: mod_base = OTHER; note = 2'-O-methyl ribonucleotide
  modified_base 72: mod_base = OTHER; note = 2'-O-methyl ribonucleotide
  modified_base 73: mod_base = OTHER; note = 2'-O-methyl ribonucleotide
  modified_base 74: mod_base = OTHER; note = 2'-O-methyl ribonucleotide
  modified_base 75: mod_base = OTHER; note = 2'-O-methyl ribonucleotide
  modified_base 76: mod_base = OTHER; note = 2'-O-methyl ribonucleotide
  modified_base 77: mod_base = OTHER; note = 2'-O-methyl ribonucleotide
  modified_base 78: mod_base = OTHER; note = 2'-O-methyl ribonucleotide
  modified_base 79: mod_base = OTHER; note = 2'-O-methyl ribonucleotide
  modified_base 80: mod_base = OTHER; note = 2'-O-methyl ribonucleotide
  modified_base 81: mod_base = OTHER; note = 2'-O-methyl ribonucleotide
  modified_base 83: mod_base = OTHER; note = 2'-O-methyl ribonucleotide
  modified_base 84: mod_base = OTHER; note = 2'-O-methyl ribonucleotide
  modified_base 85: mod_base = OTHER; note = 2'-O-methyl ribonucleotide
  modified_base 86: mod_base = OTHER; note = 2'-O-methyl ribonucleotide
  modified_base 87: mod_base = OTHER; note = 2'-O-methyl ribonucleotide
  modified_base 88: mod_base = OTHER; note = 2'-O-methyl ribonucleotide
  modified_base 89: mod_base = OTHER; note = 2'-O-methyl ribonucleotide
  modified_base 90: mod_base = OTHER; note = 2'-O-methyl ribonucleotide
  modified_base 91: mod_base = OTHER; note = 2'-O-methyl ribonucleotide
  modified_base 92: mod_base = OTHER; note = 2'-O-methyl ribonucleotide
  modified_base 93: mod_base = OTHER; note = 2'-O-methyl ribonucleotide
  modified_base 94: mod_base = OTHER; note = 2'-O-methyl ribonucleotide
  modified_base 95: mod_base = OTHER; note = 2'-O-methyl ribonucleotide
  modified_base 96: mod_base = OTHER; note = 2'-O-methyl ribonucleotide
  modified_base 97: mod_base = OTHER; note = 2'-O-methyl ribonucleotide
  modified_base 98: mod_base = OTHER; note = 2'-O-methyl ribonucleotide
  modified_base 99: mod_base = OTHER; note = 2'-O-methyl ribonucleotide
  modified_base 100: mod_base = OTHER; note = 2'-O-methyl ribonucleotide
  modified_base 9: mod_base = OTHER; note = nebularine
  modified_base 1..4: mod_base = OTHER; note = phosphorothioate linkage
  modified_base 97..100: mod_base = OTHER; note = phosphorothioate linkage
caggttccntgggatgctctgttttagagctagaaatagcaagttaaaataaggctagtccgttatcaacttgaaaaagtggcaccgagtcggtgctttt

SEQ ID NO: 1898 - RNA, 100 nt, synthetic construct
  source 1..100: mol_type = other RNA
  modified_base 1: mod_base = OTHER; note = 2'-O-methyl ribonucleotide
  modified_base 2: mod_base = OTHER; note = 2'-O-methyl ribonucleotide
  modified_base 3: mod_base = OTHER; note = 2'-O-methyl ribonucleotide
  modified_base 21: mod_base = OTHER; note = 2'-O-methyl ribonucleotide
  modified_base 28: mod_base = OTHER; note = 2'-O-methyl ribonucleotide
  modified_base 29: mod_base = OTHER; note = 2'-O-methyl ribonucleotide
  modified_base 30: mod_base = OTHER; note = 2'-O-methyl ribonucleotide
  modified_base 31: mod_base = OTHER; note = 2'-O-methyl ribonucleotide
  modified_base 32: mod_base = OTHER; note = 2'-O-methyl ribonucleotide
  modified_base 33: mod_base = OTHER; note = 2'-O-methyl ribonucleotide
  modified_base 34: mod_base = OTHER; note = 2'-O-methyl ribonucleotide
  modified_base 35: mod_base = OTHER; note = 2'-O-methyl ribonucleotide
  modified_base 36: mod_base = OTHER; note = 2'-O-methyl ribonucleotide
  modified_base 37: mod_base = OTHER; note = 2'-O-methyl ribonucleotide
  modified_base 38: mod_base = OTHER; note = 2'-O-methyl ribonucleotide
  modified_base 39: mod_base = OTHER; note = 2'-O-methyl ribonucleotide
  modified_base 40: mod_base = OTHER; note = 2'-O-methyl ribonucleotide
  modified_base 41: mod_base = OTHER; note = 2'-O-methyl ribonucleotide
  modified_base 42: mod_base = OTHER; note = 2'-O-methyl ribonucleotide
  modified_base 46: mod_base = OTHER; note = 2'-O-methyl ribonucleotide
  modified_base 48: mod_base = OTHER; note = 2'-O-methyl ribonucleotide
  modified_base 50: mod_base = OTHER; note = 2'-O-methyl ribonucleotide
  modified_base 52: mod_base = OTHER; note = 2'-O-methyl ribonucleotide
  modified_base 53: mod_base = OTHER; note = 2'-O-methyl ribonucleotide
  modified_base 54: mod_base = OTHER; note = 2'-O-methyl ribonucleotide
  modified_base 55: mod_base = OTHER; note = 2'-O-methyl ribonucleotide
  modified_base 56: mod_base = OTHER; note = 2'-O-methyl ribonucleotide
  modified_base 57: mod_base = OTHER; note = 2'-O-methyl ribonucleotide
  modified_base 60: mod_base = OTHER; note = 2'-O-methyl ribonucleotide
  modified_base 61: mod_base = OTHER; note = 2'-O-methyl ribonucleotide
  modified_base 66: mod_base = OTHER; note = 2'-O-methyl ribonucleotide
  modified_base 67: mod_base = OTHER; note = 2'-O-methyl ribonucleotide
  modified_base 70: mod_base = OTHER; note = 2'-O-methyl ribonucleotide
  modified_base 71: mod_base = OTHER; note = 2'-O-methyl ribonucleotide
  modified_base 72: mod_base = OTHER; note = 2'-O-methyl ribonucleotide
  modified_base 73: mod_base = OTHER; note = 2'-O-methyl ribonucleotide
  modified_base 74: mod_base = OTHER; note = 2'-O-methyl ribonucleotide
  modified_base 75: mod_base = OTHER; note = 2'-O-methyl ribonucleotide
  modified_base 76: mod_base = OTHER; note = 2'-O-methyl ribonucleotide
  modified_base 77: mod_base = OTHER; note = 2'-O-methyl ribonucleotide
  modified_base 78: mod_base = OTHER; note = 2'-O-methyl ribonucleotide
  modified_base 79: mod_base = OTHER; note = 2'-O-methyl ribonucleotide
  modified_base 80: mod_base = OTHER; note = 2'-O-methyl ribonucleotide
  modified_base 81: mod_base = OTHER; note = 2'-O-methyl ribonucleotide
  modified_base 83: mod_base = OTHER; note = 2'-O-methyl ribonucleotide
  modified_base 84: mod_base = OTHER; note = 2'-O-methyl ribonucleotide
  modified_base 85: mod_base = OTHER; note = 2'-O-methyl ribonucleotide
  modified_base 86: mod_base = OTHER; note = 2'-O-methyl ribonucleotide
  modified_base 87: mod_base = OTHER; note = 2'-O-methyl ribonucleotide
  modified_base 88: mod_base = OTHER; note = 2'-O-methyl ribonucleotide
  modified_base 89: mod_base = OTHER; note = 2'-O-methyl ribonucleotide
  modified_base 90: mod_base = OTHER; note = 2'-O-methyl ribonucleotide
  modified_base 91: mod_base = OTHER; note = 2'-O-methyl ribonucleotide
  modified_base 92: mod_base = OTHER; note = 2'-O-methyl ribonucleotide
  modified_base 93: mod_base = OTHER; note = 2'-O-methyl ribonucleotide
  modified_base 94: mod_base = OTHER; note = 2'-O-methyl ribonucleotide
  modified_base 95: mod_base = OTHER; note = 2'-O-methyl ribonucleotide
  modified_base 96: mod_base = OTHER; note = 2'-O-methyl ribonucleotide
  modified_base 97: mod_base = OTHER; note = 2'-O-methyl ribonucleotide
  modified_base 98: mod_base = OTHER; note = 2'-O-methyl ribonucleotide
  modified_base 99: mod_base = OTHER; note = 2'-O-methyl ribonucleotide
  modified_base 100: mod_base = OTHER; note = 2'-O-methyl ribonucleotide
  modified_base 14: mod_base = OTHER; note = nebularine
  modified_base 1..4: mod_base = OTHER; note = phosphorothioate linkage
  modified_base 97..100: mod_base = OTHER; note = phosphorothioate linkage
caggttccatgggntgctctgttttagagctagaaatagcaagttaaaataaggctagtccgttatcaacttgaaaaagtggcaccgagtcggtgctttt

SEQ ID NO: 1899 - RNA, 100 nt, synthetic construct
  source 1..100: mol_type = other RNA
  modified_base 1: mod_base = OTHER; note = 2'-O-methyl ribonucleotide
  modified_base 2: mod_base = OTHER; note = 2'-O-methyl ribonucleotide
  modified_base 3: mod_base = OTHER; note = 2'-O-methyl ribonucleotide
  modified_base 21: mod_base = OTHER; note = 2'-O-methyl ribonucleotide
  modified_base 28: mod_base = OTHER; note = 2'-O-methyl ribonucleotide
  modified_base 29: mod_base = OTHER; note = 2'-O-methyl ribonucleotide
  modified_base 30: mod_base = OTHER; note = 2'-O-methyl ribonucleotide
  modified_base 31: mod_base = OTHER; note = 2'-O-methyl ribonucleotide
  modified_base 32: mod_base = OTHER; note = 2'-O-methyl ribonucleotide
  modified_base 33: mod_base = OTHER; note = 2'-O-methyl ribonucleotide
  modified_base 35: mod_base = OTHER; note = 2'-O-methyl ribonucleotide
  modified_base 36: mod_base = OTHER; note = 2'-O-methyl ribonucleotide
  modified_base 37: mod_base = OTHER; note = 2'-O-methyl ribonucleotide
  modified_base 38: mod_base = OTHER; note = 2'-O-methyl ribonucleotide
  modified_base 39: mod_base = OTHER; note = 2'-O-methyl ribonucleotide
  modified_base 40: mod_base = OTHER; note = 2'-O-methyl ribonucleotide
  modified_base 41: mod_base = OTHER; note = 2'-O-methyl ribonucleotide
  modified_base 42: mod_base = OTHER; note = 2'-O-methyl ribonucleotide
  modified_base 46: mod_base = OTHER; note = 2'-O-methyl ribonucleotide
  modified_base 48: mod_base = OTHER; note = 2'-O-methyl ribonucleotide
  modified_base 50: mod_base = OTHER; note = 2'-O-methyl ribonucleotide
  modified_base 52: mod_base = OTHER; note = 2'-O-methyl ribonucleotide
  modified_base 53: mod_base = OTHER; note = 2'-O-methyl ribonucleotide
  modified_base 54: mod_base = OTHER; note = 2'-O-methyl ribonucleotide
  modified_base 55: mod_base = OTHER; note = 2'-O-methyl ribonucleotide
  modified_base 56: mod_base = OTHER; note = 2'-O-methyl ribonucleotide
  modified_base 57: mod_base = OTHER; note = 2'-O-methyl ribonucleotide
  modified_base 60: mod_base = OTHER; note = 2'-O-methyl ribonucleotide
  modified_base 61: mod_base = OTHER; note = 2'-O-methyl ribonucleotide
  modified_base 66: mod_base = OTHER; note = 2'-O-methyl ribonucleotide
  modified_base 67: mod_base = OTHER; note = 2'-O-methyl ribonucleotide
  modified_base 70: mod_base = OTHER; note = 2'-O-methyl ribonucleotide
  modified_base 71: mod_base = OTHER; note = 2'-O-methyl ribonucleotide
  modified_base 72: mod_base = OTHER; note = 2'-O-methyl ribonucleotide
  modified_base 73: mod_base = OTHER; note = 2'-O-methyl ribonucleotide
  modified_base 74: mod_base = OTHER; note = 2'-O-methyl ribonucleotide
  modified_base 75: mod_base = OTHER; note = 2'-O-methyl ribonucleotide
  modified_base 76: mod_base = OTHER; note = 2'-O-methyl ribonucleotide
  modified_base 77: mod_base = OTHER; note = 2'-O-methyl ribonucleotide
  modified_base 78: mod_base = OTHER; note = 2'-O-methyl ribonucleotide
  modified_base 79: mod_base = OTHER; note = 2'-O-methyl ribonucleotide
  modified_base 80: mod_base = OTHER; note = 2'-O-methyl ribonucleotide
  modified_base 81: mod_base = OTHER; note = 2'-O-methyl ribonucleotide
  modified_base 83: mod_base = OTHER; note = 2'-O-methyl ribonucleotide
  modified_base 84: mod_base = OTHER; note = 2'-O-methyl ribonucleotide
  modified_base 85: mod_base = OTHER; note = 2'-O-methyl ribonucleotide
  modified_base 86: mod_base = OTHER; note = 2'-O-methyl ribonucleotide
  modified_base 87: mod_base = OTHER; note = 2'-O-methyl ribonucleotide
  modified_base 88: mod_base = OTHER; note = 2'-O-methyl ribonucleotide
  modified_base 89: mod_base = OTHER; note = 2'-O-methyl ribonucleotide
  modified_base 90: mod_base = OTHER; note = 2'-O-methyl ribonucleotide
  modified_base 91: mod_base = OTHER; note = 2'-O-methyl ribonucleotide
  modified_base 92: mod_base = OTHER; note = 2'-O-methyl ribonucleotide
  modified_base 93: mod_base = OTHER; note = 2'-O-methyl ribonucleotide
  modified_base 94: mod_base = OTHER; note = 2'-O-methyl ribonucleotide
  modified_base 95: mod_base = OTHER; note = 2'-O-methyl ribonucleotide
  modified_base 96: mod_base = OTHER; note = 2'-O-methyl ribonucleotide
  modified_base 97: mod_base = OTHER; note = 2'-O-methyl ribonucleotide
  modified_base 98: mod_base = OTHER; note = 2'-O-methyl ribonucleotide
  modified_base 99: mod_base = OTHER; note = 2'-O-methyl ribonucleotide
  modified_base 100: mod_base = OTHER; note = 2'-O-methyl ribonucleotide
  modified_base 34: mod_base = OTHER; note = nebularine
  modified_base 1..4: mod_base = OTHER; note = phosphorothioate linkage
  modified_base 97..100: mod_base = OTHER; note = phosphorothioate linkage
caggttccatgggatgctctgttttagagctagnaatagcaagttaaaataaggctagtccgttatcaacttgaaaaagtggcaccgagtcggtgctttt

SEQ ID NO: 1900 - RNA, 100 nt, synthetic construct
  source 1..100: mol_type = other RNA
  modified_base 1: mod_base = OTHER; note = 2'-O-methyl ribonucleotide
  modified_base 2: mod_base = OTHER; note = 2'-O-methyl ribonucleotide
  modified_base 3: mod_base = OTHER; note = 2'-O-methyl ribonucleotide
  modified_base 21: mod_base = OTHER; note = 2'-O-methyl ribonucleotide
  modified_base 28: mod_base = OTHER; note = 2'-O-methyl ribonucleotide
  modified_base 29: mod_base = OTHER; note = 2'-O-methyl ribonucleotide
  modified_base 30: mod_base = OTHER; note = 2'-O-methyl ribonucleotide
  modified_base 31: mod_base = OTHER; note = 2'-O-methyl ribonucleotide
  modified_base 32: mod_base = OTHER; note = 2'-O-methyl ribonucleotide
  modified_base 33: mod_base = OTHER; note = 2'-O-methyl ribonucleotide
  modified_base 35: mod_base = OTHER; note = 2'-O-methyl ribonucleotide
  modified_base 36: mod_base = OTHER; note = 2'-O-methyl ribonucleotide
  modified_base 37: mod_base = OTHER; note = 2'-O-methyl ribonucleotide
  modified_base 38: mod_base = OTHER; note = 2'-O-methyl ribonucleotide
  modified_base 39: mod_base = OTHER; note = 2'-O-methyl ribonucleotide
  modified_base 40: mod_base = OTHER; note = 2'-O-methyl ribonucleotide
  modified_base 41: mod_base = OTHER; note = 2'-O-methyl ribonucleotide
  modified_base 42: mod_base = OTHER; note = 2'-O-methyl ribonucleotide
  modified_base 46: mod_base = OTHER; note = 2'-O-methyl ribonucleotide
  modified_base 48: mod_base = OTHER; note = 2'-O-methyl ribonucleotide
  modified_base 50: mod_base = OTHER; note = 2'-O-methyl ribonucleotide
  modified_base 52: mod_base = OTHER; note = 2'-O-methyl ribonucleotide
  modified_base 53: mod_base = OTHER; note = 2'-O-methyl ribonucleotide
  modified_base 54: mod_base = OTHER; note = 2'-O-methyl ribonucleotide
  modified_base 55: mod_base = OTHER; note = 2'-O-methyl ribonucleotide
  modified_base 56: mod_base = OTHER; note = 2'-O-methyl ribonucleotide
  modified_base 60: mod_base = OTHER; note = 2'-O-methyl ribonucleotide
  modified_base 61: mod_base = OTHER; note = 2'-O-methyl ribonucleotide
  modified_base 66: mod_base = OTHER; note = 2'-O-methyl ribonucleotide
  modified_base 67: mod_base = OTHER; note = 2'-O-methyl ribonucleotide
  modified_base 70: mod_base = OTHER; note = 2'-O-methyl ribonucleotide
  modified_base 71: mod_base = OTHER; note = 2'-O-methyl ribonucleotide
  modified_base 72: mod_base = OTHER; note = 2'-O-methyl ribonucleotide
  modified_base 73: mod_base = OTHER; note = 2'-O-methyl ribonucleotide
  modified_base 74: mod_base = OTHER; note = 2'-O-methyl ribonucleotide
  modified_base 75: mod_base = OTHER; note = 2'-O-methyl ribonucleotide
  modified_base 76: mod_base = OTHER; note = 2'-O-methyl ribonucleotide
  modified_base 77: mod_base = OTHER; note = 2'-O-methyl ribonucleotide
  modified_base 78: mod_base = OTHER; note = 2'-O-methyl ribonucleotide
  modified_base 79: mod_base = OTHER; note = 2'-O-methyl ribonucleotide
  modified_base 80: mod_base = OTHER; note = 2'-O-methyl ribonucleotide
  modified_base 81: mod_base = OTHER; note = 2'-O-methyl ribonucleotide
  modified_base 83: mod_base = OTHER; note = 2'-O-methyl ribonucleotide
  modified_base 84: mod_base = OTHER; note = 2'-O-methyl ribonucleotide
  modified_base 85: mod_base = OTHER; note = 2'-O-methyl ribonucleotide
  modified_base 86: mod_base = OTHER; note = 2'-O-methyl ribonucleotide
  modified_base 87: mod_base = OTHER; note = 2'-O-methyl ribonucleotide
  modified_base 88: mod_base = OTHER; note = 2'-O-methyl ribonucleotide
  modified_base 89: mod_base = OTHER; note = 2'-O-methyl ribonucleotide
  modified_base 90: mod_base = OTHER; note = 2'-O-methyl ribonucleotide
  modified_base 91: mod_base = OTHER; note = 2'-O-methyl ribonucleotide
  modified_base 92: mod_base = OTHER; note = 2'-O-methyl ribonucleotide
  modified_base 93: mod_base = OTHER; note = 2'-O-methyl ribonucleotide
  modified_base 94: mod_base = OTHER; note = 2'-O-methyl ribonucleotide
  modified_base 95: mod_base = OTHER; note = 2'-O-methyl ribonucleotide
  modified_base 96: mod_base = OTHER; note = 2'-O-methyl ribonucleotide
  modified_base 97: mod_base = OTHER; note = 2'-O-methyl ribonucleotide
  modified_base 98: mod_base = OTHER; note = 2'-O-methyl ribonucleotide
  modified_base 99: mod_base = OTHER; note = 2'-O-methyl ribonucleotide
  modified_base 100: mod_base = OTHER; note = 2'-O-methyl ribonucleotide
  modified_base 34: mod_base = OTHER; note = nebularine
  modified_base 57: mod_base = OTHER; note = nebularine
  modified_base 1..4: mod_base = OTHER; note = phosphorothioate linkage
  modified_base 97..100: mod_base = OTHER; note = phosphorothioate linkage
caggttccatgggatgctctgttttagagctagnaatagcaagttaaaataaggctngtccgttatcaacttgaaaaagtggcaccgagtcggtgctttt

SEQ ID NO: 1901 - RNA, 100 nt, synthetic construct
  source 1..100: mol_type = other RNA
  modified_base 1: mod_base = OTHER; note = 2'-O-methyl ribonucleotide
  modified_base 2: mod_base = OTHER; note = 2'-O-methyl ribonucleotide
  modified_base 3: mod_base = OTHER; note = 2'-O-methyl ribonucleotide
  modified_base 21: mod_base = OTHER; note = 2'-O-methyl ribonucleotide
  modified_base 28: mod_base = OTHER; note = 2'-O-methyl ribonucleotide
  modified_base 29: mod_base = OTHER; note = 2'-O-methyl ribonucleotide
  modified_base 30: mod_base = OTHER; note = 2'-O-methyl ribonucleotide
  modified_base 31: mod_base = OTHER; note = 2'-O-methyl ribonucleotide
  modified_base 32: mod_base = OTHER; note = 2'-O-methyl ribonucleotide
  modified_base 33: mod_base = OTHER; note = 2'-O-methyl ribonucleotide
  modified_base 34: mod_base = OTHER; note = 2'-O-methyl ribonucleotide
  modified_base 35: mod_base = OTHER; note = 2'-O-methyl ribonucleotide
  modified_base 36: mod_base = OTHER; note = 2'-O-methyl ribonucleotide
  modified_base 37: mod_base = OTHER; note = 2'-O-methyl ribonucleotide
  modified_base 38: mod_base = OTHER; note = 2'-O-methyl ribonucleotide
  modified_base 39: mod_base = OTHER; note = 2'-O-methyl ribonucleotide
  modified_base 40: mod_base = OTHER; note = 2'-O-methyl ribonucleotide
  modified_base 41: mod_base = OTHER; note = 2'-O-methyl ribonucleotide
  modified_base 42: mod_base = OTHER; note = 2'-O-methyl ribonucleotide
  modified_base 46: mod_base = OTHER; note = 2'-O-methyl ribonucleotide
  modified_base 48: mod_base = OTHER; note = 2'-O-methyl ribonucleotide
  modified_base 50: mod_base = OTHER; note = 2'-O-methyl ribonucleotide
  modified_base 52: mod_base = OTHER; note = 2'-O-methyl ribonucleotide
  modified_base 53: mod_base = OTHER; note = 2'-O-methyl ribonucleotide
  modified_base 54: mod_base = OTHER; note = 2'-O-methyl ribonucleotide
  modified_base 55: mod_base = OTHER; note = 2'-O-methyl ribonucleotide
  modified_base 56: mod_base = OTHER; note = 2'-O-methyl ribonucleotide
  modified_base 60: mod_base = OTHER; note = 2'-O-methyl ribonucleotide
  modified_base 61: mod_base = OTHER; note = 2'-O-methyl ribonucleotide
  modified_base 66: mod_base = OTHER; note = 2'-O-methyl ribonucleotide
  modified_base 67: mod_base = OTHER; note = 2'-O-methyl ribonucleotide
  modified_base 70: mod_base = OTHER; note = 2'-O-methyl ribonucleotide
  modified_base 71: mod_base = OTHER; note = 2'-O-methyl ribonucleotide
  modified_base 72: mod_base = OTHER; note = 2'-O-methyl ribonucleotide
  modified_base 73: mod_base = OTHER; note = 2'-O-methyl ribonucleotide
  modified_base 74: mod_base = OTHER; note = 2'-O-methyl ribonucleotide
  modified_base 75: mod_base = OTHER; note = 2'-O-methyl ribonucleotide
  modified_base 76: mod_base = OTHER; note = 2'-O-methyl ribonucleotide
  modified_base 77: mod_base = OTHER; note = 2'-O-methyl ribonucleotide
  modified_base 78: mod_base = OTHER; note = 2'-O-methyl ribonucleotide
  modified_base 79: mod_base = OTHER; note = 2'-O-methyl ribonucleotide
  modified_base 80: mod_base = OTHER; note = 2'-O-methyl ribonucleotide
  modified_base 81: mod_base = OTHER; note = 2'-O-methyl ribonucleotide
  modified_base 83: mod_base = OTHER; note = 2'-O-methyl ribonucleotide
  modified_base 84: mod_base = OTHER; note = 2'-O-methyl ribonucleotide
  modified_base 85: mod_base = OTHER; note = 2'-O-methyl ribonucleotide
  modified_base 86: mod_base = OTHER; note = 2'-O-methyl ribonucleotide
  modified_base 87: mod_base = OTHER; note = 2'-O-methyl ribonucleotide
  modified_base 88: mod_base = OTHER; note = 2'-O-methyl ribonucleotide
  modified_base 89: mod_base = OTHER; note = 2'-O-methyl ribonucleotide
  modified_base 90: mod_base = OTHER; note = 2'-O-methyl ribonucleotide
  modified_base 91: mod_base = OTHER; note = 2'-O-methyl ribonucleotide
  modified_base 92: mod_base = OTHER; note = 2'-O-methyl ribonucleotide
  modified_base 93: mod_base = OTHER; note = 2'-O-methyl ribonucleotide
  modified_base 94: mod_base = OTHER; note = 2'-O-methyl ribonucleotide
  modified_base 95: mod_base = OTHER; note = 2'-O-methyl ribonucleotide
  modified_base 96: mod_base = OTHER; note = 2'-O-methyl ribonucleotide
  modified_base 97: mod_base = OTHER; note = 2'-O-methyl ribonucleotide
  modified_base 98: mod_base = OTHER; note = 2'-O-methyl ribonucleotide
  modified_base 99: mod_base = OTHER; note = 2'-O-methyl ribonucleotide
  modified_base 100: mod_base = OTHER; note = 2'-O-methyl ribonucleotide
  modified_base 57: mod_base = OTHER; note = nebularine
  modified_base 1..4: mod_base = OTHER; note = phosphorothioate linkage
  modified_base 97..100: mod_base = OTHER; note = phosphorothioate linkage
caggttccatgggatgctctgttttagagctagaaatagcaagttaaaataaggctngtccgttatcaacttgaaaaagtggcaccgagtcggtgctttt

SEQ ID NO: 1902 - RNA, 100 nt, synthetic construct
  source 1..100: mol_type = other RNA
  modified_base 1: mod_base = OTHER; note = 2'-O-methyl ribonucleotide
  modified_base 2: mod_base = OTHER; note = 2'-O-methyl ribonucleotide
  modified_base 3: mod_base = OTHER; note = 2'-O-methyl ribonucleotide
  modified_base 21: mod_base = OTHER; note = 2'-O-methyl ribonucleotide
  modified_base 28: mod_base = OTHER; note = 2'-O-methyl ribonucleotide
  modified_base 29: mod_base = OTHER; note = 2'-O-methyl ribonucleotide
  modified_base 30: mod_base = OTHER; note = 2'-O-methyl ribonucleotide
  modified_base 31: mod_base = OTHER; note = 2'-O-methyl ribonucleotide
  modified_base 32: mod_base = OTHER; note = 2'-O-methyl ribonucleotide
  modified_base 33: mod_base = OTHER; note = 2'-O-methyl ribonucleotide
  modified_base 34: mod_base = OTHER; note = 2'-O-methyl ribonucleotide
  modified_base 35: mod_base = OTHER; note = 2'-O-methyl ribonucleotide
  modified_base 36: mod_base = OTHER; note = 2'-O-methyl ribonucleotide
  modified_base 37: mod_base = OTHER; note = 2'-O-methyl ribonucleotide
  modified_base 38: mod_base = OTHER; note = 2'-O-methyl ribonucleotide
  modified_base 39: mod_base = OTHER; note = 2'-O-methyl ribonucleotide
  modified_base 40: mod_base = OTHER; note = 2'-O-methyl ribonucleotide
  modified_base 41: mod_base = OTHER; note = 2'-O-methyl ribonucleotide
  modified_base 42: mod_base = OTHER; note = 2'-O-methyl ribonucleotide
  modified_base 46: mod_base = OTHER; note = 2'-O-methyl ribonucleotide
  modified_base 48: mod_base = OTHER; note = 2'-O-methyl ribonucleotide
  modified_base 50: mod_base = OTHER; note = 2'-O-methyl ribonucleotide
  modified_base 52: mod_base = OTHER; note = 2'-O-methyl ribonucleotide
  modified_base 53: mod_base = OTHER; note = 2'-O-methyl ribonucleotide
  modified_base 54: mod_base = OTHER; note = 2'-O-methyl ribonucleotide
  modified_base 55: mod_base = OTHER; note = 2'-O-methyl ribonucleotide
  modified_base 56: mod_base = OTHER; note = 2'-O-methyl ribonucleotide
  modified_base 57: mod_base = OTHER; note = 2'-O-methyl ribonucleotide
  modified_base 60: mod_base = OTHER; note = 2'-O-methyl ribonucleotide
  modified_base 61: mod_base = OTHER; note = 2'-O-methyl ribonucleotide
  modified_base 66: mod_base = OTHER; note = 2'-O-methyl ribonucleotide
  modified_base 67: mod_base = OTHER; note = 2'-O-methyl ribonucleotide
  modified_base 70: mod_base = OTHER; note = 2'-O-methyl ribonucleotide
  modified_base 71: mod_base = OTHER; note = 2'-O-methyl ribonucleotide
  modified_base 72: mod_base = OTHER; note = 2'-O-methyl ribonucleotide
  modified_base 73: mod_base = OTHER; note = 2'-O-methyl ribonucleotide
  modified_base 74: mod_base = OTHER; note = 2'-O-methyl ribonucleotide
  modified_base 75: mod_base = OTHER; note = 2'-O-methyl ribonucleotide
  modified_base 76: mod_base = OTHER; note = 2'-O-methyl ribonucleotide
  modified_base 77: mod_base = OTHER; note = 2'-O-methyl ribonucleotide
  modified_base 78: mod_base = OTHER; note = 2'-O-methyl ribonucleotide
  modified_base 79: mod_base = OTHER; note = 2'-O-methyl ribonucleotide
  modified_base 80: mod_base = OTHER; note = 2'-O-methyl ribonucleotide
  modified_base 81: mod_base = OTHER; note = 2'-O-methyl ribonucleotide
  modified_base 83: mod_base = OTHER; note = 2'-O-methyl ribonucleotide
  modified_base 84: mod_base = OTHER; note = 2'-O-methyl ribonucleotide
  modified_base 85: mod_base = OTHER; note = 2'-O-methyl ribonucleotide
  modified_base 86: mod_base = OTHER; note = 2'-O-methyl ribonucleotide
  modified_base 87: mod_base = OTHER; note = 2'-O-methyl ribonucleotide
  modified_base 88: mod_base = OTHER; note = 2'-O-methyl ribonucleotide
  modified_base 89: mod_base = OTHER; note = 2'-O-methyl ribonucleotide
  modified_base 90: mod_base = OTHER; note = 2'-O-methyl ribonucleotide
  modified_base 91: mod_base = OTHER; note = 2'-O-methyl ribonucleotide
  modified_base 92: mod_base = OTHER; note = 2'-O-methyl ribonucleotide
  modified_base 93: mod_base = OTHER; note = 2'-O-methyl ribonucleotide
  modified_base 94: mod_base = OTHER; note = 2'-O-methyl ribonucleotide
  modified_base 95: mod_base = OTHER; note = 2'-O-methyl ribonucleotide
  modified_base 96: mod_base = OTHER; note = 2'-O-methyl ribonucleotide
  modified_base 97: mod_base = OTHER; note = 2'-O-methyl ribonucleotide
  modified_base 98: mod_base = OTHER; note = 2'-O-methyl ribonucleotide
  modified_base 99: mod_base = OTHER; note = 2'-O-methyl ribonucleotide
  modified_base 100: mod_base = OTHER; note = 2'-O-methyl ribonucleotide
  modified_base 65: mod_base = OTHER; note = nebularine
  modified_base 1..4: mod_base = OTHER; note = phosphorothioate linkage
  modified_base 97..100: mod_base = OTHER; note = phosphorothioate linkage
caggttccatgggatgctctgttttagagctagaaatagcaagttaaaataaggctagtccgttntcaacttgaaaaagtggcaccgagtcggtgctttt

SEQ ID NO: 1903 - RNA, 100 nt, synthetic construct
  source 1..100: mol_type = other RNA
  modified_base 1: mod_base = OTHER; note = 2'-O-methyl ribonucleotide
  modified_base 2: mod_base = OTHER; note = 2'-O-methyl ribonucleotide
  modified_base 3: mod_base = OTHER; note = 2'-O-methyl ribonucleotide
  modified_base 21: mod_base = OTHER; note = 2'-O-methyl ribonucleotide
  modified_base 28: mod_base = OTHER; note = 2'-O-methyl ribonucleotide
  modified_base 29: mod_base = OTHER; note = 2'-O-methyl ribonucleotide
  modified_base 30: mod_base = OTHER; note = 2'-O-methyl ribonucleotide
  modified_base 31: mod_base = OTHER; note = 2'-O-methyl ribonucleotide
  modified_base 32: mod_base = OTHER; note = 2'-O-methyl ribonucleotide
  modified_base 33: mod_base = OTHER; note = 2'-O-methyl ribonucleotide
  modified_base 35: mod_base = OTHER; note = 2'-O-methyl ribonucleotide
  modified_base 36: mod_base = OTHER; note = 2'-O-methyl ribonucleotide
  modified_base 37: mod_base = OTHER; note = 2'-O-methyl ribonucleotide
  modified_base 38: mod_base = OTHER; note = 2'-O-methyl ribonucleotide
  modified_base 39: mod_base = OTHER; note = 2'-O-methyl ribonucleotide
  modified_base 40: mod_base = OTHER; note = 2'-O-methyl ribonucleotide
  modified_base 41: mod_base = OTHER; note = 2'-O-methyl ribonucleotide
  modified_base 42: mod_base = OTHER; note = 2'-O-methyl ribonucleotide
  modified_base 46: mod_base = OTHER; note = 2'-O-methyl ribonucleotide
  modified_base 48: mod_base = OTHER; note = 2'-O-methyl ribonucleotide
  modified_base 50: mod_base = OTHER; note = 2'-O-methyl ribonucleotide
  modified_base 52: mod_base = OTHER; note = 2'-O-methyl ribonucleotide
  modified_base 53: mod_base = OTHER; note = 2'-O-methyl ribonucleotide
  modified_base 54: mod_base = OTHER; note = 2'-O-methyl ribonucleotide
  modified_base 55: mod_base = OTHER; note = 2'-O-methyl ribonucleotide
  modified_base 56: mod_base = OTHER; note = 2'-O-methyl ribonucleotide
  modified_base 60: mod_base = OTHER; note = 2'-O-methyl ribonucleotide
  modified_base 61: mod_base = OTHER; note = 2'-O-methyl ribonucleotide
  modified_base 66: mod_base = OTHER; note = 2'-O-methyl ribonucleotide
  modified_base 67: mod_base = OTHER; note = 2'-O-methyl ribonucleotide
  modified_base 70: mod_base = OTHER; note = 2'-O-methyl ribonucleotide
  modified_base 71: mod_base = OTHER; note = 2'-O-methyl ribonucleotide
  modified_base 72: mod_base = OTHER; note = 2'-O-methyl ribonucleotide
  modified_base 73: mod_base = OTHER; note = 2'-O-methyl ribonucleotide
  modified_base 74: mod_base = OTHER; note = 2'-O-methyl ribonucleotide
  modified_base 75: mod_base = OTHER; note = 2'-O-methyl ribonucleotide
  modified_base 76: mod_base = OTHER; note = 2'-O-methyl ribonucleotide
  modified_base 77: mod_base = OTHER; note = 2'-O-methyl ribonucleotide
  modified_base 78: mod_base = OTHER; note = 2'-O-methyl ribonucleotide
  modified_base 79: mod_base = OTHER; note = 2'-O-methyl ribonucleotide
  modified_base 80: mod_base = OTHER; note = 2'-O-methyl ribonucleotide
  modified_base 81: mod_base = OTHER; note = 2'-O-methyl ribonucleotide
  modified_base 83: mod_base = OTHER; note = 2'-O-methyl ribonucleotide
  modified_base 84: mod_base = OTHER; note = 2'-O-methyl ribonucleotide
  modified_base 85: mod_base = OTHER; note = 2'-O-methyl ribonucleotide
  modified_base 86: mod_base = OTHER; note = 2'-O-methyl ribonucleotide
  modified_base 87: mod_base = OTHER; note = 2'-O-methyl ribonucleotide
  modified_base 88: mod_base = OTHER; note = 2'-O-methyl ribonucleotide
  modified_base 89: mod_base = OTHER; note = 2'-O-methyl ribonucleotide
  modified_base 90: mod_base = OTHER; note = 2'-O-methyl ribonucleotide
  modified_base 91: mod_base = OTHER; note = 2'-O-methyl ribonucleotide
  modified_base 92: mod_base = OTHER; note = 2'-O-methyl ribonucleotide
  modified_base 93: mod_base = OTHER; note = 2'-O-methyl ribonucleotide
  modified_base 94: mod_base = OTHER; note = 2'-O-methyl ribonucleotide
  modified_base 95: mod_base = OTHER; note = 2'-O-methyl ribonucleotide
  modified_base 96: mod_base = OTHER; note = 2'-O-methyl ribonucleotide
  modified_base 97: mod_base = OTHER; note = 2'-O-methyl ribonucleotide
  modified_base 98: mod_base = OTHER; note = 2'-O-methyl ribonucleotide
  modified_base 99: mod_base = OTHER; note = 2'-O-methyl ribonucleotide
  modified_base 100: mod_base = OTHER; note = 2'-O-methyl ribonucleotide
  modified_base 34: mod_base = OTHER; note = nebularine
  modified_base 57: mod_base = OTHER; note = nebularine
  modified_base 65: mod_base = OTHER; note = nebularine
  modified_base 1..4: mod_base = OTHER; note = phosphorothioate linkage
  modified_base 97..100: mod_base = OTHER; note = phosphorothioate linkage
caggttccatgggatgctctgttttagagctagnaatagcaagttaaaataaggctngtccgttntcaacttgaaaaagtggcaccgagtcggtgctttt

SEQ ID NO: 1904 - RNA, 100 nt, synthetic construct
  source 1..100: mol_type = other RNA
  modified_base 1: mod_base = OTHER; note = 2'-O-methyl ribonucleotide
  modified_base 2: mod_base = OTHER; note = 2'-O-methyl ribonucleotide
  modified_base 3: mod_base = OTHER; note = 2'-O-methyl ribonucleotide
  modified_base 21: mod_base = OTHER; note = 2'-O-methyl ribonucleotide
  modified_base 29: mod_base = OTHER; note = 2'-O-methyl ribonucleotide
  modified_base 30: mod_base = OTHER; note = 2'-O-methyl ribonucleotide
  modified_base 31: mod_base = OTHER; note = 2'-O-methyl ribonucleotide
  modified_base 32: mod_base = OTHER; note = 2'-O-methyl ribonucleotide
  modified_base 33: mod_base = OTHER; note = 2'-O-methyl ribonucleotide
  modified_base 35: mod_base = OTHER; note = 2'-O-methyl ribonucleotide
  modified_base 36: mod_base = OTHER; note = 2'-O-methyl ribonucleotide
  modified_base 37: mod_base = OTHER; note = 2'-O-methyl ribonucleotide
  modified_base 38: mod_base = OTHER; note = 2'-O-methyl ribonucleotide
  modified_base 39: mod_base = OTHER; note = 2'-O-methyl ribonucleotide
  modified_base 40: mod_base = OTHER; note = 2'-O-methyl ribonucleotide
  modified_base 41: mod_base = OTHER; note = 2'-O-methyl ribonucleotide
  modified_base 46: mod_base = OTHER; note = 2'-O-methyl ribonucleotide
  modified_base 48: mod_base = OTHER; note = 2'-O-methyl ribonucleotide
  modified_base 50: mod_base = OTHER; note = 2'-O-methyl ribonucleotide
  modified_base 52: mod_base = OTHER; note = 2'-O-methyl ribonucleotide
  modified_base 53: mod_base = OTHER; note = 2'-O-methyl ribonucleotide
  modified_base 54: mod_base = OTHER; note = 2'-O-methyl ribonucleotide
  modified_base 55: mod_base = OTHER; note = 2'-O-methyl ribonucleotide
  modified_base 56: mod_base = OTHER; note = 2'-O-methyl ribonucleotide
  modified_base 60: mod_base = OTHER; note = 2'-O-methyl ribonucleotide
  modified_base 61: mod_base = OTHER; note = 2'-O-methyl ribonucleotide
  modified_base 66: mod_base = OTHER; note = 2'-O-methyl ribonucleotide
  modified_base 67: mod_base = OTHER; note = 2'-O-methyl ribonucleotide
  modified_base 70: mod_base = OTHER; note = 2'-O-methyl ribonucleotide
  modified_base 71: mod_base = OTHER; note = 2'-O-methyl ribonucleotide
  modified_base 72: mod_base = OTHER; note = 2'-O-methyl ribonucleotide
  modified_base 73: mod_base = OTHER; note = 2'-O-methyl ribonucleotide
  modified_base 74: mod_base = OTHER; note = 2'-O-methyl ribonucleotide
  modified_base 75: mod_base = OTHER; note = 2'-O-methyl ribonucleotide
  modified_base 76: mod_base = OTHER; note = 2'-O-methyl ribonucleotide
  modified_base 77: mod_base = OTHER; note = 2'-O-methyl ribonucleotide
  modified_base 78: mod_base = OTHER; note = 2'-O-methyl ribonucleotide
  modified_base 79: mod_base = OTHER; note = 2'-O-methyl ribonucleotide
  modified_base 80: mod_base = OTHER; note = 2'-O-methyl ribonucleotide
  modified_base 81: mod_base = OTHER; note = 2'-O-methyl ribonucleotide
  modified_base 83: mod_base = OTHER; note = 2'-O-methyl ribonucleotide
  modified_base 84: mod_base = OTHER; note = 2'-O-methyl ribonucleotide
  modified_base 85: mod_base = OTHER; note = 2'-O-methyl ribonucleotide
  modified_base 86: mod_base = OTHER; note = 2'-O-methyl ribonucleotide
  modified_base 87: mod_base = OTHER; note = 2'-O-methyl ribonucleotide
  modified_base 88: mod_base = OTHER; note = 2'-O-methyl ribonucleotide
  modified_base 89: mod_base = OTHER; note = 2'-O-methyl ribonucleotide
  modified_base 90: mod_base = OTHER; note = 2'-O-methyl ribonucleotide
  modified_base 91: mod_base = OTHER; note = 2'-O-methyl ribonucleotide
  modified_base 92: mod_base = OTHER; note = 2'-O-methyl ribonucleotide
  modified_base 93: mod_base = OTHER; note = 2'-O-methyl ribonucleotide
  modified_base 94: mod_base = OTHER; note = 2'-O-methyl ribonucleotide
  modified_base 95: mod_base = OTHER; note = 2'-O-methyl ribonucleotide
  modified_base 96: mod_base = OTHER; note = 2'-O-methyl ribonucleotide
  modified_base 97: mod_base = OTHER; note = 2'-O-methyl ribonucleotide
  modified_base 98: mod_base = OTHER; note = 2'-O-methyl ribonucleotide
  modified_base 99: mod_base = OTHER; note = 2'-O-methyl ribonucleotide
  modified_base 100: mod_base = OTHER; note = 2'-O-methyl ribonucleotide
  modified_base 28: mod_base = OTHER; note = nebularine
  modified_base 34: mod_base = OTHER; note = nebularine
  modified_base 42: mod_base = OTHER; note = nebularine
  modified_base 57: mod_base = OTHER; note = nebularine
  modified_base 65: mod_base = OTHER; note = nebularine
  modified_base 1..4: mod_base = OTHER; note = phosphorothioate linkage
  modified_base 97..100: mod_base = OTHER; note = phosphorothioate linkage
caggttccatgggatgctctgttttagngctagnaatagcangttaaaataaggctngtccgttntcaacttgaaaaagtggcaccgagtcggtgctttt

SEQ ID NO: 1905 - RNA, 100 nt, synthetic construct
  source 1..100: mol_type = other RNA
  modified_base 1: mod_base = OTHER; note = 2'-O-methyl ribonucleotide
  modified_base 2: mod_base = OTHER; note = 2'-O-methyl ribonucleotide
  modified_base 3: mod_base = OTHER; note = 2'-O-methyl ribonucleotide
  modified_base 21: mod_base = OTHER; note = 2'-O-methyl ribonucleotide
  modified_base 28: mod_base = OTHER; note = 2'-O-methyl ribonucleotide
  modified_base 29: mod_base = OTHER; note = 2'-O-methyl ribonucleotide
  modified_base 30: mod_base = OTHER; note = 2'-O-methyl ribonucleotide
  modified_base 31: mod_base = OTHER; note = 2'-O-methyl ribonucleotide
  modified_base 32: mod_base = OTHER; note = 2'-O-methyl ribonucleotide
  modified_base 33: mod_base = OTHER; note = 2'-O-methyl ribonucleotide
  modified_base 35: mod_base = OTHER; note = 2'-O-methyl ribonucleotide
  modified_base 36: mod_base = OTHER; note = 2'-O-methyl ribonucleotide
  modified_base 37: mod_base = OTHER; note = 2'-O-methyl ribonucleotide
  modified_base 38: mod_base = OTHER; note = 2'-O-methyl ribonucleotide
  modified_base 39: mod_base = OTHER; note = 2'-O-methyl ribonucleotide
  modified_base 40: mod_base = OTHER; note = 2'-O-methyl ribonucleotide
  modified_base 41: mod_base = OTHER; note = 2'-O-methyl ribonucleotide
  modified_base 42: mod_base = OTHER; note = 2'-O-methyl ribonucleotide
  modified_base 46: mod_base = OTHER; note = 2'-O-methyl ribonucleotide
  modified_base 48: mod_base = OTHER; note = 2'-O-methyl ribonucleotide
  modified_base 50: mod_base = OTHER; note = 2'-O-methyl ribonucleotide
  modified_base 52: mod_base = OTHER; note = 2'-O-methyl ribonucleotide
  modified_base 53: mod_base = OTHER; note = 2'-O-methyl ribonucleotide
  modified_base 54: mod_base = OTHER; note = 2'-O-methyl ribonucleotide
  modified_base 55: mod_base = OTHER; note = 2'-O-methyl ribonucleotide
  modified_base 56: mod_base = OTHER; note = 2'-O-methyl ribonucleotide
  modified_base 57: mod_base = OTHER; note = 2'-O-methyl ribonucleotide
  modified_base 60: mod_base = OTHER; note = 2'-O-methyl ribonucleotide
  modified_base 61: mod_base = OTHER; note = 2'-O-methyl ribonucleotide
  modified_base 66: mod_base = OTHER; note = 2'-O-methyl ribonucleotide
  modified_base 67: mod_base = OTHER; note = 2'-O-methyl ribonucleotide
  modified_base 70: mod_base = OTHER; note = 2'-O-methyl ribonucleotide
  modified_base 71: mod_base = OTHER; note = 2'-O-methyl ribonucleotide
  modified_base 72: mod_base = OTHER; note = 2'-O-methyl ribonucleotide
  modified_base 73: mod_base = OTHER; note = 2'-O-methyl ribonucleotide
  modified_base 74: mod_base = OTHER; note = 2'-O-methyl ribonucleotide
  modified_base 75: mod_base = OTHER; note = 2'-O-methyl ribonucleotide
  modified_base 76: mod_base = OTHER; note = 2'-O-methyl ribonucleotide
  modified_base 77: mod_base = OTHER; note = 2'-O-methyl ribonucleotide
  modified_base 78: mod_base = OTHER; note = 2'-O-methyl ribonucleotide
  modified_base 79: mod_base = OTHER; note = 2'-O-methyl ribonucleotide
  modified_base 80: mod_base = OTHER; note = 2'-O-methyl ribonucleotide
  modified_base 81: mod_base = OTHER; note = 2'-O-methyl ribonucleotide
  modified_base 83: mod_base = OTHER; note = 2'-O-methyl ribonucleotide
  modified_base 84: mod_base = OTHER; note = 2'-O-methyl ribonucleotide
  modified_base 85: mod_base = OTHER; note = 2'-O-methyl ribonucleotide
  modified_base 86: mod_base = OTHER; note = 2'-O-methyl ribonucleotide
  modified_base 87: mod_base = OTHER; note = 2'-O-methyl ribonucleotide
  modified_base 88: mod_base = OTHER; note = 2'-O-methyl ribonucleotide
  modified_base 89: mod_base = OTHER; note = 2'-O-methyl ribonucleotide
  modified_base 90: mod_base = OTHER; note = 2'-O-methyl ribonucleotide
  modified_base 91: mod_base = OTHER; note = 2'-O-methyl ribonucleotide
  modified_base 92: mod_base = OTHER; note = 2'-O-methyl ribonucleotide
  modified_base 93: mod_base = OTHER; note = 2'-O-methyl ribonucleotide
  modified_base 94: mod_base = OTHER; note = 2'-O-methyl ribonucleotide
  modified_base 95: mod_base = OTHER; note = 2'-O-methyl ribonucleotide
  modified_base 96: mod_base = OTHER; note = 2'-O-methyl ribonucleotide
  modified_base 97: mod_base = OTHER; note = 2'-O-methyl ribonucleotide
  modified_base 98: mod_base = OTHER; note = 2'-O-methyl ribonucleotide
  modified_base 99: mod_base = OTHER; note = 2'-O-methyl ribonucleotide
  modified_base 100: mod_base = OTHER; note = 2'-O-methyl ribonucleotide
  modified_base 9: mod_base = OTHER; note = nebularine
  modified_base 14: mod_base = OTHER; note = nebularine
  modified_base 34: mod_base = OTHER; note = nebularine
  modified_base 1..4: mod_base = OTHER; note = phosphorothioate linkage
  modified_base 97..100: mod_base = OTHER; note = phosphorothioate linkage
caggttccntgggntgctctgttttagagctagnaatagcaagttaaaataaggctagtccgttatcaacttgaaaaagtggcaccgagtcggtgctttt

SEQ ID NO: 1906 - RNA, 100 nt, synthetic construct
  source 1..100: mol_type = other RNA
  modified_base 1: mod_base = OTHER; note = 2'-O-methyl ribonucleotide
  modified_base 2: mod_base = OTHER; note = 2'-O-methyl ribonucleotide
  modified_base 3: mod_base = OTHER; note = 2'-O-methyl ribonucleotide
  modified_base 21: mod_base = OTHER; note = 2'-O-methyl ribonucleotide
  modified_base 28: mod_base = OTHER; note = 2'-O-methyl ribonucleotide
  modified_base 29: mod_base = OTHER; note = 2'-O-methyl ribonucleotide
  modified_base 30: mod_base = OTHER; note = 2'-O-methyl ribonucleotide
  modified_base 31: mod_base = OTHER; note = 2'-O-methyl ribonucleotide
  modified_base 32: mod_base = OTHER; note = 2'-O-methyl ribonucleotide
  modified_base 33: mod_base = OTHER; note = 2'-O-methyl ribonucleotide
  modified_base 35: mod_base = OTHER; note = 2'-O-methyl ribonucleotide
  modified_base 36: mod_base = OTHER; note = 2'-O-methyl ribonucleotide
  modified_base 37: mod_base = OTHER; note = 2'-O-methyl ribonucleotide
  modified_base 38: mod_base = OTHER; note = 2'-O-methyl ribonucleotide
  modified_base 39: mod_base = OTHER; note = 2'-O-methyl ribonucleotide
  modified_base 40: mod_base = OTHER; note = 2'-O-methyl ribonucleotide
  modified_base 41: mod_base = OTHER; note = 2'-O-methyl ribonucleotide
  modified_base 42: mod_base = OTHER; note = 2'-O-methyl ribonucleotide
  modified_base 46: mod_base = OTHER; note = 2'-O-methyl ribonucleotide
  modified_base 48: mod_base = OTHER; note = 2'-O-methyl ribonucleotide
  modified_base 50: mod_base = OTHER; note = 2'-O-methyl ribonucleotide
  modified_base 52: mod_base = OTHER; note = 2'-O-methyl ribonucleotide
  modified_base 53: mod_base = OTHER; note = 2'-O-methyl ribonucleotide
  modified_base 54: mod_base = OTHER; note = 2'-O-methyl ribonucleotide
  modified_base 55: mod_base = OTHER; note = 2'-O-methyl ribonucleotide
  modified_base 56: mod_base = OTHER; note = 2'-O-methyl ribonucleotide
  modified_base 60: mod_base = OTHER; note = 2'-O-methyl ribonucleotide
  modified_base 61: mod_base = OTHER; note = 2'-O-methyl ribonucleotide
  modified_base 66: mod_base = OTHER; note = 2'-O-methyl ribonucleotide
  modified_base 67: mod_base = OTHER; note = 2'-O-methyl ribonucleotide
  modified_base 70: mod_base = OTHER; note = 2'-O-methyl ribonucleotide
  modified_base 71: mod_base = OTHER; note = 2'-O-methyl ribonucleotide
  modified_base 72: mod_base = OTHER; note = 2'-O-methyl ribonucleotide
  modified_base 73: mod_base = OTHER; note = 2'-O-methyl ribonucleotide
  modified_base 74: mod_base = OTHER; note = 2'-O-methyl ribonucleotide
  modified_base 75: mod_base = OTHER; note = 2'-O-methyl ribonucleotide
  modified_base 76: mod_base = OTHER; note = 2'-O-methyl ribonucleotide
  modified_base 77: mod_base = OTHER; note = 2'-O-methyl ribonucleotide
  modified_base 78: mod_base = OTHER; note = 2'-O-methyl ribonucleotide
  modified_base 79: mod_base = OTHER; note = 2'-O-methyl ribonucleotide
  modified_base 80: mod_base = OTHER; note = 2'-O-methyl ribonucleotide
  modified_base 81: mod_base = OTHER; note = 2'-O-methyl ribonucleotide
  modified_base 83: mod_base = OTHER; note = 2'-O-methyl ribonucleotide
  modified_base 84: mod_base = OTHER; note = 2'-O-methyl ribonucleotide
  modified_base 85: mod_base = OTHER; note = 2'-O-methyl ribonucleotide
  modified_base 86: mod_base = OTHER; note = 2'-O-methyl ribonucleotide
  modified_base 87: mod_base = OTHER; note = 2'-O-methyl ribonucleotide
  modified_base 88: mod_base = OTHER; note = 2'-O-methyl ribonucleotide
  modified_base 89: mod_base = OTHER; note = 2'-O-methyl ribonucleotide
  modified_base 90: mod_base = OTHER; note = 2'-O-methyl ribonucleotide
  modified_base 91: mod_base = OTHER; note = 2'-O-methyl ribonucleotide
  modified_base 92: mod_base = OTHER; note = 2'-O-methyl ribonucleotide
  modified_base 93: mod_base = OTHER; note = 2'-O-methyl ribonucleotide
  modified_base 94: mod_base = OTHER; note = 2'-O-methyl ribonucleotide
  modified_base 95: mod_base = OTHER; note = 2'-O-methyl ribonucleotide
  modified_base 96: mod_base = OTHER; note = 2'-O-methyl ribonucleotide
  modified_base 97: mod_base = OTHER; note = 2'-O-methyl ribonucleotide
  modified_base 98: mod_base = OTHER; note = 2'-O-methyl ribonucleotide
  modified_base 99: mod_base = OTHER; note = 2'-O-methyl ribonucleotide
  modified_base 100: mod_base = OTHER; note = 2'-O-methyl ribonucleotide
  modified_base 9: mod_base = OTHER; note = nebularine
  modified_base 14: mod_base = OTHER; note = nebularine
  modified_base 34: mod_base = OTHER; note = nebularine
  modified_base 57: mod_base = OTHER; note = nebularine
  modified_base 1..4: mod_base = OTHER; note = phosphorothioate linkage
  modified_base 97..100: mod_base = OTHER; note = phosphorothioate linkage
caggttccntgggntgctctgttttagagctagnaatagcaagttaaaataaggctngtccgttatcaacttgaaaaagtggcaccgagtcggtgctttt

SEQ ID NO: 1907 - RNA, 100 nt, synthetic construct
  source 1..100: mol_type = other RNA
  modified_base 1: mod_base = OTHER; note = 2'-O-methyl ribonucleotide
  modified_base 2: mod_base = OTHER; note = 2'-O-methyl ribonucleotide
  modified_base 3: mod_base = OTHER; note = 2'-O-methyl ribonucleotide
  modified_base 21: mod_base = OTHER; note = 2'-O-methyl ribonucleotide
  modified_base 28: mod_base = OTHER; note = 2'-O-methyl ribonucleotide
  modified_base 29: mod_base = OTHER; note = 2'-O-methyl ribonucleotide
  modified_base 30: mod_base = OTHER; note = 2'-O-methyl ribonucleotide
  modified_base 31: mod_base = OTHER; note = 2'-O-methyl ribonucleotide
  modified_base 32: mod_base = OTHER; note = 2'-O-methyl ribonucleotide
  modified_base 33: mod_base = OTHER; note = 2'-O-methyl ribonucleotide
  modified_base 34: mod_base = OTHER; note = 2'-O-methyl ribonucleotide
  modified_base 35: mod_base = OTHER; note = 2'-O-methyl ribonucleotide
  modified_base 36: mod_base = OTHER; note = 2'-O-methyl ribonucleotide
  modified_base 37: mod_base = OTHER; note = 2'-O-methyl ribonucleotide
  modified_base 38: mod_base = OTHER; note = 2'-O-methyl ribonucleotide
  modified_base 39: mod_base = OTHER; note = 2'-O-methyl ribonucleotide
  modified_base 40: mod_base = OTHER; note = 2'-O-methyl ribonucleotide
  modified_base 41: mod_base = OTHER; note = 2'-O-methyl ribonucleotide
  modified_base 42: mod_base = OTHER; note = 2'-O-methyl ribonucleotide
  modified_base 46: mod_base = OTHER; note = 2'-O-methyl ribonucleotide
  modified_base 48: mod_base = OTHER; note = 2'-O-methyl ribonucleotide
  modified_base 50: mod_base = OTHER; note = 2'-O-methyl ribonucleotide
  modified_base 52: mod_base = OTHER; note = 2'-O-methyl ribonucleotide
  modified_base 53: mod_base = OTHER; note = 2'-O-methyl ribonucleotide
  modified_base 54: mod_base = OTHER; note = 2'-O-methyl ribonucleotide
  modified_base 55: mod_base = OTHER; note = 2'-O-methyl ribonucleotide
  modified_base 56: mod_base = OTHER; note = 2'-O-methyl ribonucleotide
  modified_base 57: mod_base = OTHER; note = 2'-O-methyl ribonucleotide
  modified_base 60: mod_base = OTHER; note = 2'-O-methyl ribonucleotide
  modified_base 61: mod_base = OTHER; note = 2'-O-methyl ribonucleotide
  modified_base 66: mod_base = OTHER; note = 2'-O-methyl ribonucleotide
  modified_base 67: mod_base = OTHER; note = 2'-O-methyl ribonucleotide
  modified_base 70: mod_base = OTHER; note = 2'-O-methyl ribonucleotide
  modified_base 71: mod_base = OTHER; note = 2'-O-methyl ribonucleotide
  modified_base 72: mod_base = OTHER; note = 2'-O-methyl ribonucleotide
  modified_base 73: mod_base = OTHER; note = 2'-O-methyl ribonucleotide
  modified_base 74: mod_base = OTHER; note = 2'-O-methyl ribonucleotide
  modified_base 75: mod_base = OTHER; note = 2'-O-methyl ribonucleotide
  modified_base 76: mod_base = OTHER; note = 2'-O-methyl ribonucleotide
  modified_base 77: mod_base = OTHER; note = 2'-O-methyl ribonucleotide
  modified_base 78: mod_base = OTHER; note = 2'-O-methyl ribonucleotide
  modified_base 79: mod_base = OTHER; note = 2'-O-methyl ribonucleotide
  modified_base 80: mod_base = OTHER; note = 2'-O-methyl ribonucleotide
  modified_base 81: mod_base = OTHER; note = 2'-O-methyl ribonucleotide
  modified_base 83: mod_base = OTHER; note = 2'-O-methyl ribonucleotide
  modified_base 84: mod_base = OTHER; note = 2'-O-methyl ribonucleotide
  modified_base 85: mod_base = OTHER; note = 2'-O-methyl ribonucleotide
  modified_base 86: mod_base = OTHER; note = 2'-O-methyl ribonucleotide
  modified_base 87: mod_base = OTHER; note = 2'-O-methyl ribonucleotide
  modified_base 88: mod_base = OTHER; note = 2'-O-methyl ribonucleotide
  modified_base 89: mod_base = OTHER; note = 2'-O-methyl ribonucleotide
  modified_base 90: mod_base = OTHER; note = 2'-O-methyl ribonucleotide
  modified_base 91: mod_base = OTHER; note = 2'-O-methyl ribonucleotide
  modified_base 92: mod_base = OTHER; note = 2'-O-methyl ribonucleotide
  modified_base 93: mod_base = OTHER; note = 2'-O-methyl ribonucleotide
  modified_base 94: mod_base = OTHER; note = 2'-O-methyl ribonucleotide
  modified_base 95: mod_base = OTHER; note = 2'-O-methyl ribonucleotide
  modified_base 96: mod_base = OTHER; note = 2'-O-methyl ribonucleotide
  modified_base 97: mod_base = OTHER; note = 2'-O-methyl ribonucleotide
  modified_base 98: mod_base = OTHER; note = 2'-O-methyl ribonucleotide
  modified_base 99: mod_base = OTHER; note = 2'-O-methyl ribonucleotide
  modified_base 100: mod_base = OTHER; note = 2'-O-methyl ribonucleotide
  modified_base 9: mod_base = OTHER; note = nebularine
  modified_base 14: mod_base = OTHER; note = nebularine
  modified_base 65: mod_base = OTHER; note = nebularine
  modified_base 1..4: mod_base = OTHER; note = phosphorothioate linkage
  modified_base 97..100: mod_base = OTHER; note = phosphorothioate linkage
caggttccntgggntgctctgttttagagctagaaatagcaagttaaaataaggctagtccgttntcaacttgaaaaagtggcaccgagtcggtgctttt

SEQ ID NO: 1908 - RNA, 100 nt, synthetic construct
  source 1..100: mol_type = other RNA
  modified_base 1: mod_base = OTHER; note = 2'-O-methyl ribonucleotide
  modified_base 2: mod_base = OTHER; note = 2'-O-methyl ribonucleotide
  modified_base 3: mod_base = OTHER; note = 2'-O-methyl ribonucleotide
  modified_base 21: mod_base = OTHER; note = 2'-O-methyl ribonucleotide
  modified_base 28: mod_base = OTHER; note = 2'-O-methyl ribonucleotide
  modified_base 29: mod_base = OTHER; note = 2'-O-methyl ribonucleotide
  modified_base 30: mod_base = OTHER; note = 2'-O-methyl ribonucleotide
  modified_base 31: mod_base = OTHER; note = 2'-O-methyl ribonucleotide
  modified_base 32: mod_base = OTHER; note = 2'-O-methyl ribonucleotide
  modified_base 33: mod_base = OTHER; note = 2'-O-methyl ribonucleotide
  modified_base 35: mod_base = OTHER; note = 2'-O-methyl ribonucleotide
  modified_base 36: mod_base = OTHER; note = 2'-O-methyl ribonucleotide
  modified_base 37: mod_base = OTHER; note = 2'-O-methyl ribonucleotide
  modified_base 38: mod_base = OTHER; note = 2'-O-methyl ribonucleotide
  modified_base 39: mod_base = OTHER; note = 2'-O-methyl ribonucleotide
  modified_base 40: mod_base = OTHER; note = 2'-O-methyl ribonucleotide
  modified_base 41: mod_base = OTHER; note = 2'-O-methyl ribonucleotide
  modified_base 42: mod_base = OTHER; note = 2'-O-methyl ribonucleotide
  modified_base 46: mod_base = OTHER; note = 2'-O-methyl ribonucleotide
  modified_base 48: mod_base = OTHER; note = 2'-O-methyl ribonucleotide
  modified_base 50: mod_base = OTHER; note = 2'-O-methyl ribonucleotide
  modified_base 52: mod_base = OTHER; note = 2'-O-methyl ribonucleotide
  modified_base 53: mod_base = OTHER; note = 2'-O-methyl ribonucleotide
  modified_base 54: mod_base = OTHER; note = 2'-O-methyl ribonucleotide
  modified_base 55: mod_base = OTHER; note = 2'-O-methyl ribonucleotide
  modified_base 56: mod_base = OTHER; note = 2'-O-methyl ribonucleotide
  modified_base 60: mod_base = OTHER; note = 2'-O-methyl ribonucleotide
  modified_base 61: mod_base = OTHER; note = 2'-O-methyl ribonucleotide
  modified_base 66: mod_base = OTHER; note = 2'-O-methyl ribonucleotide
  modified_base 67: mod_base = OTHER; note = 2'-O-methyl ribonucleotide
  modified_base 70: mod_base = OTHER; note = 2'-O-methyl ribonucleotide
  modified_base 71: mod_base = OTHER; note = 2'-O-methyl ribonucleotide
  modified_base 72: mod_base = OTHER; note = 2'-O-methyl ribonucleotide
  modified_base 73: mod_base = OTHER; note = 2'-O-methyl ribonucleotide
  modified_base 74: mod_base = OTHER; note = 2'-O-methyl ribonucleotide
  modified_base 75: mod_base = OTHER; note = 2'-O-methyl ribonucleotide
  modified_base 76: mod_base = OTHER; note = 2'-O-methyl ribonucleotide
  modified_base 77: mod_base = OTHER; note = 2'-O-methyl ribonucleotide
  modified_base 78: mod_base = OTHER; note = 2'-O-methyl ribonucleotide
  modified_base 79: mod_base = OTHER; note = 2'-O-methyl ribonucleotide
  modified_base 80: mod_base = OTHER; note = 2'-O-methyl ribonucleotide
  modified_base 81: mod_base = OTHER; note = 2'-O-methyl ribonucleotide
  modified_base 83: mod_base = OTHER; note = 2'-O-methyl ribonucleotide
  modified_base 84: mod_base = OTHER; note = 2'-O-methyl ribonucleotide
  modified_base 85: mod_base = OTHER; note = 2'-O-methyl ribonucleotide
  modified_base 86: mod_base = OTHER; note = 2'-O-methyl ribonucleotide
  modified_base 87: mod_base = OTHER; note = 2'-O-methyl ribonucleotide
  modified_base 88: mod_base = OTHER; note = 2'-O-methyl ribonucleotide
  modified_base 89: mod_base = OTHER; note = 2'-O-methyl ribonucleotide
  modified_base 90: mod_base = OTHER; note = 2'-O-methyl ribonucleotide
  modified_base 91: mod_base = OTHER; note = 2'-O-methyl ribonucleotide
  modified_base 92: mod_base = OTHER; note = 2'-O-methyl ribonucleotide
  modified_base 93: mod_base = OTHER; note = 2'-O-methyl ribonucleotide
  modified_base 94: mod_base = OTHER; note = 2'-O-methyl ribonucleotide
  modified_base 95: mod_base = OTHER; note = 2'-O-methyl ribonucleotide
  modified_base 96: mod_base = OTHER; note = 2'-O-methyl ribonucleotide
  modified_base 97: mod_base = OTHER; note = 2'-O-methyl ribonucleotide
  modified_base 98: mod_base = OTHER; note = 2'-O-methyl ribonucleotide
  modified_base 99: mod_base = OTHER; note = 2'-O-methyl ribonucleotide
  modified_base 100: mod_base = OTHER; note = 2'-O-methyl ribonucleotide
  modified_base 9: mod_base = OTHER; note = nebularine
  modified_base 14: mod_base = OTHER; note = nebularine
  modified_base 34: mod_base = OTHER; note = nebularine
  modified_base 57: mod_base = OTHER; note = nebularine
  modified_base 65: mod_base = OTHER; note = nebularine
  modified_base 1..4: mod_base = OTHER; note = phosphorothioate linkage
  modified_base 97..100: mod_base = OTHER; note = phosphorothioate linkage
caggttccntgggntgctctgttttagagctagnaatagcaagttaaaataaggctngtccgttntcaacttgaaaaagtggcaccgagtcggtgctttt

SEQ ID NO: 1909 - RNA, 100 nt, synthetic construct
  source 1..100: mol_type = other RNA
  modified_base 1: mod_base = OTHER; note = 2'-O-methyl ribonucleotide
  modified_base 2: mod_base = OTHER; note = 2'-O-methyl ribonucleotide
  modified_base 3: mod_base = OTHER; note = 2'-O-methyl ribonucleotide
  modified_base 21: mod_base = OTHER; note = 2'-O-methyl ribonucleotide
  modified_base 29: mod_base = OTHER; note = 2'-O-methyl ribonucleotide
  modified_base 30: mod_base = OTHER; note = 2'-O-methyl ribonucleotide
  modified_base 31: mod_base = OTHER; note = 2'-O-methyl ribonucleotide
  modified_base 32: mod_base = OTHER; note = 2'-O-methyl ribonucleotide
  modified_base 33: mod_base = OTHER; note = 2'-O-methyl ribonucleotide
  modified_base 35: mod_base = OTHER; note = 2'-O-methyl ribonucleotide
  modified_base 36: mod_base = OTHER; note = 2'-O-methyl ribonucleotide
  modified_base 37: mod_base = OTHER; note = 2'-O-methyl ribonucleotide
  modified_base 38: mod_base = OTHER; note = 2'-O-methyl ribonucleotide
  modified_base 39: mod_base = OTHER; note = 2'-O-methyl ribonucleotide
  modified_base 40: mod_base = OTHER; note = 2'-O-methyl ribonucleotide
  modified_base 41: mod_base = OTHER; note = 2'-O-methyl ribonucleotide
  modified_base 46: mod_base = OTHER; note = 2'-O-methyl ribonucleotide
  modified_base 48: mod_base = OTHER; note = 2'-O-methyl ribonucleotide
  modified_base 50: mod_base = OTHER; note = 2'-O-methyl ribonucleotide
  modified_base 52: mod_base = OTHER; note = 2'-O-methyl ribonucleotide
  modified_base 53: mod_base = OTHER; note = 2'-O-methyl ribonucleotide
  modified_base 54: mod_base = OTHER; note = 2'-O-methyl ribonucleotide
  modified_base 55: mod_base = OTHER; note = 2'-O-methyl ribonucleotide
  modified_base 56: mod_base = OTHER; note = 2'-O-methyl ribonucleotide
  modified_base 60: mod_base = OTHER; note = 2'-O-methyl ribonucleotide
  modified_base 61: mod_base = OTHER; note = 2'-O-methyl ribonucleotide
  modified_base 66: mod_base = OTHER; note = 2'-O-methyl ribonucleotide
  modified_base 67: mod_base = OTHER; note = 2'-O-methyl ribonucleotide
  modified_base 70: mod_base = OTHER; note = 2'-O-methyl ribonucleotide
  modified_base 71: mod_base = OTHER; note = 2'-O-methyl ribonucleotide
  modified_base 72: mod_base = OTHER; note = 2'-O-methyl ribonucleotide
  modified_base 73: mod_base = OTHER; note = 2'-O-methyl ribonucleotide
  modified_base 74: mod_base = OTHER; note = 2'-O-methyl ribonucleotide
  modified_base 75: mod_base = OTHER; note = 2'-O-methyl ribonucleotide
  modified_base 76: mod_base = OTHER; note = 2'-O-methyl ribonucleotide
  modified_base 77: mod_base = OTHER; note = 2'-O-methyl ribonucleotide
  modified_base 78: mod_base = OTHER; note = 2'-O-methyl ribonucleotide
  modified_base 79: mod_base = OTHER; note = 2'-O-methyl ribonucleotide
  modified_base 80: mod_base = OTHER; note = 2'-O-methyl ribonucleotide
  modified_base 81: mod_base = OTHER; note = 2'-O-methyl ribonucleotide
  modified_base 83: mod_base = OTHER; note = 2'-O-methyl ribonucleotide
  modified_base 84: mod_base = OTHER; note = 2'-O-methyl ribonucleotide
  modified_base 85: mod_base = OTHER; note = 2'-O-methyl ribonucleotide
  modified_base 86: mod_base = OTHER; note = 2'-O-methyl ribonucleotide
  modified_base 87: mod_base = OTHER; note = 2'-O-methyl ribonucleotide
  modified_base 88: mod_base = OTHER; note = 2'-O-methyl ribonucleotide
  modified_base 89: mod_base = OTHER; note = 2'-O-methyl ribonucleotide
  modified_base 90: mod_base = OTHER; note = 2'-O-methyl ribonucleotide
  modified_base 91: mod_base = OTHER; note = 2'-O-methyl ribonucleotide
  modified_base 92: mod_base = OTHER; note = 2'-O-methyl ribonucleotide
  modified_base 93: mod_base = OTHER; note = 2'-O-methyl ribonucleotide
  modified_base 94: mod_base = OTHER; note = 2'-O-methyl ribonucleotide
  modified_base 95: mod_base = OTHER; note = 2'-O-methyl ribonucleotide
  modified_base 96: mod_base = OTHER; note = 2'-O-methyl ribonucleotide
  modified_base 97: mod_base = OTHER; note = 2'-O-methyl ribonucleotide
  modified_base 98: mod_base = OTHER; note = 2'-O-methyl ribonucleotide
  modified_base 99: mod_base = OTHER; note = 2'-O-methyl ribonucleotide
  modified_base 100: mod_base = OTHER; note = 2'-O-methyl ribonucleotide
  modified_base 9: mod_base = OTHER; note = nebularine
  modified_base 14: mod_base = OTHER; note = nebularine
  modified_base 28: mod_base = OTHER; note = nebularine
  modified_base 34: mod_base = OTHER; note = nebularine
  modified_base 42: mod_base = OTHER; note = nebularine
  modified_base 57: mod_base = OTHER; note = nebularine
  modified_base 65: mod_base = OTHER; note = nebularine
  modified_base 1..4: mod_base = OTHER; note = phosphorothioate linkage
  modified_base 97..100: mod_base = OTHER; note = phosphorothioate linkage
caggttccntgggntgctctgttttagngctagnaatagcangttaaaataaggctngtccgttntcaacttgaaaaagtggcaccgagtcggtgctttt

SEQ ID NO: 1910 - RNA, 100 nt, synthetic construct
  source 1..100: mol_type = other RNA
  modified_base 1: mod_base = OTHER; note = 2'-O-methyl ribonucleotide
  modified_base 2: mod_base = OTHER; note = 2'-O-methyl ribonucleotide
  modified_base 3: mod_base = OTHER; note = 2'-O-methyl ribonucleotide
  modified_base 21: mod_base = OTHER; note = 2'-O-methyl ribonucleotide
  modified_base 28: mod_base = OTHER; note = 2'-O-methyl ribonucleotide
  modified_base 29: mod_base = OTHER; note = 2'-O-methyl ribonucleotide
  modified_base 30: mod_base = OTHER; note = 2'-O-methyl ribonucleotide
  modified_base 31: mod_base = OTHER; note = 2'-O-methyl ribonucleotide
  modified_base 32: mod_base = OTHER; note = 2'-O-methyl ribonucleotide
  modified_base 33: mod_base = OTHER; note = 2'-O-methyl ribonucleotide
  modified_base 35: mod_base = OTHER; note = 2'-O-methyl ribonucleotide
  modified_base 36: mod_base = OTHER; note = 2'-O-methyl ribonucleotide
  modified_base 37: mod_base = OTHER; note = 2'-O-methyl ribonucleotide
  modified_base 38: mod_base = OTHER; note = 2'-O-methyl ribonucleotide
  modified_base 39: mod_base = OTHER; note = 2'-O-methyl ribonucleotide
  modified_base 40: mod_base = OTHER; note = 2'-O-methyl ribonucleotide
  modified_base 41: mod_base = OTHER; note = 2'-O-methyl ribonucleotide
  modified_base 42: mod_base = OTHER; note = 2'-O-methyl ribonucleotide
  modified_base 46: mod_base = OTHER; note = 2'-O-methyl ribonucleotide
  modified_base 48: mod_base = OTHER; note = 2'-O-methyl ribonucleotide
  modified_base 50: mod_base = OTHER; note = 2'-O-methyl ribonucleotide
  modified_base 52: mod_base = OTHER; note = 2'-O-methyl ribonucleotide
  modified_base 53: mod_base = OTHER; note = 2'-O-methyl ribonucleotide
  modified_base 54: mod_base = OTHER; note = 2'-O-methyl ribonucleotide
  modified_base 55: mod_base = OTHER; note = 2'-O-methyl ribonucleotide
  modified_base 56: mod_base = OTHER; note = 2'-O-methyl ribonucleotide
  modified_base 60: mod_base = OTHER; note = 2'-O-methyl ribonucleotide
  modified_base 61: mod_base = OTHER; note = 2'-O-methyl ribonucleotide
  modified_base 66: mod_base = OTHER; note = 2'-O-methyl ribonucleotide
  modified_base 67: mod_base = OTHER; note = 2'-O-methyl ribonucleotide
  modified_base 70: mod_base = OTHER; note = 2'-O-methyl ribonucleotide
  modified_base 71: mod_base = OTHER; note = 2'-O-methyl ribonucleotide
  modified_base 72: mod_base = OTHER; note = 2'-O-methyl ribonucleotide
  modified_base 73: mod_base = OTHER; note = 2'-O-methyl ribonucleotide
  modified_base 74: mod_base = OTHER; note = 2'-O-methyl ribonucleotide
  modified_base 75: mod_base = OTHER; note = 2'-O-methyl ribonucleotide
  modified_base 76: mod_base = OTHER; note = 2'-O-methyl ribonucleotide
  modified_base 77: mod_base = OTHER; note = 2'-O-methyl ribonucleotide
  modified_base 78: mod_base = OTHER; note = 2'-O-methyl ribonucleotide
  modified_base 79: mod_base = OTHER; note = 2'-O-methyl ribonucleotide
  modified_base 80: mod_base = OTHER; note = 2'-O-methyl ribonucleotide
  modified_base 81: mod_base = OTHER; note = 2'-O-methyl ribonucleotide
  modified_base 83: mod_base = OTHER; note = 2'-O-methyl ribonucleotide
  modified_base 84: mod_base = OTHER; note = 2'-O-methyl ribonucleotide
  modified_base 85: mod_base = OTHER; note = 2'-O-methyl ribonucleotide
  modified_base 86: mod_base = OTHER; note = 2'-O-methyl ribonucleotide
  modified_base 87: mod_base = OTHER; note = 2'-O-methyl ribonucleotide
  modified_base 88: mod_base = OTHER; note = 2'-O-methyl ribonucleotide
  modified_base 89: mod_base = OTHER; note = 2'-O-methyl ribonucleotide
  modified_base 90: mod_base = OTHER; note = 2'-O-methyl ribonucleotide
  modified_base 91: mod_base = OTHER; note = 2'-O-methyl ribonucleotide
  modified_base 92: mod_base = OTHER; note = 2'-O-methyl ribonucleotide
  modified_base 93: mod_base = OTHER; note = 2'-O-methyl ribonucleotide
  modified_base 94: mod_base = OTHER; note = 2'-O-methyl ribonucleotide
  modified_base 95: mod_base = OTHER; note = 2'-O-methyl ribonucleotide
  modified_base 96: mod_base = OTHER; note = 2'-O-methyl ribonucleotide
  modified_base 97: mod_base = OTHER; note = 2'-O-methyl ribonucleotide
  modified_base 98: mod_base = OTHER; note = 2'-O-methyl ribonucleotide
  modified_base 99: mod_base = OTHER; note = 2'-O-methyl ribonucleotide
  modified_base 100: mod_base = OTHER; note = 2'-O-methyl ribonucleotide
  modified_base 9: mod_base = OTHER; note = nebularine
  modified_base 34: mod_base = OTHER; note = nebularine
  modified_base 57: mod_base = OTHER; note = nebularine
  modified_base 1..4: mod_base = OTHER; note = phosphorothioate linkage
  modified_base 97..100: mod_base = OTHER; note = phosphorothioate linkage
caggttccntgggatgctctgttttagagctagnaatagcaagttaaaataaggctngtccgttatcaacttgaaaaagtggcaccgagtcggtgctttt

SEQ ID NO: 1911 - RNA, 100 nt, synthetic construct
  source 1..100: mol_type = other RNA
  modified_base 1: mod_base = OTHER; note = 2'-O-methyl ribonucleotide
  modified_base 2: mod_base = OTHER; note = 2'-O-methyl ribonucleotide
  modified_base 3: mod_base = OTHER; note = 2'-O-methyl ribonucleotide
  modified_base 21: mod_base = OTHER; note = 2'-O-methyl ribonucleotide
  modified_base 28: mod_base = OTHER; note = 2'-O-methyl ribonucleotide
  modified_base 29: mod_base = OTHER; note = 2'-O-methyl ribonucleotide
  modified_base 30: mod_base = OTHER; note = 2'-O-methyl ribonucleotide
  modified_base 31: mod_base = OTHER; note = 2'-O-methyl ribonucleotide
  modified_base 32: mod_base = OTHER; note = 2'-O-methyl ribonucleotide
  modified_base 33: mod_base = OTHER; note = 2'-O-methyl ribonucleotide
  modified_base 34: mod_base = OTHER; note = 2'-O-methyl ribonucleotide
  modified_base 35: mod_base = OTHER; note = 2'-O-methyl ribonucleotide
  modified_base 36: mod_base = OTHER; note = 2'-O-methyl ribonucleotide
  modified_base 37: mod_base = OTHER; note = 2'-O-methyl ribonucleotide
  modified_base 38: mod_base = OTHER; note = 2'-O-methyl ribonucleotide
  modified_base 39: mod_base = OTHER; note = 2'-O-methyl ribonucleotide
  modified_base 40: mod_base = OTHER; note = 2'-O-methyl ribonucleotide
  modified_base 41: mod_base = OTHER; note = 2'-O-methyl ribonucleotide
  modified_base 42: mod_base = OTHER; note = 2'-O-methyl ribonucleotide
  modified_base 46: mod_base = OTHER; note = 2'-O-methyl ribonucleotide
  modified_base 48: mod_base = OTHER; note = 2'-O-methyl ribonucleotide
  modified_base 50: mod_base = OTHER; note = 2'-O-methyl ribonucleotide
  modified_base 52: mod_base = OTHER; note = 2'-O-methyl ribonucleotide
  modified_base 53: mod_base = OTHER; note = 2'-O-methyl ribonucleotide
  modified_base 54: mod_base = OTHER; note = 2'-O-methyl ribonucleotide
  modified_base 55: mod_base = OTHER; note = 2'-O-methyl ribonucleotide
  modified_base 56: mod_base = OTHER; note = 2'-O-methyl ribonucleotide
  modified_base 60: mod_base = OTHER; note = 2'-O-methyl ribonucleotide
  modified_base 61: mod_base = OTHER; note = 2'-O-methyl ribonucleotide
  modified_base 66: mod_base = OTHER; note = 2'-O-methyl ribonucleotide
  modified_base 67: mod_base = OTHER; note = 2'-O-methyl ribonucleotide
  modified_base 70: mod_base = OTHER; note = 2'-O-methyl ribonucleotide
  modified_base 71: mod_base = OTHER; note = 2'-O-methyl ribonucleotide
  modified_base 72: mod_base = OTHER; note = 2'-O-methyl ribonucleotide
  modified_base 73: mod_base = OTHER; note = 2'-O-methyl ribonucleotide
  modified_base 74: mod_base = OTHER; note = 2'-O-methyl ribonucleotide
  modified_base 75: mod_base = OTHER; note = 2'-O-methyl ribonucleotide
  modified_base 76: mod_base = OTHER; note = 2'-O-methyl ribonucleotide
  modified_base 77: mod_base = OTHER; note = 2'-O-methyl ribonucleotide
  modified_base 78: mod_base = OTHER; note = 2'-O-methyl ribonucleotide
  modified_base 79: mod_base = OTHER; note = 2'-O-methyl ribonucleotide
  modified_base 80: mod_base = OTHER; note = 2'-O-methyl ribonucleotide
  modified_base 81: mod_base = OTHER; note = 2'-O-methyl ribonucleotide
  modified_base 83: mod_base = OTHER; note = 2'-O-methyl ribonucleotide
  modified_base 84: mod_base = OTHER; note = 2'-O-methyl ribonucleotide
  modified_base 85: mod_base = OTHER; note = 2'-O-methyl ribonucleotide
  modified_base 86: mod_base = OTHER; note = 2'-O-methyl ribonucleotide
  modified_base 87: mod_base = OTHER; note = 2'-O-methyl ribonucleotide
  modified_base 88: mod_base = OTHER; note = 2'-O-methyl ribonucleotide
  modified_base 89: mod_base = OTHER; note = 2'-O-methyl ribonucleotide
  modified_base 90: mod_base = OTHER; note = 2'-O-methyl ribonucleotide
  modified_base 91: mod_base = OTHER; note = 2'-O-methyl ribonucleotide
  modified_base 92: mod_base = OTHER; note = 2'-O-methyl ribonucleotide
  modified_base 93: mod_base = OTHER; note = 2'-O-methyl ribonucleotide
  modified_base 94: mod_base = OTHER; note = 2'-O-methyl ribonucleotide
  modified_base 95: mod_base = OTHER; note = 2'-O-methyl ribonucleotide
  modified_base 96: mod_base = OTHER; note = 2'-O-methyl ribonucleotide
  modified_base 97: mod_base = OTHER; note = 2'-O-methyl ribonucleotide
  modified_base 98: mod_base = OTHER; note = 2'-O-methyl ribonucleotide
  modified_base 99: mod_base = OTHER; note = 2'-O-methyl ribonucleotide
  modified_base 100: mod_base = OTHER; note = 2'-O-methyl ribonucleotide
  modified_base 9: mod_base = OTHER; note = nebularine
  modified_base 57: mod_base = OTHER; note = nebularine
  modified_base 1..4: mod_base = OTHER; note = phosphorothioate linkage
  modified_base 97..100: mod_base = OTHER; note = phosphorothioate linkage
caggttccntgggatgctctgttttagagctagaaatagcaagttaaaataaggctngtccgttatcaacttgaaaaagtggcaccgagtcggtgctttt

SEQ ID NO: 1912 - RNA, 100 nt, synthetic construct
  source 1..100: mol_type = other RNA
  modified_base 1: mod_base = OTHER; note = 2'-O-methyl ribonucleotide
  modified_base 2: mod_base = OTHER; note = 2'-O-methyl ribonucleotide
  modified_base 3: mod_base = OTHER; note = 2'-O-methyl ribonucleotide
  modified_base 21: mod_base = OTHER; note = 2'-O-methyl ribonucleotide
  modified_base 28: mod_base = OTHER; note = 2'-O-methyl ribonucleotide
  modified_base 29: mod_base = OTHER; note = 2'-O-methyl ribonucleotide
  modified_base 30: mod_base = OTHER; note = 2'-O-methyl ribonucleotide
  modified_base 31: mod_base = OTHER; note = 2'-O-methyl ribonucleotide
  modified_base 32: mod_base = OTHER; note = 2'-O-methyl ribonucleotide
  modified_base 33: mod_base = OTHER; note = 2'-O-methyl ribonucleotide
  modified_base 34: mod_base = OTHER; note = 2'-O-methyl ribonucleotide
  modified_base 35: mod_base = OTHER; note = 2'-O-methyl ribonucleotide
  modified_base 36: mod_base = OTHER; note = 2'-O-methyl ribonucleotide
  modified_base 37: mod_base = OTHER; note = 2'-O-methyl ribonucleotide
  modified_base 38: mod_base = OTHER; note = 2'-O-methyl ribonucleotide
  modified_base 39: mod_base = OTHER; note = 2'-O-methyl ribonucleotide
  modified_base 40: mod_base = OTHER; note = 2'-O-methyl ribonucleotide
  modified_base 41: mod_base = OTHER; note = 2'-O-methyl ribonucleotide
  modified_base 42: mod_base = OTHER; note = 2'-O-methyl ribonucleotide
  modified_base 46: mod_base = OTHER; note = 2'-O-methyl ribonucleotide
  modified_base 48: mod_base = OTHER; note = 2'-O-methyl ribonucleotide
  modified_base 50: mod_base = OTHER; note = 2'-O-methyl ribonucleotide
  modified_base 52: mod_base = OTHER; note = 2'-O-methyl ribonucleotide
  modified_base 53: mod_base = OTHER; note = 2'-O-methyl ribonucleotide
  modified_base 54: mod_base = OTHER; note = 2'-O-methyl ribonucleotide
  modified_base 55: mod_base = OTHER; note = 2'-O-methyl ribonucleotide
  modified_base 56: mod_base = OTHER; note = 2'-O-methyl ribonucleotide
  modified_base 57: mod_base = OTHER; note = 2'-O-methyl ribonucleotide
  modified_base 60: mod_base = OTHER; note = 2'-O-methyl ribonucleotide
  modified_base 61: mod_base = OTHER; note = 2'-O-methyl ribonucleotide
  modified_base 66: mod_base = OTHER; note = 2'-O-methyl ribonucleotide
  modified_base 67: mod_base = OTHER; note = 2'-O-methyl ribonucleotide
  modified_base 70: mod_base = OTHER; note = 2'-O-methyl ribonucleotide
  modified_base 71: mod_base = OTHER; note = 2'-O-methyl ribonucleotide
  modified_base 72: mod_base = OTHER; note = 2'-O-methyl ribonucleotide
  modified_base 73: mod_base = OTHER; note = 2'-O-methyl ribonucleotide
  modified_base 74: mod_base = OTHER; note = 2'-O-methyl ribonucleotide
  modified_base 75: mod_base = OTHER; note = 2'-O-methyl ribonucleotide
  modified_base 76: mod_base = OTHER; note = 2'-O-methyl ribonucleotide
  modified_base 77: mod_base = OTHER; note = 2'-O-methyl ribonucleotide
  modified_base 78: mod_base = OTHER; note = 2'-O-methyl ribonucleotide
  modified_base 79: mod_base = OTHER; note = 2'-O-methyl ribonucleotide
  modified_base 80: mod_base = OTHER; note = 2'-O-methyl ribonucleotide
  modified_base 81: mod_base = OTHER; note = 2'-O-methyl ribonucleotide
  modified_base 83: mod_base = OTHER; note = 2'-O-methyl ribonucleotide
  modified_base 84: mod_base = OTHER; note = 2'-O-methyl ribonucleotide
  modified_base 85: mod_base = OTHER; note = 2'-O-methyl ribonucleotide
  modified_base 86: mod_base = OTHER; note = 2'-O-methyl ribonucleotide
  modified_base 87: mod_base = OTHER; note = 2'-O-methyl ribonucleotide
  modified_base 88: mod_base = OTHER; note = 2'-O-methyl ribonucleotide
  modified_base 89: mod_base = OTHER; note = 2'-O-methyl ribonucleotide
  modified_base 90: mod_base = OTHER; note = 2'-O-methyl ribonucleotide
  modified_base 91: mod_base = OTHER; note = 2'-O-methyl ribonucleotide
  modified_base 92: mod_base = OTHER; note = 2'-O-methyl ribonucleotide
  modified_base 93: mod_base = OTHER; note = 2'-O-methyl ribonucleotide
  modified_base 94: mod_base = OTHER; note = 2'-O-methyl ribonucleotide
  modified_base 95: mod_base = OTHER; note = 2'-O-methyl ribonucleotide
  modified_base 96: mod_base = OTHER; note = 2'-O-methyl ribonucleotide
  modified_base 97: mod_base = OTHER; note = 2'-O-methyl ribonucleotide
  modified_base 98: mod_base = OTHER; note = 2'-O-methyl ribonucleotide
  modified_base 99: mod_base = OTHER; note = 2'-O-methyl ribonucleotide
  modified_base 100: mod_base = OTHER; note = 2'-O-methyl ribonucleotide
  modified_base 9: mod_base = OTHER; note = nebularine
  modified_base 65: mod_base = OTHER; note = nebularine
  modified_base 1..4: mod_base = OTHER; note = phosphorothioate linkage
  modified_base 97..100: mod_base = OTHER; note = phosphorothioate linkage
caggttccntgggatgctctgttttagagctagaaatagcaagttaaaataaggctagtccgttntcaacttgaaaaagtggcaccgagtcggtgctttt

SEQ ID NO: 1913 - RNA, 100 nt, synthetic construct
  source 1..100: mol_type = other RNA
  modified_base 1: mod_base = OTHER; note = 2'-O-methyl ribonucleotide
  modified_base 2: mod_base = OTHER; note = 2'-O-methyl ribonucleotide
  modified_base 3: mod_base = OTHER; note = 2'-O-methyl ribonucleotide
  modified_base 21: mod_base = OTHER; note = 2'-O-methyl ribonucleotide
  modified_base 28: mod_base = OTHER; note = 2'-O-methyl ribonucleotide
  modified_base 29: mod_base = OTHER; note = 2'-O-methyl ribonucleotide
  modified_base 30: mod_base = OTHER; note = 2'-O-methyl ribonucleotide
  modified_base 31: mod_base = OTHER; note = 2'-O-methyl ribonucleotide
  modified_base 32: mod_base = OTHER; note = 2'-O-methyl ribonucleotide
  modified_base 33: mod_base = OTHER; note = 2'-O-methyl ribonucleotide
  modified_base 35: mod_base = OTHER; note = 2'-O-methyl ribonucleotide
  modified_base 36: mod_base = OTHER; note = 2'-O-methyl ribonucleotide
  modified_base 37: mod_base = OTHER; note = 2'-O-methyl ribonucleotide
  modified_base 38: mod_base = OTHER; note = 2'-O-methyl ribonucleotide
  modified_base 39: mod_base = OTHER; note = 2'-O-methyl ribonucleotide
  modified_base 40: mod_base = OTHER; note = 2'-O-methyl ribonucleotide
  modified_base 41: mod_base = OTHER; note = 2'-O-methyl ribonucleotide
  modified_base 42: mod_base = OTHER; note = 2'-O-methyl ribonucleotide
  modified_base 46: mod_base = OTHER; note = 2'-O-methyl ribonucleotide
  modified_base 48: mod_base = OTHER; note = 2'-O-methyl ribonucleotide
  modified_base 50: mod_base = OTHER; note = 2'-O-methyl ribonucleotide
  modified_base 52: mod_base = OTHER; note = 2'-O-methyl ribonucleotide
  modified_base 53: mod_base = OTHER; note = 2'-O-methyl ribonucleotide
  modified_base 54: mod_base = OTHER; note = 2'-O-methyl ribonucleotide
  modified_base 55: mod_base = OTHER; note = 2'-O-methyl ribonucleotide
  modified_base 56: mod_base = OTHER; note = 2'-O-methyl ribonucleotide
  modified_base 60: mod_base = OTHER; note = 2'-O-methyl ribonucleotide
  modified_base 61: mod_base = OTHER; note = 2'-O-methyl ribonucleotide
  modified_base 66: mod_base = OTHER; note = 2'-O-methyl ribonucleotide
  modified_base 67: mod_base = OTHER; note = 2'-O-methyl ribonucleotide
  modified_base 70: mod_base = OTHER; note = 2'-O-methyl ribonucleotide
  modified_base 71: mod_base = OTHER; note = 2'-O-methyl ribonucleotide
  modified_base 72: mod_base = OTHER; note = 2'-O-methyl ribonucleotide
  modified_base 73: mod_base = OTHER; note = 2'-O-methyl ribonucleotide
  modified_base 74: mod_base = OTHER; note = 2'-O-methyl ribonucleotide
  modified_base 75: mod_base = OTHER; note = 2'-O-methyl ribonucleotide
  modified_base 76: mod_base = OTHER; note = 2'-O-methyl ribonucleotide
  modified_base 77: mod_base = OTHER; note = 2'-O-methyl ribonucleotide
  modified_base 78: mod_base = OTHER; note = 2'-O-methyl ribonucleotide
  modified_base 79: mod_base = OTHER; note = 2'-O-methyl ribonucleotide
  modified_base 80: mod_base = OTHER; note = 2'-O-methyl ribonucleotide
  modified_base 81: mod_base = OTHER; note = 2'-O-methyl ribonucleotide
  modified_base 83: mod_base = OTHER; note = 2'-O-methyl ribonucleotide
  modified_base 84: mod_base = OTHER; note = 2'-O-methyl ribonucleotide
  modified_base 85: mod_base = OTHER; note = 2'-O-methyl ribonucleotide
  modified_base 86: mod_base = OTHER; note = 2'-O-methyl ribonucleotide
  modified_base 87: mod_base = OTHER; note = 2'-O-methyl ribonucleotide
  modified_base 88: mod_base = OTHER; note = 2'-O-methyl ribonucleotide
  modified_base 89: mod_base = OTHER; note = 2'-O-methyl ribonucleotide
  modified_base 90: mod_base = OTHER; note = 2'-O-methyl ribonucleotide
  modified_base 91: mod_base = OTHER; note = 2'-O-methyl ribonucleotide
  modified_base 92: mod_base = OTHER; note = 2'-O-methyl ribonucleotide
  modified_base 93: mod_base = OTHER; note = 2'-O-methyl ribonucleotide
  modified_base 94: mod_base = OTHER; note = 2'-O-methyl ribonucleotide
  modified_base 95: mod_base = OTHER; note = 2'-O-methyl ribonucleotide
  modified_base 96: mod_base = OTHER; note = 2'-O-methyl ribonucleotide
  modified_base 97: mod_base = OTHER; note = 2'-O-methyl ribonucleotide
  modified_base 98: mod_base = OTHER; note = 2'-O-methyl ribonucleotide
  modified_base 99: mod_base = OTHER; note = 2'-O-methyl ribonucleotide
  modified_base 100: mod_base = OTHER; note = 2'-O-methyl ribonucleotide
  modified_base 9: mod_base = OTHER; note = nebularine
  modified_base 34: mod_base = OTHER; note = nebularine
  modified_base 57: mod_base = OTHER; note = nebularine
  modified_base 65: mod_base = OTHER; note = nebularine
  modified_base 1..4: mod_base = OTHER; note = phosphorothioate linkage
  modified_base 97..100: mod_base = OTHER; note = phosphorothioate linkage
caggttccntgggatgctctgttttagagctagnaatagcaagttaaaataaggctngtccgttntcaacttgaaaaagtggcaccgagtcggtgctttt

SEQ ID NO: 1914 - RNA, 100 nt, synthetic construct
  source 1..100: mol_type = other RNA
  modified_base 1: mod_base = OTHER; note = 2'-O-methyl ribonucleotide
  modified_base 2: mod_base = OTHER; note = 2'-O-methyl ribonucleotide
  modified_base 3: mod_base = OTHER; note = 2'-O-methyl ribonucleotide
  modified_base 21: mod_base = OTHER; note = 2'-O-methyl ribonucleotide
  modified_base 29: mod_base = OTHER; note = 2'-O-methyl ribonucleotide
  modified_base 30: mod_base = OTHER; note = 2'-O-methyl ribonucleotide
  modified_base 31: mod_base = OTHER; note = 2'-O-methyl ribonucleotide
  modified_base 32: mod_base = OTHER; note = 2'-O-methyl ribonucleotide
  modified_base 33: mod_base = OTHER; note = 2'-O-methyl ribonucleotide
  modified_base 35: mod_base = OTHER; note = 2'-O-methyl ribonucleotide
  modified_base 36: mod_base = OTHER; note = 2'-O-methyl ribonucleotide
  modified_base 37: mod_base = OTHER; note = 2'-O-methyl ribonucleotide
  modified_base 38: mod_base = OTHER; note = 2'-O-methyl ribonucleotide
  modified_base 39: mod_base = OTHER; note = 2'-O-methyl ribonucleotide
  modified_base 40: mod_base = OTHER; note = 2'-O-methyl ribonucleotide
  modified_base 41: mod_base = OTHER; note = 2'-O-methyl ribonucleotide
  modified_base 46: mod_base = OTHER; note = 2'-O-methyl ribonucleotide
  modified_base 48: mod_base = OTHER; note = 2'-O-methyl ribonucleotide
  modified_base 50: mod_base = OTHER; note = 2'-O-methyl ribonucleotide
  modified_base 52: mod_base = OTHER; note = 2'-O-methyl ribonucleotide
  modified_base 53: mod_base = OTHER; note = 2'-O-methyl ribonucleotide
  modified_base 54: mod_base = OTHER; note = 2'-O-methyl ribonucleotide
  modified_base 55: mod_base = OTHER; note = 2'-O-methyl ribonucleotide
  modified_base 56: mod_base = OTHER; note = 2'-O-methyl ribonucleotide
  modified_base 60: mod_base = OTHER; note = 2'-O-methyl ribonucleotide
  modified_base 61: mod_base = OTHER; note = 2'-O-methyl ribonucleotide
  modified_base 66: mod_base = OTHER; note = 2'-O-methyl ribonucleotide
  modified_base 67: mod_base = OTHER; note = 2'-O-methyl ribonucleotide
  modified_base 70: mod_base = OTHER; note = 2'-O-methyl ribonucleotide
  modified_base 71: mod_base = OTHER; note = 2'-O-methyl ribonucleotide
  modified_base 72: mod_base = OTHER; note = 2'-O-methyl ribonucleotide
  modified_base 73: mod_base = OTHER; note = 2'-O-methyl ribonucleotide
  modified_base 74: mod_base = OTHER; note = 2'-O-methyl ribonucleotide
  modified_base 75: mod_base = OTHER; note = 2'-O-methyl ribonucleotide
  modified_base 76: mod_base = OTHER; note = 2'-O-methyl ribonucleotide
  modified_base 77: mod_base = OTHER; note = 2'-O-methyl ribonucleotide
  modified_base 78: mod_base = OTHER; note = 2'-O-methyl ribonucleotide
  modified_base 79: mod_base = OTHER; note = 2'-O-methyl ribonucleotide
  modified_base 80: mod_base = OTHER; note = 2'-O-methyl ribonucleotide
  modified_base 81: mod_base = OTHER; note = 2'-O-methyl ribonucleotide
  modified_base 83: mod_base = OTHER; note = 2'-O-methyl ribonucleotide
  modified_base 84: mod_base = OTHER; note = 2'-O-methyl ribonucleotide
  modified_base 85: mod_base = OTHER; note = 2'-O-methyl ribonucleotide
  modified_base 86: mod_base = OTHER; note = 2'-O-methyl ribonucleotide
  modified_base 87: mod_base = OTHER; note = 2'-O-methyl ribonucleotide
  modified_base 88: mod_base = OTHER; note = 2'-O-methyl ribonucleotide
  modified_base 89: mod_base = OTHER; note = 2'-O-methyl ribonucleotide
  modified_base 90: mod_base = OTHER; note = 2'-O-methyl ribonucleotide
  modified_base 91: mod_base = OTHER; note = 2'-O-methyl ribonucleotide
  modified_base 92: mod_base = OTHER; note = 2'-O-methyl ribonucleotide
  modified_base 93: mod_base = OTHER; note = 2'-O-methyl ribonucleotide
  modified_base 94: mod_base = OTHER; note = 2'-O-methyl ribonucleotide
  modified_base 95: mod_base = OTHER; note = 2'-O-methyl ribonucleotide
  modified_base 96: mod_base = OTHER; note = 2'-O-methyl ribonucleotide
  modified_base 97: mod_base = OTHER; note = 2'-O-methyl ribonucleotide
  modified_base 98: mod_base = OTHER; note = 2'-O-methyl ribonucleotide
  modified_base 99: mod_base = OTHER; note = 2'-O-methyl ribonucleotide
  modified_base 100: mod_base = OTHER; note = 2'-O-methyl ribonucleotide
  modified_base 9: mod_base = OTHER; note = nebularine
  modified_base 28: mod_base = OTHER; note = nebularine
  modified_base 34: mod_base = OTHER; note = nebularine
  modified_base 42: mod_base = OTHER; note = nebularine
  modified_base 57: mod_base = OTHER; note = nebularine
  modified_base 65: mod_base = OTHER; note = nebularine
  modified_base 1..4: mod_base = OTHER; note = phosphorothioate linkage
  modified_base 97..100: mod_base = OTHER; note = phosphorothioate linkage
caggttccntgggatgctctgttttagngctagnaatagcangttaaaataaggctngtccgttntcaacttgaaaaagtggcaccgagtcggtgctttt

SEQ ID NO: 1915 - RNA, 100 nt, synthetic construct
  source 1..100: mol_type = other RNA
  modified_base 1: mod_base = OTHER; note = 2'-O-methyl ribonucleotide
  modified_base 2: mod_base = OTHER; note = 2'-O-methyl ribonucleotide
  modified_base 3: mod_base = OTHER; note = 2'-O-methyl ribonucleotide
  modified_base 21: mod_base = OTHER; note = 2'-O-methyl ribonucleotide
  modified_base 28: mod_base = OTHER; note = 2'-O-methyl ribonucleotide
  modified_base 29: mod_base = OTHER; note = 2'-O-methyl ribonucleotide
  modified_base 30: mod_base = OTHER; note = 2'-O-methyl ribonucleotide
  modified_base 31: mod_base = OTHER; note = 2'-O-methyl ribonucleotide
  modified_base 32: mod_base = OTHER; note = 2'-O-methyl ribonucleotide
  modified_base 33: mod_base = OTHER; note = 2'-O-methyl ribonucleotide
  modified_base 35: mod_base = OTHER; note = 2'-O-methyl ribonucleotide
  modified_base 36: mod_base = OTHER; note = 2'-O-methyl ribonucleotide
  modified_base 37: mod_base = OTHER; note = 2'-O-methyl ribonucleotide
  modified_base 38: mod_base = OTHER; note = 2'-O-methyl ribonucleotide
  modified_base 39: mod_base = OTHER; note = 2'-O-methyl ribonucleotide
  modified_base 40: mod_base = OTHER; note = 2'-O-methyl ribonucleotide
  modified_base 41: mod_base = OTHER; note = 2'-O-methyl ribonucleotide
  modified_base 42: mod_base = OTHER; note = 2'-O-methyl ribonucleotide
  modified_base 46: mod_base = OTHER; note = 2'-O-methyl ribonucleotide
  modified_base 48: mod_base = OTHER; note = 2'-O-methyl ribonucleotide
  modified_base 50: mod_base = OTHER; note = 2'-O-methyl ribonucleotide
  modified_base 52: mod_base = OTHER; note = 2'-O-methyl ribonucleotide
  modified_base 53: mod_base = OTHER; note = 2'-O-methyl ribonucleotide
  modified_base 54: mod_base = OTHER; note = 2'-O-methyl ribonucleotide
  modified_base 55: mod_base = OTHER; note = 2'-O-methyl ribonucleotide
  modified_base 56: mod_base = OTHER; note = 2'-O-methyl ribonucleotide
  modified_base 57: mod_base = OTHER; note = 2'-O-methyl ribonucleotide
  modified_base 60: mod_base = OTHER; note = 2'-O-methyl ribonucleotide
  modified_base 61: mod_base = OTHER; note = 2'-O-methyl ribonucleotide
  modified_base 66: mod_base = OTHER; note = 2'-O-methyl ribonucleotide
  modified_base 67: mod_base = OTHER; note = 2'-O-methyl ribonucleotide
  modified_base 70: mod_base = OTHER; note = 2'-O-methyl ribonucleotide
  modified_base 71: mod_base = OTHER; note = 2'-O-methyl ribonucleotide
  modified_base 72: mod_base = OTHER; note = 2'-O-methyl ribonucleotide
  modified_base 73: mod_base = OTHER; note = 2'-O-methyl ribonucleotide
  modified_base 74: mod_base = OTHER; note = 2'-O-methyl ribonucleotide
  modified_base 75: mod_base = OTHER; note = 2'-O-methyl ribonucleotide
  modified_base 76: mod_base = OTHER; note = 2'-O-methyl ribonucleotide
  modified_base 77: mod_base = OTHER; note = 2'-O-methyl ribonucleotide
  modified_base 78: mod_base = OTHER; note = 2'-O-methyl ribonucleotide
  modified_base 79: mod_base = OTHER; note = 2'-O-methyl ribonucleotide
  modified_base 80: mod_base = OTHER; note = 2'-O-methyl ribonucleotide
  modified_base 81: mod_base = OTHER; note = 2'-O-methyl ribonucleotide
  modified_base 83: mod_base = OTHER; note = 2'-O-methyl ribonucleotide
  modified_base 84: mod_base = OTHER; note = 2'-O-methyl ribonucleotide
  modified_base 85: mod_base = OTHER; note = 2'-O-methyl ribonucleotide
  modified_base 86: mod_base = OTHER; note = 2'-O-methyl ribonucleotide
  modified_base 87: mod_base = OTHER; note = 2'-O-methyl ribonucleotide
  modified_base 88: mod_base = OTHER; note = 2'-O-methyl ribonucleotide
  modified_base 89: mod_base = OTHER; note = 2'-O-methyl ribonucleotide
  modified_base 90: mod_base = OTHER; note = 2'-O-methyl ribonucleotide
  modified_base 91: mod_base = OTHER; note = 2'-O-methyl ribonucleotide
  modified_base 92: mod_base = OTHER; note = 2'-O-methyl ribonucleotide
  modified_base 93: mod_base = OTHER; note = 2'-O-methyl ribonucleotide
  modified_base 94: mod_base = OTHER; note = 2'-O-methyl ribonucleotide
  modified_base 95: mod_base = OTHER; note = 2'-O-methyl ribonucleotide
  modified_base 96: mod_base = OTHER; note = 2'-O-methyl ribonucleotide
  modified_base 97: mod_base = OTHER; note = 2'-O-methyl ribonucleotide
  modified_base 98: mod_base = OTHER; note = 2'-O-methyl ribonucleotide
  modified_base 99: mod_base = OTHER; note = 2'-O-methyl ribonucleotide
  modified_base 100: mod_base = OTHER; note = 2'-O-methyl ribonucleotide
  modified_base 14: mod_base = OTHER; note = nebularine
  modified_base 34: mod_base = OTHER; note = nebularine
  modified_base 1..4: mod_base = OTHER; note = phosphorothioate linkage
  modified_base 97..100: mod_base = OTHER; note = phosphorothioate linkage
caggttccatgggntgctctgttttagagctagnaatagcaagttaaaataaggctagtccgttatcaacttgaaaaagtggcaccgagtcggtgctttt

SEQ ID NO: 1916 - RNA, 100 nt, synthetic construct
  source 1..100: mol_type = other RNA
  modified_base 1: mod_base = OTHER; note = 2'-O-methyl ribonucleotide
  modified_base 2: mod_base = OTHER; note = 2'-O-methyl ribonucleotide
  modified_base 3: mod_base = OTHER; note = 2'-O-methyl ribonucleotide
  modified_base 21: mod_base = OTHER; note = 2'-O-methyl ribonucleotide
  modified_base 28: mod_base = OTHER; note = 2'-O-methyl ribonucleotide
  modified_base 29: mod_base = OTHER; note = 2'-O-methyl ribonucleotide
  modified_base 30: mod_base = OTHER; note = 2'-O-methyl ribonucleotide
  modified_base 31: mod_base = OTHER; note = 2'-O-methyl ribonucleotide
  modified_base 32: mod_base = OTHER; note = 2'-O-methyl ribonucleotide
  modified_base 33: mod_base = OTHER; note = 2'-O-methyl ribonucleotide
  modified_base 35: mod_base = OTHER; note = 2'-O-methyl ribonucleotide
  modified_base 36: mod_base = OTHER; note = 2'-O-methyl ribonucleotide
  modified_base 37: mod_base = OTHER; note = 2'-O-methyl ribonucleotide
  modified_base 38: mod_base = OTHER; note = 2'-O-methyl ribonucleotide
  modified_base 39: mod_base = OTHER; note = 2'-O-methyl ribonucleotide
  modified_base 40: mod_base = OTHER; note = 2'-O-methyl ribonucleotide
  modified_base 41: mod_base = OTHER; note = 2'-O-methyl ribonucleotide
  modified_base 42: mod_base = OTHER; note = 2'-O-methyl ribonucleotide
  modified_base 46: mod_base = OTHER; note = 2'-O-methyl ribonucleotide
  modified_base 48: mod_base = OTHER; note = 2'-O-methyl ribonucleotide
  modified_base 50: mod_base = OTHER; note = 2'-O-methyl ribonucleotide
  modified_base 52: mod_base = OTHER; note = 2'-O-methyl ribonucleotide
  modified_base 53: mod_base = OTHER; note = 2'-O-methyl ribonucleotide
  modified_base 54: mod_base = OTHER; note = 2'-O-methyl ribonucleotide
  modified_base 55: mod_base = OTHER; note = 2'-O-methyl ribonucleotide
  modified_base 56: mod_base = OTHER; note = 2'-O-methyl ribonucleotide
  modified_base 60: mod_base = OTHER; note = 2'-O-methyl ribonucleotide
  modified_base 61: mod_base = OTHER; note = 2'-O-methyl ribonucleotide
  modified_base 66: mod_base = OTHER; note = 2'-O-methyl ribonucleotide
  modified_base 67: mod_base = OTHER; note = 2'-O-methyl ribonucleotide
  modified_base 70: mod_base = OTHER; note = 2'-O-methyl ribonucleotide
  modified_base 71: mod_base = OTHER; note = 2'-O-methyl ribonucleotide
  modified_base 72: mod_base = OTHER; note = 2'-O-methyl ribonucleotide
  modified_base 73: mod_base = OTHER; note = 2'-O-methyl ribonucleotide
  modified_base 74: mod_base = OTHER; note = 2'-O-methyl ribonucleotide
  modified_base 75: mod_base = OTHER; note = 2'-O-methyl ribonucleotide
  modified_base 76: mod_base = OTHER; note = 2'-O-methyl ribonucleotide
  modified_base 77: mod_base = OTHER; note = 2'-O-methyl ribonucleotide
  modified_base 78: mod_base = OTHER; note = 2'-O-methyl ribonucleotide
  modified_base 79: mod_base = OTHER; note = 2'-O-methyl ribonucleotide
  modified_base 80: mod_base = OTHER; note = 2'-O-methyl ribonucleotide
  modified_base 81: mod_base = OTHER; note = 2'-O-methyl ribonucleotide
  modified_base 83: mod_base = OTHER; note = 2'-O-methyl ribonucleotide
  modified_base 84: mod_base = OTHER; note = 2'-O-methyl ribonucleotide
  modified_base 85: mod_base = OTHER; note = 2'-O-methyl ribonucleotide
  modified_base 86: mod_base = OTHER; note = 2'-O-methyl ribonucleotide
  modified_base 87: mod_base = OTHER; note = 2'-O-methyl ribonucleotide
  modified_base 88: mod_base = OTHER; note = 2'-O-methyl ribonucleotide
  modified_base 89: mod_base = OTHER; note = 2'-O-methyl ribonucleotide
  modified_base 90: mod_base = OTHER; note = 2'-O-methyl ribonucleotide
  modified_base 91: mod_base = OTHER; note = 2'-O-methyl ribonucleotide
  modified_base 92: mod_base = OTHER; note = 2'-O-methyl ribonucleotide
  modified_base 93: mod_base = OTHER; note = 2'-O-methyl ribonucleotide
  modified_base 94: mod_base = OTHER; note = 2'-O-methyl ribonucleotide
  modified_base 95: mod_base = OTHER; note = 2'-O-methyl ribonucleotide
  modified_base 96: mod_base = OTHER; note = 2'-O-methyl ribonucleotide
  modified_base 97: mod_base = OTHER; note = 2'-O-methyl ribonucleotide
  modified_base 98: mod_base = OTHER; note = 2'-O-methyl ribonucleotide
  modified_base 99: mod_base = OTHER; note = 2'-O-methyl ribonucleotide
  modified_base 100: mod_base = OTHER; note = 2'-O-methyl ribonucleotide
  modified_base 14: mod_base = OTHER; note = nebularine
  modified_base 34: mod_base = OTHER; note = nebularine
  modified_base 57: mod_base = OTHER; note = nebularine
  modified_base 1..4: mod_base = OTHER; note = phosphorothioate linkage
  modified_base 97..100: mod_base = OTHER; note = phosphorothioate linkage
caggttccatgggntgctctgttttagagctagnaatagcaagttaaaataaggctngtccgttatcaacttgaaaaagtggcaccgagtcggtgctttt

SEQ ID NO: 1917 - RNA, 100 nt, synthetic construct
  source 1..100: mol_type = other RNA
  modified_base 1: mod_base = OTHER; note = 2'-O-methyl ribonucleotide
  modified_base 2: mod_base = OTHER; note = 2'-O-methyl ribonucleotide
  modified_base 3: mod_base = OTHER; note = 2'-O-methyl ribonucleotide
  modified_base 21: mod_base = OTHER; note = 2'-O-methyl ribonucleotide
  modified_base 28: mod_base = OTHER; note = 2'-O-methyl ribonucleotide
  modified_base 29: mod_base = OTHER; note = 2'-O-methyl ribonucleotide
  modified_base 30: mod_base = OTHER; note = 2'-O-methyl ribonucleotide
  modified_base 31: mod_base = OTHER; note = 2'-O-methyl ribonucleotide
  modified_base 32: mod_base = OTHER; note = 2'-O-methyl ribonucleotide
  modified_base 33: mod_base = OTHER; note = 2'-O-methyl ribonucleotide
  modified_base 34: mod_base = OTHER; note = 2'-O-methyl ribonucleotide
  modified_base 35: mod_base = OTHER; note = 2'-O-methyl ribonucleotide
  modified_base 36: mod_base = OTHER; note = 2'-O-methyl ribonucleotide
  modified_base 37: mod_base = OTHER; note = 2'-O-methyl ribonucleotide
  modified_base 38: mod_base = OTHER; note = 2'-O-methyl ribonucleotide
  modified_base 39: mod_base = OTHER; note = 2'-O-methyl ribonucleotide
  modified_base 40: mod_base = OTHER; note = 2'-O-methyl ribonucleotide
  modified_base 41: mod_base = OTHER; note = 2'-O-methyl ribonucleotide
  modified_base 42: mod_base = OTHER; note = 2'-O-methyl ribonucleotide
  modified_base 46: mod_base = OTHER; note = 2'-O-methyl ribonucleotide
  modified_base 48: mod_base = OTHER; note = 2'-O-methyl ribonucleotide
  modified_base 50: mod_base = OTHER; note = 2'-O-methyl ribonucleotide
  modified_base 52: mod_base = OTHER; note = 2'-O-methyl ribonucleotide
  modified_base 53: mod_base = OTHER; note = 2'-O-methyl ribonucleotide
  modified_base 54: mod_base = OTHER; note = 2'-O-methyl ribonucleotide
  modified_base 55: mod_base = OTHER; note = 2'-O-methyl ribonucleotide
  modified_base 56: mod_base = OTHER; note = 2'-O-methyl ribonucleotide
  modified_base 60: mod_base = OTHER; note = 2'-O-methyl ribonucleotide
  modified_base 61: mod_base = OTHER; note = 2'-O-methyl ribonucleotide
  modified_base 66: mod_base = OTHER; note = 2'-O-methyl ribonucleotide
  modified_base 67: mod_base = OTHER; note = 2'-O-methyl ribonucleotide
  modified_base 70: mod_base = OTHER; note = 2'-O-methyl ribonucleotide
  modified_base 71: mod_base = OTHER; note = 2'-O-methyl ribonucleotide
  modified_base 72: mod_base = OTHER; note = 2'-O-methyl ribonucleotide
  modified_base 73: mod_base = OTHER; note = 2'-O-methyl ribonucleotide
  modified_base 74: mod_base = OTHER; note = 2'-O-methyl ribonucleotide
  modified_base 75: mod_base = OTHER; note = 2'-O-methyl ribonucleotide
  modified_base 76: mod_base = OTHER; note = 2'-O-methyl ribonucleotide
  modified_base 77: mod_base = OTHER; note = 2'-O-methyl ribonucleotide
  modified_base 78: mod_base = OTHER; note = 2'-O-methyl ribonucleotide
  modified_base 79: mod_base = OTHER; note = 2'-O-methyl ribonucleotide
  modified_base 80: mod_base = OTHER; note = 2'-O-methyl ribonucleotide
  modified_base 81: mod_base = OTHER; note = 2'-O-methyl ribonucleotide
  modified_base 83: mod_base = OTHER; note = 2'-O-methyl ribonucleotide
  modified_base 84: mod_base = OTHER; note = 2'-O-methyl ribonucleotide
  modified_base 85: mod_base = OTHER; note = 2'-O-methyl ribonucleotide
  modified_base 86: mod_base = OTHER; note = 2'-O-methyl ribonucleotide
  modified_base 87: mod_base = OTHER; note = 2'-O-methyl ribonucleotide
  modified_base 88: mod_base = OTHER; note = 2'-O-methyl ribonucleotide
  modified_base 89: mod_base = OTHER; note = 2'-O-methyl ribonucleotide
  modified_base 90: mod_base = OTHER; note = 2'-O-methyl ribonucleotide
  modified_base 91: mod_base = OTHER; note = 2'-O-methyl ribonucleotide
  modified_base 92: mod_base = OTHER; note = 2'-O-methyl ribonucleotide
  modified_base 93: mod_base = OTHER; note = 2'-O-methyl ribonucleotide
  modified_base 94: mod_base = OTHER; note = 2'-O-methyl ribonucleotide
  modified_base 95: mod_base = OTHER; note = 2'-O-methyl ribonucleotide
  modified_base 96: mod_base = OTHER; note = 2'-O-methyl ribonucleotide
  modified_base 97: mod_base = OTHER; note = 2'-O-methyl ribonucleotide
  modified_base 98: mod_base = OTHER; note = 2'-O-methyl ribonucleotide
  modified_base 99: mod_base = OTHER; note = 2'-O-methyl ribonucleotide
  modified_base 100: mod_base = OTHER; note = 2'-O-methyl ribonucleotide
  modified_base 14: mod_base = OTHER; note = nebularine
  modified_base 57: mod_base = OTHER; note = nebularine
  modified_base 1..4: mod_base = OTHER; note = phosphorothioate linkage
  modified_base 97..100: mod_base = OTHER; note = phosphorothioate linkage
caggttccatgggntgctctgttttagagctagaaatagcaagttaaaataaggctngtccgttatcaacttgaaaaagtggcaccgagtcggtgctttt

SEQ ID NO: 1918 - RNA, 100 nt, synthetic construct
  source 1..100: mol_type = other RNA
  modified_base 1: mod_base = OTHER; note = 2'-O-methyl ribonucleotide
  modified_base 2: mod_base = OTHER; note = 2'-O-methyl ribonucleotide
  modified_base 3: mod_base = OTHER; note = 2'-O-methyl ribonucleotide
  modified_base 21: mod_base = OTHER; note = 2'-O-methyl ribonucleotide
  modified_base 28: mod_base = OTHER; note = 2'-O-methyl ribonucleotide
  modified_base 29: mod_base = OTHER; note = 2'-O-methyl ribonucleotide
  modified_base 30: mod_base = OTHER; note = 2'-O-methyl ribonucleotide
  modified_base 31: mod_base = OTHER; note = 2'-O-methyl ribonucleotide
  modified_base 32: mod_base = OTHER; note = 2'-O-methyl ribonucleotide
  modified_base 33: mod_base = OTHER; note = 2'-O-methyl ribonucleotide
  modified_base 34: mod_base = OTHER; note = 2'-O-methyl ribonucleotide
  modified_base 35: mod_base = OTHER; note = 2'-O-methyl ribonucleotide
  modified_base 36: mod_base = OTHER; note = 2'-O-methyl ribonucleotide
  modified_base 37: mod_base = OTHER; note = 2'-O-methyl ribonucleotide
  modified_base 38: mod_base = OTHER; note = 2'-O-methyl ribonucleotide
  modified_base 39: mod_base = OTHER; note = 2'-O-methyl ribonucleotide
  modified_base 40: mod_base = OTHER; note = 2'-O-methyl ribonucleotide
  modified_base 41: mod_base = OTHER; note = 2'-O-methyl ribonucleotide
  modified_base 42: mod_base = OTHER; note = 2'-O-methyl ribonucleotide
  modified_base 46: mod_base = OTHER; note = 2'-O-methyl ribonucleotide
  modified_base 48: mod_base = OTHER; note = 2'-O-methyl ribonucleotide
  modified_base 50: mod_base = OTHER; note = 2'-O-methyl ribonucleotide
  modified_base 52: mod_base = OTHER; note = 2'-O-methyl ribonucleotide
  modified_base 53: mod_base = OTHER; note = 2'-O-methyl ribonucleotide
  modified_base 54: mod_base = OTHER; note = 2'-O-methyl ribonucleotide
  modified_base 55: mod_base = OTHER; note = 2'-O-methyl ribonucleotide
  modified_base 56: mod_base = OTHER; note = 2'-O-methyl ribonucleotide
  modified_base 57: mod_base = OTHER; note = 2'-O-methyl ribonucleotide
  modified_base 60: mod_base = OTHER; note = 2'-O-methyl ribonucleotide
  modified_base 61: mod_base = OTHER; note = 2'-O-methyl ribonucleotide
  modified_base 66: mod_base = OTHER; note = 2'-O-methyl ribonucleotide
  modified_base 67: mod_base = OTHER; note = 2'-O-methyl ribonucleotide
  modified_base 70: mod_base = OTHER; note = 2'-O-methyl ribonucleotide
  modified_base 71: mod_base = OTHER; note = 2'-O-methyl ribonucleotide
  modified_base 72: mod_base = OTHER; note = 2'-O-methyl ribonucleotide
  modified_base 73: mod_base = OTHER; note = 2'-O-methyl ribonucleotide
  modified_base 74: mod_base = OTHER; note = 2'-O-methyl ribonucleotide
  modified_base 75: mod_base = OTHER; note = 2'-O-methyl ribonucleotide
  modified_base 76: mod_base = OTHER; note = 2'-O-methyl ribonucleotide
  modified_base 77: mod_base = OTHER; note = 2'-O-methyl ribonucleotide
  modified_base 78: mod_base = OTHER; note = 2'-O-methyl ribonucleotide
  modified_base 79: mod_base = OTHER; note = 2'-O-methyl ribonucleotide
  modified_base 80: mod_base = OTHER; note = 2'-O-methyl ribonucleotide
  modified_base 81: mod_base = OTHER; note = 2'-O-methyl ribonucleotide
  modified_base 83: mod_base = OTHER; note = 2'-O-methyl ribonucleotide
  modified_base 84: mod_base = OTHER; note = 2'-O-methyl ribonucleotide
  modified_base 85: mod_base = OTHER; note = 2'-O-methyl ribonucleotide
  modified_base 86: mod_base = OTHER; note = 2'-O-methyl ribonucleotide
  modified_base 87: mod_base = OTHER; note = 2'-O-methyl ribonucleotide
  modified_base 88: mod_base = OTHER; note = 2'-O-methyl ribonucleotide
  modified_base 89: mod_base = OTHER; note = 2'-O-methyl ribonucleotide
  modified_base 90: mod_base = OTHER; note = 2'-O-methyl ribonucleotide
  modified_base 91: mod_base = OTHER; note = 2'-O-methyl ribonucleotide
  modified_base 92: mod_base = OTHER; note = 2'-O-methyl ribonucleotide
  modified_base 93: mod_base = OTHER; note = 2'-O-methyl ribonucleotide
  modified_base 94: mod_base = OTHER; note = 2'-O-methyl ribonucleotide
  modified_base 95: mod_base = OTHER; note = 2'-O-methyl ribonucleotide
  modified_base 96: mod_base = OTHER; note = 2'-O-methyl ribonucleotide
  modified_base 97: mod_base = OTHER; note = 2'-O-methyl ribonucleotide
  modified_base 98: mod_base = OTHER; note = 2'-O-methyl ribonucleotide
  modified_base 99: mod_base = OTHER; note = 2'-O-methyl ribonucleotide
  modified_base 100: mod_base = OTHER; note = 2'-O-methyl ribonucleotide
  modified_base 14: mod_base = OTHER; note = nebularine
  modified_base 65: mod_base = OTHER; note = nebularine
  modified_base 1..4: mod_base = OTHER; note = phosphorothioate linkage
  modified_base 97..100: mod_base = OTHER; note = phosphorothioate linkage
caggttccatgggntgctctgttttagagctagaaatagcaagttaaaataaggctagtccgttntcaacttgaaaaagtggcaccgagtcggtgctttt

SEQ ID NO: 1919 - RNA, 100 nt, synthetic construct
  source 1..100: mol_type = other RNA
  modified_base 1: mod_base = OTHER; note = 2'-O-methyl ribonucleotide
  modified_base 2: mod_base = OTHER; note = 2'-O-methyl ribonucleotide
  modified_base 3: mod_base = OTHER; note = 2'-O-methyl ribonucleotide
  modified_base 21: mod_base = OTHER; note = 2'-O-methyl ribonucleotide
  modified_base 28: mod_base = OTHER; note = 2'-O-methyl ribonucleotide
  modified_base 29: mod_base = OTHER; note = 2'-O-methyl ribonucleotide
  modified_base 30: mod_base = OTHER; note = 2'-O-methyl ribonucleotide
  modified_base 31: mod_base = OTHER; note = 2'-O-methyl ribonucleotide
  modified_base 32: mod_base = OTHER; note = 2'-O-methyl ribonucleotide
  modified_base 33: mod_base = OTHER; note = 2'-O-methyl ribonucleotide
  modified_base 35: mod_base = OTHER; note = 2'-O-methyl ribonucleotide
  modified_base 36: mod_base = OTHER; note = 2'-O-methyl ribonucleotide
  modified_base 37: mod_base = OTHER; note = 2'-O-methyl ribonucleotide
  modified_base 38: mod_base = OTHER; note = 2'-O-methyl ribonucleotide
  modified_base 39: mod_base = OTHER; note = 2'-O-methyl ribonucleotide
  modified_base 40: mod_base = OTHER; note = 2'-O-methyl ribonucleotide
  modified_base 41: mod_base = OTHER; note = 2'-O-methyl ribonucleotide
  modified_base 42: mod_base = OTHER; note = 2'-O-methyl ribonucleotide
  modified_base 46: mod_base = OTHER; note = 2'-O-methyl ribonucleotide
  modified_base 48: mod_base = OTHER; note = 2'-O-methyl ribonucleotide
  modified_base 50: mod_base = OTHER; note = 2'-O-methyl ribonucleotide
  modified_base 52: mod_base = OTHER; note = 2'-O-methyl ribonucleotide
  modified_base 53: mod_base = OTHER; note = 2'-O-methyl ribonucleotide
  modified_base 54: mod_base = OTHER; note = 2'-O-methyl ribonucleotide
  modified_base 55: mod_base = OTHER; note = 2'-O-methyl ribonucleotide
  modified_base 56: mod_base = OTHER; note = 2'-O-methyl ribonucleotide
  modified_base 60: mod_base = OTHER; note = 2'-O-methyl ribonucleotide
  modified_base 61: mod_base = OTHER; note = 2'-O-methyl ribonucleotide
  modified_base 66: mod_base = OTHER; note = 2'-O-methyl ribonucleotide
  modified_base 67: mod_base = OTHER; note = 2'-O-methyl ribonucleotide
  modified_base 70: mod_base = OTHER; note = 2'-O-methyl ribonucleotide
  modified_base 71: mod_base = OTHER; note = 2'-O-methyl ribonucleotide
  modified_base 72: mod_base = OTHER; note = 2'-O-methyl ribonucleotide
  modified_base 73: mod_base = OTHER; note = 2'-O-methyl ribonucleotide
  modified_base 74: mod_base = OTHER; note = 2'-O-methyl ribonucleotide
  modified_base 75: mod_base = OTHER; note = 2'-O-methyl ribonucleotide
  modified_base 76: mod_base = OTHER; note = 2'-O-methyl ribonucleotide
  modified_base 77: mod_base = OTHER; note = 2'-O-methyl ribonucleotide
  modified_base 78: mod_base = OTHER; note = 2'-O-methyl ribonucleotide
  modified_base 79: mod_base = OTHER; note = 2'-O-methyl ribonucleotide
  modified_base 80: mod_base = OTHER; note = 2'-O-methyl ribonucleotide
  modified_base 81: mod_base = OTHER; note = 2'-O-methyl ribonucleotide
  modified_base 83: mod_base = OTHER; note = 2'-O-methyl ribonucleotide
  modified_base 84: mod_base = OTHER; note = 2'-O-methyl ribonucleotide
  modified_base 85: mod_base = OTHER; note = 2'-O-methyl ribonucleotide
  modified_base 86: mod_base = OTHER; note = 2'-O-methyl ribonucleotide
  modified_base 87: mod_base = OTHER; note = 2'-O-methyl ribonucleotide
  modified_base 88: mod_base = OTHER; note = 2'-O-methyl ribonucleotide
  modified_base 89: mod_base = OTHER; note = 2'-O-methyl ribonucleotide
  modified_base 90: mod_base = OTHER; note = 2'-O-methyl ribonucleotide
  modified_base 91: mod_base = OTHER; note = 2'-O-methyl ribonucleotide
  modified_base 92: mod_base = OTHER; note = 2'-O-methyl ribonucleotide
  modified_base 93: mod_base = OTHER; note = 2'-O-methyl ribonucleotide
  modified_base 94: mod_base = OTHER; note = 2'-O-methyl ribonucleotide
  modified_base 95: mod_base = OTHER; note = 2'-O-methyl ribonucleotide
  modified_base 96: mod_base = OTHER; note = 2'-O-methyl ribonucleotide
  modified_base 97: mod_base = OTHER; note = 2'-O-methyl ribonucleotide
  modified_base 98: mod_base = OTHER; note = 2'-O-methyl ribonucleotide
  modified_base 99: mod_base = OTHER; note = 2'-O-methyl ribonucleotide
  modified_base 100: mod_base = OTHER; note = 2'-O-methyl ribonucleotide
  modified_base 14: mod_base = OTHER; note = nebularine
  modified_base 34: mod_base = OTHER; note = nebularine
  modified_base 57: mod_base = OTHER; note = nebularine
  modified_base 65: mod_base = OTHER; note = nebularine
  modified_base 1..4: mod_base = OTHER; note = phosphorothioate linkage
  modified_base 97..100: mod_base = OTHER; note = phosphorothioate linkage
caggttccatgggntgctctgttttagagctagnaatagcaagttaaaataaggctngtccgttntcaacttgaaaaagtggcaccgagtcggtgctttt

SEQ ID NO: 1920 - RNA, 100 nt, synthetic construct
  source 1..100: mol_type = other RNA
  modified_base 1: mod_base = OTHER; note = 2'-O-methyl ribonucleotide
  modified_base 2: mod_base = OTHER; note = 2'-O-methyl ribonucleotide
  modified_base 3: mod_base = OTHER; note = 2'-O-methyl ribonucleotide
  modified_base 21: mod_base = OTHER; note = 2'-O-methyl ribonucleotide
  modified_base 29: mod_base = OTHER; note = 2'-O-methyl ribonucleotide
  modified_base 30: mod_base = OTHER; note = 2'-O-methyl ribonucleotide
  modified_base 31: mod_base = OTHER; note = 2'-O-methyl ribonucleotide
  modified_base 32: mod_base = OTHER; note = 2'-O-methyl ribonucleotide
  modified_base 33: mod_base = OTHER; note = 2'-O-methyl ribonucleotide
  modified_base 35: mod_base = OTHER; note = 2'-O-methyl ribonucleotide
  modified_base 36: mod_base = OTHER; note = 2'-O-methyl ribonucleotide
  modified_base 37: mod_base = OTHER; note = 2'-O-methyl ribonucleotide
  modified_base 38: mod_base = OTHER; note = 2'-O-methyl ribonucleotide
  modified_base 39: mod_base = OTHER; note = 2'-O-methyl ribonucleotide
  modified_base 40: mod_base = OTHER; note = 2'-O-methyl ribonucleotide
  modified_base 41: mod_base = OTHER; note = 2'-O-methyl ribonucleotide
  modified_base 46: mod_base = OTHER; note = 2'-O-methyl ribonucleotide
  modified_base 48: mod_base = OTHER; note = 2'-O-methyl ribonucleotide
  modified_base 50: mod_base = OTHER; note = 2'-O-methyl ribonucleotide
  modified_base 52: mod_base = OTHER; note = 2'-O-methyl ribonucleotide
  modified_base 53: mod_base = OTHER; note = 2'-O-methyl ribonucleotide
  modified_base 54: mod_base = OTHER; note = 2'-O-methyl ribonucleotide
  modified_base 55: mod_base = OTHER; note = 2'-O-methyl ribonucleotide
  modified_base 56: mod_base = OTHER; note = 2'-O-methyl ribonucleotide
  modified_base 60: mod_base = OTHER; note = 2'-O-methyl ribonucleotide
  modified_base 61: mod_base = OTHER; note = 2'-O-methyl ribonucleotide
  modified_base 66: mod_base = OTHER; note = 2'-O-methyl ribonucleotide
  modified_base 67: mod_base = OTHER; note = 2'-O-methyl ribonucleotide
  modified_base 70: mod_base = OTHER; note = 2'-O-methyl ribonucleotide
  modified_base 71: mod_base = OTHER; note = 2'-O-methyl ribonucleotide
  modified_base 72: mod_base = OTHER; note = 2'-O-methyl ribonucleotide
  modified_base 73: mod_base = OTHER; note = 2'-O-methyl ribonucleotide
  modified_base 74: mod_base = OTHER; note = 2'-O-methyl ribonucleotide
  modified_base 75: mod_base = OTHER; note = 2'-O-methyl ribonucleotide
  modified_base 76: mod_base = OTHER; note = 2'-O-methyl ribonucleotide
  modified_base 77: mod_base = OTHER; note = 2'-O-methyl ribonucleotide
  modified_base 78: mod_base = OTHER; note = 2'-O-methyl ribonucleotide
  modified_base 79: mod_base = OTHER; note = 2'-O-methyl ribonucleotide
  modified_base 80: mod_base = OTHER; note = 2'-O-methyl ribonucleotide
  modified_base 81: mod_base = OTHER; note = 2'-O-methyl ribonucleotide
  modified_base 83: mod_base = OTHER; note = 2'-O-methyl ribonucleotide
  modified_base 84: mod_base = OTHER; note = 2'-O-methyl ribonucleotide
  modified_base 85: mod_base = OTHER; note = 2'-O-methyl ribonucleotide
  modified_base 86: mod_base = OTHER; note = 2'-O-methyl ribonucleotide
  modified_base 87: mod_base = OTHER; note = 2'-O-methyl ribonucleotide
  modified_base 88: mod_base = OTHER; note = 2'-O-methyl ribonucleotide
  modified_base 89: mod_base = OTHER; note = 2'-O-methyl ribonucleotide
  modified_base 90: mod_base = OTHER; note = 2'-O-methyl ribonucleotide
  modified_base 91: mod_base = OTHER; note = 2'-O-methyl ribonucleotide
  modified_base 92: mod_base = OTHER; note = 2'-O-methyl ribonucleotide
  modified_base 93: mod_base = OTHER; note = 2'-O-methyl ribonucleotide
  modified_base 94: mod_base = OTHER; note = 2'-O-methyl ribonucleotide
  modified_base 95: mod_base = OTHER; note = 2'-O-methyl ribonucleotide
  modified_base 96: mod_base = OTHER; note = 2'-O-methyl ribonucleotide
  modified_base 97: mod_base = OTHER; note = 2'-O-methyl ribonucleotide
  modified_base 98: mod_base = OTHER; note = 2'-O-methyl ribonucleotide
  modified_base 99: mod_base = OTHER; note = 2'-O-methyl ribonucleotide
  modified_base 100: mod_base = OTHER; note = 2'-O-methyl ribonucleotide
  modified_base 14: mod_base = OTHER; note = nebularine
  modified_base 28: mod_base = OTHER; note = nebularine
  modified_base 34: mod_base = OTHER; note = nebularine
  modified_base 42: mod_base = OTHER; note = nebularine
  modified_base 57: mod_base = OTHER; note = nebularine
  modified_base 65: mod_base = OTHER; note = nebularine
  modified_base 1..4: mod_base = OTHER; note = phosphorothioate linkage
  modified_base 97..100: mod_base = OTHER; note = phosphorothioate linkage
caggttccatgggntgctctgttttagngctagnaatagcangttaaaataaggctngtccgttntcaacttgaaaaagtggcaccgagtcggtgctttt

SEQ ID NO: 1921 - RNA, 100 nt, synthetic construct
  source 1..100: mol_type = other RNA
  modified_base 1: mod_base = OTHER; note = 2'-O-methyl ribonucleotide
  modified_base 2: mod_base = OTHER; note = 2'-O-methyl ribonucleotide
  modified_base 3: mod_base = OTHER; note = 2'-O-methyl ribonucleotide
  modified_base 21: mod_base = OTHER; note = 2'-O-methyl ribonucleotide
  modified_base 28: mod_base = OTHER; note = 2'-O-methyl ribonucleotide
  modified_base 29: mod_base = OTHER; note = 2'-O-methyl ribonucleotide
  modified_base 30: mod_base = OTHER; note = 2'-O-methyl ribonucleotide
  modified_base 31: mod_base = OTHER; note = 2'-O-methyl ribonucleotide
  modified_base 32: mod_base = OTHER; note = 2'-O-methyl ribonucleotide
  modified_base 33: mod_base = OTHER; note = 2'-O-methyl ribonucleotide
  modified_base 34: mod_base = OTHER; note = 2'-O-methyl ribonucleotide
  modified_base 35: mod_base = OTHER; note = 2'-O-methyl ribonucleotide
  modified_base 36: mod_base = OTHER; note = 2'-O-methyl ribonucleotide
  modified_base 37: mod_base = OTHER; note = 2'-O-methyl ribonucleotide
  modified_base 38: mod_base = OTHER; note = 2'-O-methyl ribonucleotide
  modified_base 39: mod_base = OTHER; note = 2'-O-methyl ribonucleotide
  modified_base 40: mod_base = OTHER; note = 2'-O-methyl ribonucleotide
  modified_base 41: mod_base = OTHER; note = 2'-O-methyl ribonucleotide
  modified_base 42: mod_base = OTHER; note = 2'-O-methyl ribonucleotide
  modified_base 46: mod_base = OTHER; note = 2'-O-methyl ribonucleotide
  modified_base 48: mod_base = OTHER; note = 2'-O-methyl ribonucleotide
  modified_base 50: mod_base = OTHER; note = 2'-O-methyl ribonucleotide
  modified_base 52: mod_base = OTHER; note = 2'-O-methyl ribonucleotide
  modified_base 53: mod_base = OTHER; note = 2'-O-methyl ribonucleotide
  modified_base 54: mod_base = OTHER; note = 2'-O-methyl ribonucleotide
  modified_base 55: mod_base = OTHER; note = 2'-O-methyl ribonucleotide
  modified_base 56: mod_base = OTHER; note = 2'-O-methyl ribonucleotide
  modified_base 57: mod_base = OTHER; note = 2'-O-methyl ribonucleotide
  modified_base 60: mod_base = OTHER; note = 2'-O-methyl ribonucleotide
  modified_base 61: mod_base = OTHER; note = 2'-O-methyl ribonucleotide
  modified_base 66: mod_base = OTHER; note = 2'-O-methyl ribonucleotide
  modified_base 67: mod_base = OTHER; note = 2'-O-methyl ribonucleotide
  modified_base 70: mod_base = OTHER; note = 2'-O-methyl ribonucleotide
  modified_base 71: mod_base = OTHER; note = 2'-O-methyl ribonucleotide
  modified_base 72: mod_base = OTHER; note = 2'-O-methyl ribonucleotide
  modified_base 73: mod_base = OTHER; note = 2'-O-methyl ribonucleotide
  modified_base 74: mod_base = OTHER; note = 2'-O-methyl ribonucleotide
  modified_base 75: mod_base = OTHER; note = 2'-O-methyl ribonucleotide
  modified_base 76: mod_base = OTHER; note = 2'-O-methyl ribonucleotide
  modified_base 77: mod_base = OTHER; note = 2'-O-methyl ribonucleotide
  modified_base 78: mod_base = OTHER; note = 2'-O-methyl ribonucleotide
  modified_base 79: mod_base = OTHER; note = 2'-O-methyl ribonucleotide
  modified_base 80: mod_base = OTHER; note = 2'-O-methyl ribonucleotide
  modified_base 81: mod_base = OTHER; note = 2'-O-methyl ribonucleotide
  modified_base 83: mod_base = OTHER; note = 2'-O-methyl ribonucleotide
  modified_base 84: mod_base = OTHER; note = 2'-O-methyl ribonucleotide
  modified_base 85: mod_base = OTHER; note = 2'-O-methyl ribonucleotide
  modified_base 86: mod_base = OTHER; note = 2'-O-methyl ribonucleotide
  modified_base 87: mod_base = OTHER; note = 2'-O-methyl ribonucleotide
  modified_base 88: mod_base = OTHER; note = 2'-O-methyl ribonucleotide
  modified_base 89: mod_base = OTHER; note = 2'-O-methyl ribonucleotide
  modified_base 90: mod_base = OTHER; note = 2'-O-methyl ribonucleotide
  modified_base 91: mod_base = OTHER; note = 2'-O-methyl ribonucleotide
  modified_base 92: mod_base = OTHER; note = 2'-O-methyl ribonucleotide
  modified_base 93: mod_base = OTHER; note = 2'-O-methyl ribonucleotide
  modified_base 94: mod_base = OTHER; note = 2'-O-methyl ribonucleotide
  modified_base 95: mod_base = OTHER; note = 2'-O-methyl ribonucleotide
  modified_base 96: mod_base = OTHER; note = 2'-O-methyl ribonucleotide
  modified_base 97: mod_base = OTHER; note = 2'-O-methyl ribonucleotide
  modified_base 98: mod_base = OTHER; note = 2'-O-methyl ribonucleotide
  modified_base 99: mod_base = OTHER; note = 2'-O-methyl ribonucleotide
  modified_base 100: mod_base = OTHER; note = 2'-O-methyl ribonucleotide
  modified_base 9: mod_base = OTHER; note = nebularine
  modified_base 14: mod_base = OTHER; note = nebularine
  modified_base 28: mod_base = OTHER; note = nebularine
  modified_base 34: mod_base = OTHER; note = nebularine
  modified_base 42: mod_base = OTHER; note = nebularine
  modified_base 57: mod_base = OTHER; note = nebularine
  modified_base 1..4: mod_base = OTHER; note = phosphorothioate linkage
  modified_base 97..100: mod_base = OTHER; note = phosphorothioate linkage
caggttccntgggntgctctgttttagngctagnaatagcangttaaaataaggctngtccgttatcaacttgaaaaagtggcaccgagtcggtgctttt

SEQ ID NO: 1922 - RNA, 100 nt, synthetic construct
  source 1..100: mol_type = other RNA
  modified_base 1: mod_base = OTHER; note = 2'-O-methyl ribonucleotide
  modified_base 2: mod_base = OTHER; note = 2'-O-methyl ribonucleotide
  modified_base 3: mod_base = OTHER; note = 2'-O-methyl ribonucleotide
  modified_base 21: mod_base = OTHER; note = 2'-O-methyl ribonucleotide
  modified_base 28: mod_base = OTHER; note = 2'-O-methyl ribonucleotide
  modified_base 29: mod_base = OTHER; note = 2'-O-methyl ribonucleotide
  modified_base 30: mod_base = OTHER; note = 2'-O-methyl ribonucleotide
  modified_base 31: mod_base = OTHER; note = 2'-O-methyl ribonucleotide
  modified_base 32: mod_base = OTHER; note = 2'-O-methyl ribonucleotide
  modified_base 33: mod_base = OTHER; note = 2'-O-methyl ribonucleotide
  modified_base 34: mod_base = OTHER; note = 2'-O-methyl ribonucleotide
  modified_base 35: mod_base = OTHER; note = 2'-O-methyl ribonucleotide
  modified_base 36: mod_base = OTHER; note = 2'-O-methyl ribonucleotide
  modified_base 37: mod_base = OTHER; note = 2'-O-methyl ribonucleotide
  modified_base 38: mod_base = OTHER; note = 2'-O-methyl ribonucleotide
  modified_base 39: mod_base = OTHER; note = 2'-O-methyl ribonucleotide
  modified_base 40: mod_base = OTHER; note = 2'-O-methyl ribonucleotide
  modified_base 41: mod_base = OTHER; note = 2'-O-methyl ribonucleotide
  modified_base 42: mod_base = OTHER; note = 2'-O-methyl ribonucleotide
  modified_base 46: mod_base = OTHER; note = 2'-O-methyl ribonucleotide
  modified_base 48: mod_base = OTHER; note = 2'-O-methyl ribonucleotide
  modified_base 50: mod_base = OTHER; note = 2'-O-methyl ribonucleotide
  modified_base 52: mod_base = OTHER; note = 2'-O-methyl ribonucleotide
  modified_base 53: mod_base = OTHER; note = 2'-O-methyl ribonucleotide
  modified_base 54: mod_base = OTHER; note = 2'-O-methyl ribonucleotide
  modified_base 55: mod_base = OTHER; note = 2'-O-methyl ribonucleotide
  modified_base 56: mod_base = OTHER; note = 2'-O-methyl ribonucleotide
  modified_base 57: mod_base = OTHER; note = 2'-O-methyl ribonucleotide
  modified_base 60: mod_base = OTHER; note = 2'-O-methyl ribonucleotide
  modified_base 61: mod_base = OTHER; note = 2'-O-methyl ribonucleotide
  modified_base 66: mod_base = OTHER; note = 2'-O-methyl ribonucleotide
  modified_base 67: mod_base = OTHER; note = 2'-O-methyl ribonucleotide
  modified_base 70: mod_base = OTHER; note = 2'-O-methyl ribonucleotide
  modified_base 71: mod_base = OTHER; note = 2'-O-methyl ribonucleotide
  modified_base 72: mod_base = OTHER; note = 2'-O-methyl ribonucleotide
  modified_base 73: mod_base = OTHER; note = 2'-O-methyl ribonucleotide
  modified_base 74: mod_base = OTHER; note = 2'-O-methyl ribonucleotide
  modified_base 75: mod_base = OTHER; note = 2'-O-methyl ribonucleotide
  modified_base 76: mod_base = OTHER; note = 2'-O-methyl ribonucleotide
  modified_base 77: mod_base = OTHER; note = 2'-O-methyl ribonucleotide
  modified_base 78: mod_base = OTHER; note = 2'-O-methyl ribonucleotide
  modified_base 79: mod_base = OTHER; note = 2'-O-methyl ribonucleotide
  modified_base 80: mod_base = OTHER; note = 2'-O-methyl ribonucleotide
  modified_base 81: mod_base = OTHER; note = 2'-O-methyl ribonucleotide
  modified_base 83: mod_base = OTHER; note = 2'-O-methyl ribonucleotide
  modified_base 84: mod_base = OTHER; note = 2'-O-methyl ribonucleotide
  modified_base 85: mod_base = OTHER; note = 2'-O-methyl ribonucleotide
  modified_base 86: mod_base = OTHER; note = 2'-O-methyl ribonucleotide
  modified_base 87: mod_base = OTHER; note = 2'-O-methyl ribonucleotide
  modified_base 88: mod_base = OTHER; note = 2'-O-methyl ribonucleotide
  modified_base 89: mod_base = OTHER; note = 2'-O-methyl ribonucleotide
  modified_base 90: mod_base = OTHER; note = 2'-O-methyl ribonucleotide
  modified_base 91: mod_base = OTHER; note = 2'-O-methyl ribonucleotide
  modified_base 92: mod_base = OTHER; note = 2'-O-methyl ribonucleotide
  modified_base 93: mod_base = OTHER; note = 2'-O-methyl ribonucleotide
  modified_base 94: mod_base = OTHER; note = 2'-O-methyl ribonucleotide
  modified_base 95: mod_base = OTHER; note = 2'-O-methyl ribonucleotide
  modified_base 96: mod_base = OTHER; note = 2'-O-methyl ribonucleotide
  modified_base 97: mod_base = OTHER; note = 2'-O-methyl ribonucleotide
  modified_base 98: mod_base = OTHER; note = 2'-O-methyl ribonucleotide
  modified_base 99: mod_base = OTHER; note = 2'-O-methyl ribonucleotide
  modified_base 100: mod_base = OTHER; note = 2'-O-methyl ribonucleotide
  modified_base 9: mod_base = OTHER; note = nebularine
  modified_base 14: mod_base = OTHER; note = nebularine
  modified_base 34: mod_base = OTHER; note = nebularine
  modified_base 42: mod_base = OTHER; note = nebularine
  modified_base 57: mod_base = OTHER; note = nebularine
  modified_base 1..4: mod_base = OTHER; note = phosphorothioate linkage
  modified_base 97..100: mod_base = OTHER; note = phosphorothioate linkage
caggttccntgggntgctctgttttagagctagnaatagcangttaaaataaggctngtccgttatcaacttgaaaaagtggcaccgagtcggtgctttt

SEQ ID NO: 1923 - RNA, 100 nt, synthetic construct
  source 1..100: mol_type = other RNA
  modified_base 1: mod_base = OTHER; note = 2'-O-methyl ribonucleotide
  modified_base 2: mod_base = OTHER; note = 2'-O-methyl ribonucleotide
  modified_base 3: mod_base = OTHER; note = 2'-O-methyl ribonucleotide
  modified_base 21: mod_base = OTHER; note = 2'-O-methyl ribonucleotide
  modified_base 28: mod_base = OTHER; note = 2'-O-methyl ribonucleotide
  modified_base 29: mod_base = OTHER; note = 2'-O-methyl ribonucleotide
  modified_base 30: mod_base = OTHER; note = 2'-O-methyl ribonucleotide
  modified_base 31: mod_base = OTHER; note = 2'-O-methyl ribonucleotide
  modified_base 32: mod_base = OTHER; note = 2'-O-methyl ribonucleotide
  modified_base 33: mod_base = OTHER; note = 2'-O-methyl ribonucleotide
  modified_base 34: mod_base = OTHER; note = 2'-O-methyl ribonucleotide
  modified_base 35: mod_base = OTHER; note = 2'-O-methyl ribonucleotide
  modified_base 36: mod_base = OTHER; note = 2'-O-methyl ribonucleotide
  modified_base 37: mod_base = OTHER; note = 2'-O-methyl ribonucleotide
  modified_base 38: mod_base = OTHER; note = 2'-O-methyl ribonucleotide
  modified_base 39: mod_base = OTHER; note = 2'-O-methyl ribonucleotide
  modified_base 40: mod_base = OTHER; note = 2'-O-methyl ribonucleotide
  modified_base 41: mod_base = OTHER; note = 2'-O-methyl ribonucleotide
  modified_base 42: mod_base = OTHER; note = 2'-O-methyl ribonucleotide
  modified_base 46: mod_base = OTHER; note = 2'-O-methyl ribonucleotide
  modified_base 48: mod_base = OTHER; note = 2'-O-methyl ribonucleotide
  modified_base 50: mod_base = OTHER; note = 2'-O-methyl ribonucleotide
  modified_base 52: mod_base = OTHER; note = 2'-O-methyl ribonucleotide
  modified_base 53: mod_base = OTHER; note = 2'-O-methyl ribonucleotide
  modified_base 54: mod_base = OTHER; note = 2'-O-methyl ribonucleotide
  modified_base 55: mod_base = OTHER; note = 2'-O-methyl ribonucleotide
  modified_base 56: mod_base = OTHER; note = 2'-O-methyl ribonucleotide
  modified_base 57: mod_base = OTHER; note = 2'-O-methyl ribonucleotide
  modified_base 60: mod_base = OTHER; note = 2'-O-methyl ribonucleotide
  modified_base 61: mod_base = OTHER; note = 2'-O-methyl ribonucleotide
  modified_base 66: mod_base = OTHER; note = 2'-O-methyl ribonucleotide
  modified_base 67: mod_base = OTHER; note = 2'-O-methyl ribonucleotide
  modified_base 70: mod_base = OTHER; note = 2'-O-methyl ribonucleotide
  modified_base 71: mod_base = OTHER; note = 2'-O-methyl ribonucleotide
  modified_base 72: mod_base = OTHER; note = 2'-O-methyl ribonucleotide
  modified_base 73: mod_base = OTHER; note = 2'-O-methyl ribonucleotide
  modified_base 74: mod_base = OTHER; note = 2'-O-methyl ribonucleotide
  modified_base 75: mod_base = OTHER; note = 2'-O-methyl ribonucleotide
  modified_base 76: mod_base = OTHER; note = 2'-O-methyl ribonucleotide
  modified_base 77: mod_base = OTHER; note = 2'-O-methyl ribonucleotide
  modified_base 78: mod_base = OTHER; note = 2'-O-methyl ribonucleotide
  modified_base 79: mod_base = OTHER; note = 2'-O-methyl ribonucleotide
  modified_base 80: mod_base = OTHER; note = 2'-O-methyl ribonucleotide
  modified_base 81: mod_base = OTHER; note = 2'-O-methyl ribonucleotide
  modified_base 83: mod_base = OTHER; note = 2'-O-methyl ribonucleotide
  modified_base 84: mod_base = OTHER; note = 2'-O-methyl ribonucleotide
  modified_base 85: mod_base = OTHER; note = 2'-O-methyl ribonucleotide
  modified_base 86: mod_base = OTHER; note = 2'-O-methyl ribonucleotide
  modified_base 87: mod_base = OTHER; note = 2'-O-methyl ribonucleotide
  modified_base 88: mod_base = OTHER; note = 2'-O-methyl ribonucleotide
  modified_base 89: mod_base = OTHER; note = 2'-O-methyl ribonucleotide
  modified_base 90: mod_base = OTHER; note = 2'-O-methyl ribonucleotide
  modified_base 91: mod_base = OTHER; note = 2'-O-methyl ribonucleotide
  modified_base 92: mod_base = OTHER; note = 2'-O-methyl ribonucleotide
  modified_base 93: mod_base = OTHER; note = 2'-O-methyl ribonucleotide
  modified_base 94: mod_base = OTHER; note = 2'-O-methyl ribonucleotide
  modified_base 95: mod_base = OTHER; note = 2'-O-methyl ribonucleotide
  modified_base 96: mod_base = OTHER; note = 2'-O-methyl ribonucleotide
  modified_base 97: mod_base = OTHER; note = 2'-O-methyl ribonucleotide
  modified_base 98: mod_base = OTHER; note = 2'-O-methyl ribonucleotide
  modified_base 99: mod_base = OTHER; note = 2'-O-methyl ribonucleotide
  modified_base 100: mod_base = OTHER; note = 2'-O-methyl ribonucleotide
  modified_base 9: mod_base = OTHER; note = nebularine
  modified_base 14: mod_base = OTHER; note = nebularine
  modified_base 42: mod_base = OTHER; note = nebularine
  modified_base 57: mod_base = OTHER; note = nebularine
  modified_base 1..4: mod_base = OTHER; note = phosphorothioate linkage
  modified_base 97..100: mod_base = OTHER; note = phosphorothioate linkage
caggttccntgggntgctctgttttagagctagaaatagcangttaaaataaggctngtccgttatcaacttgaaaaagtggcaccgagtcggtgctttt

SEQ ID NO: 1924 - RNA, 100 nt, synthetic construct
  source 1..100: mol_type = other RNA
  modified_base 1: mod_base = OTHER; note = 2'-O-methyl ribonucleotide
  modified_base 2: mod_base = OTHER; note = 2'-O-methyl ribonucleotide
  modified_base 3: mod_base = OTHER; note = 2'-O-methyl ribonucleotide
  modified_base 21: mod_base = OTHER; note = 2'-O-methyl ribonucleotide
  modified_base 28: mod_base = OTHER; note = 2'-O-methyl ribonucleotide
  modified_base 29: mod_base = OTHER; note = 2'-O-methyl ribonucleotide
  modified_base 30: mod_base = OTHER; note = 2'-O-methyl ribonucleotide
  modified_base 31: mod_base = OTHER; note = 2'-O-methyl ribonucleotide
  modified_base 32: mod_base = OTHER; note = 2'-O-methyl ribonucleotide
  modified_base 33: mod_base = OTHER; note = 2'-O-methyl ribonucleotide
  modified_base 34: mod_base = OTHER; note = 2'-O-methyl ribonucleotide
  modified_base 35: mod_base = OTHER; note = 2'-O-methyl ribonucleotide
  modified_base 36: mod_base = OTHER; note = 2'-O-methyl ribonucleotide
  modified_base 37: mod_base = OTHER; note = 2'-O-methyl ribonucleotide
  modified_base 38: mod_base = OTHER; note = 2'-O-methyl ribonucleotide
  modified_base 39: mod_base = OTHER; note = 2'-O-methyl ribonucleotide
  modified_base 40: mod_base = OTHER; note = 2'-O-methyl ribonucleotide
  modified_base 41: mod_base = OTHER; note = 2'-O-methyl ribonucleotide
  modified_base 42: mod_base = OTHER; note = 2'-O-methyl ribonucleotide
  modified_base 46: mod_base = OTHER; note = 2'-O-methyl ribonucleotide
  modified_base 48: mod_base = OTHER; note = 2'-O-methyl ribonucleotide
  modified_base 50: mod_base = OTHER; note = 2'-O-methyl ribonucleotide
  modified_base 52: mod_base = OTHER; note = 2'-O-methyl ribonucleotide
  modified_base 53: mod_base = OTHER; note = 2'-O-methyl ribonucleotide
  modified_base 54: mod_base = OTHER; note = 2'-O-methyl ribonucleotide
  modified_base 55: mod_base = OTHER; note = 2'-O-methyl ribonucleotide
  modified_base 56: mod_base = OTHER; note = 2'-O-methyl ribonucleotide
  modified_base 57: mod_base = OTHER; note = 2'-O-methyl ribonucleotide
  modified_base 60: mod_base = OTHER; note = 2'-O-methyl ribonucleotide
  modified_base 61: mod_base = OTHER; note = 2'-O-methyl ribonucleotide
  modified_base 66: mod_base = OTHER; note = 2'-O-methyl ribonucleotide
  modified_base 67: mod_base = OTHER; note = 2'-O-methyl ribonucleotide
  modified_base 70: mod_base = OTHER; note = 2'-O-methyl ribonucleotide
  modified_base 71: mod_base = OTHER; note = 2'-O-methyl ribonucleotide
  modified_base 72: mod_base = OTHER; note = 2'-O-methyl ribonucleotide
  modified_base 73: mod_base = OTHER; note = 2'-O-methyl ribonucleotide
  modified_base 74: mod_base = OTHER; note = 2'-O-methyl ribonucleotide
  modified_base 75: mod_base = OTHER; note = 2'-O-methyl ribonucleotide
  modified_base 76: mod_base = OTHER; note = 2'-O-methyl ribonucleotide
  modified_base 77: mod_base = OTHER; note = 2'-O-methyl ribonucleotide
  modified_base 78: mod_base = OTHER; note = 2'-O-methyl ribonucleotide
  modified_base 79: mod_base = OTHER; note = 2'-O-methyl ribonucleotide
  modified_base 80: mod_base = OTHER; note = 2'-O-methyl ribonucleotide
  modified_base 81: mod_base = OTHER; note = 2'-O-methyl ribonucleotide
  modified_base 83: mod_base = OTHER; note = 2'-O-methyl ribonucleotide
  modified_base 84: mod_base = OTHER; note = 2'-O-methyl ribonucleotide
  modified_base 85: mod_base = OTHER; note = 2'-O-methyl ribonucleotide
  modified_base 86: mod_base = OTHER; note = 2'-O-methyl ribonucleotide
  modified_base 87: mod_base = OTHER; note = 2'-O-methyl ribonucleotide
  modified_base 88: mod_base = OTHER; note = 2'-O-methyl ribonucleotide
  modified_base 89: mod_base = OTHER; note = 2'-O-methyl ribonucleotide
  modified_base 90: mod_base = OTHER; note = 2'-O-methyl ribonucleotide
  modified_base 91: mod_base = OTHER; note = 2'-O-methyl ribonucleotide
  modified_base 92: mod_base = OTHER; note = 2'-O-methyl ribonucleotide
  modified_base 93: mod_base = OTHER; note = 2'-O-methyl ribonucleotide
  modified_base 94: mod_base = OTHER; note = 2'-O-methyl ribonucleotide
  modified_base 95: mod_base = OTHER; note = 2'-O-methyl ribonucleotide
  modified_base 96: mod_base = OTHER; note = 2'-O-methyl ribonucleotide
  modified_base 97: mod_base = OTHER; note = 2'-O-methyl ribonucleotide
  modified_base 98: mod_base = OTHER; note = 2'-O-methyl ribonucleotide
  modified_base 99: mod_base = OTHER; note = 2'-O-methyl ribonucleotide
  modified_base 100: mod_base = OTHER; note = 2'-O-methyl ribonucleotide
  modified_base 9: mod_base = OTHER; note = nebularine
  modified_base 14: mod_base = OTHER; note = nebularine
  modified_base 57: mod_base = OTHER; note = nebularine
  modified_base 1..4: mod_base = OTHER; note = phosphorothioate linkage
  modified_base 97..100: mod_base = OTHER; note = phosphorothioate linkage
caggttccntgggntgctctgttttagagctagaaatagcaagttaaaataaggctngtccgttatcaacttgaaaaagtggcaccgagtcggtgctttt

SEQ ID NO: 1925 - RNA, 100 nt, synthetic construct
  source 1..100: mol_type = other RNA
  modified_base 1: mod_base = OTHER; note = 2'-O-methyl ribonucleotide
  modified_base 2: mod_base = OTHER; note = 2'-O-methyl ribonucleotide
  modified_base 3: mod_base = OTHER; note = 2'-O-methyl ribonucleotide
  modified_base 21: mod_base = OTHER; note = 2'-O-methyl ribonucleotide
  modified_base 28: mod_base = OTHER; note = 2'-O-methyl ribonucleotide
  modified_base 29: mod_base = OTHER; note = 2'-O-methyl ribonucleotide
  modified_base 30: mod_base = OTHER; note = 2'-O-methyl ribonucleotide
  modified_base 31: mod_base = OTHER; note = 2'-O-methyl ribonucleotide
  modified_base 32: mod_base = OTHER; note = 2'-O-methyl ribonucleotide
  modified_base 33: mod_base = OTHER; note = 2'-O-methyl ribonucleotide
  modified_base 34: mod_base = OTHER; note = 2'-O-methyl ribonucleotide
  modified_base 35: mod_base = OTHER; note = 2'-O-methyl ribonucleotide
  modified_base 36: mod_base = OTHER; note = 2'-O-methyl ribonucleotide
  modified_base 37: mod_base = OTHER; note = 2'-O-methyl ribonucleotide
  modified_base 38: mod_base = OTHER; note = 2'-O-methyl ribonucleotide
  modified_base 39: mod_base = OTHER; note = 2'-O-methyl ribonucleotide
  modified_base 40: mod_base = OTHER; note = 2'-O-methyl ribonucleotide
  modified_base 41: mod_base = OTHER; note = 2'-O-methyl ribonucleotide
  modified_base 42: mod_base = OTHER; note = 2'-O-methyl ribonucleotide
  modified_base 46: mod_base = OTHER; note = 2'-O-methyl ribonucleotide
  modified_base 48: mod_base = OTHER; note = 2'-O-methyl ribonucleotide
  modified_base 50: mod_base = OTHER; note = 2'-O-methyl ribonucleotide
  modified_base 52: mod_base = OTHER; note = 2'-O-methyl ribonucleotide
  modified_base 53: mod_base = OTHER; note = 2'-O-methyl ribonucleotide
  modified_base 54: mod_base = OTHER; note = 2'-O-methyl ribonucleotide
  modified_base 55: mod_base = OTHER; note = 2'-O-methyl ribonucleotide
  modified_base 56: mod_base = OTHER; note = 2'-O-methyl ribonucleotide
  modified_base 57: mod_base = OTHER; note = 2'-O-methyl ribonucleotide
  modified_base 60: mod_base = OTHER; note = 2'-O-methyl ribonucleotide
  modified_base 61: mod_base = OTHER; note = 2'-O-methyl ribonucleotide
  modified_base 66: mod_base = OTHER; note = 2'-O-methyl ribonucleotide
  modified_base 67: mod_base = OTHER; note = 2'-O-methyl ribonucleotide
  modified_base 70: mod_base = OTHER; note = 2'-O-methyl ribonucleotide
  modified_base 71: mod_base = OTHER; note = 2'-O-methyl ribonucleotide
  modified_base 72: mod_base = OTHER; note = 2'-O-methyl ribonucleotide
  modified_base 73: mod_base = OTHER; note = 2'-O-methyl ribonucleotide
  modified_base 74: mod_base = OTHER; note = 2'-O-methyl ribonucleotide
  modified_base 75: mod_base = OTHER; note = 2'-O-methyl ribonucleotide
  modified_base 76: mod_base = OTHER; note = 2'-O-methyl ribonucleotide
  modified_base 77: mod_base = OTHER; note = 2'-O-methyl ribonucleotide
  modified_base 78: mod_base = OTHER; note = 2'-O-methyl ribonucleotide
  modified_base 79: mod_base = OTHER; note = 2'-O-methyl ribonucleotide
  modified_base 80: mod_base = OTHER; note = 2'-O-methyl ribonucleotide
  modified_base 81: mod_base = OTHER; note = 2'-O-methyl ribonucleotide
  modified_base 83: mod_base = OTHER; note = 2'-O-methyl ribonucleotide
  modified_base 84: mod_base = OTHER; note = 2'-O-methyl ribonucleotide
  modified_base 85: mod_base = OTHER; note = 2'-O-methyl ribonucleotide
  modified_base 86: mod_base = OTHER; note = 2'-O-methyl ribonucleotide
  modified_base 87: mod_base = OTHER; note = 2'-O-methyl ribonucleotide
  modified_base 88: mod_base = OTHER; note = 2'-O-methyl ribonucleotide
  modified_base 89: mod_base = OTHER; note = 2'-O-methyl ribonucleotide
  modified_base 90: mod_base = OTHER; note = 2'-O-methyl ribonucleotide
  modified_base 91: mod_base = OTHER; note = 2'-O-methyl ribonucleotide
  modified_base 92: mod_base = OTHER; note = 2'-O-methyl ribonucleotide
  modified_base 93: mod_base = OTHER; note = 2'-O-methyl ribonucleotide
  modified_base 94: mod_base = OTHER; note = 2'-O-methyl ribonucleotide
  modified_base 95: mod_base = OTHER; note = 2'-O-methyl ribonucleotide
  modified_base 96: mod_base = OTHER; note = 2'-O-methyl ribonucleotide
  modified_base 97: mod_base = OTHER; note = 2'-O-methyl ribonucleotide
  modified_base 98: mod_base = OTHER; note = 2'-O-methyl ribonucleotide
  modified_base 99: mod_base = OTHER; note = 2'-O-methyl ribonucleotide
  modified_base 100: mod_base = OTHER; note = 2'-O-methyl ribonucleotide
  modified_base 9: mod_base = OTHER; note = nebularine
  modified_base 14: mod_base = OTHER; note = nebularine
  modified_base 28: mod_base = OTHER; note = nebularine
  modified_base 1..4: mod_base = OTHER; note = phosphorothioate linkage
  modified_base 97..100: mod_base = OTHER; note = phosphorothioate linkage
caggttccntgggntgctctgttttagngctagaaatagcaagttaaaataaggctagtccgttatcaacttgaaaaagtggcaccgagtcggtgctttt

SEQ ID NO: 1926 - RNA, 100 nt, synthetic construct
  source 1..100: mol_type = other RNA
  modified_base 1: mod_base = OTHER; note = 2'-O-methyl ribonucleotide
  modified_base 2: mod_base = OTHER; note = 2'-O-methyl ribonucleotide
  modified_base 3: mod_base = OTHER; note = 2'-O-methyl ribonucleotide
  modified_base 21: mod_base = OTHER; note = 2'-O-methyl ribonucleotide
  modified_base 28: mod_base = OTHER; note = 2'-O-methyl ribonucleotide
  modified_base 29: mod_base = OTHER; note = 2'-O-methyl ribonucleotide
  modified_base 30: mod_base = OTHER; note = 2'-O-methyl ribonucleotide
  modified_base 31: mod_base = OTHER; note = 2'-O-methyl ribonucleotide
  modified_base 32: mod_base = OTHER; note = 2'-O-methyl ribonucleotide
  modified_base 33: mod_base = OTHER; note = 2'-O-methyl ribonucleotide
  modified_base 34: mod_base = OTHER; note = 2'-O-methyl ribonucleotide
  modified_base 35: mod_base = OTHER; note = 2'-O-methyl ribonucleotide
  modified_base 36: mod_base = OTHER; note = 2'-O-methyl ribonucleotide
  modified_base 37: mod_base = OTHER; note = 2'-O-methyl ribonucleotide
  modified_base 38: mod_base = OTHER; note = 2'-O-methyl ribonucleotide
  modified_base 39: mod_base = OTHER; note = 2'-O-methyl ribonucleotide
  modified_base 40: mod_base = OTHER; note = 2'-O-methyl ribonucleotide
  modified_base 41: mod_base = OTHER; note = 2'-O-methyl ribonucleotide
  modified_base 42: mod_base = OTHER; note = 2'-O-methyl ribonucleotide
  modified_base 46: mod_base = OTHER; note = 2'-O-methyl ribonucleotide
  modified_base 48: mod_base = OTHER; note = 2'-O-methyl ribonucleotide
  modified_base 50: mod_base = OTHER; note = 2'-O-methyl ribonucleotide
  modified_base 52: mod_base = OTHER; note = 2'-O-methyl ribonucleotide
  modified_base 53: mod_base = OTHER; note = 2'-O-methyl ribonucleotide
  modified_base 54: mod_base = OTHER; note = 2'-O-methyl ribonucleotide
  modified_base 55: mod_base = OTHER; note = 2'-O-methyl ribonucleotide
  modified_base 56: mod_base = OTHER; note = 2'-O-methyl ribonucleotide
  modified_base 57: mod_base = OTHER; note = 2'-O-methyl ribonucleotide
  modified_base 60: mod_base = OTHER; note = 2'-O-methyl ribonucleotide
  modified_base 61: mod_base = OTHER; note = 2'-O-methyl ribonucleotide
  modified_base 66: mod_base = OTHER; note = 2'-O-methyl ribonucleotide
  modified_base 67: mod_base = OTHER; note = 2'-O-methyl ribonucleotide
  modified_base 70: mod_base = OTHER; note = 2'-O-methyl ribonucleotide
  modified_base 71: mod_base = OTHER; note = 2'-O-methyl ribonucleotide
  modified_base 72: mod_base = OTHER; note = 2'-O-methyl ribonucleotide
  modified_base 73: mod_base = OTHER; note = 2'-O-methyl ribonucleotide
  modified_base 74: mod_base = OTHER; note = 2'-O-methyl ribonucleotide
  modified_base 75: mod_base = OTHER; note = 2'-O-methyl ribonucleotide
  modified_base 76: mod_base = OTHER; note = 2'-O-methyl ribonucleotide
  modified_base 77: mod_base = OTHER; note = 2'-O-methyl ribonucleotide
  modified_base 78: mod_base = OTHER; note = 2'-O-methyl ribonucleotide
  modified_base 79: mod_base = OTHER; note = 2'-O-methyl ribonucleotide
  modified_base 80: mod_base = OTHER; note = 2'-O-methyl ribonucleotide
  modified_base 81: mod_base = OTHER; note = 2'-O-methyl ribonucleotide
  modified_base 83: mod_base = OTHER; note = 2'-O-methyl ribonucleotide
  modified_base 84: mod_base = OTHER; note = 2'-O-methyl ribonucleotide
  modified_base 85: mod_base = OTHER; note = 2'-O-methyl ribonucleotide
  modified_base 86: mod_base = OTHER; note = 2'-O-methyl ribonucleotide
  modified_base 87: mod_base = OTHER; note = 2'-O-methyl ribonucleotide
  modified_base 88: mod_base = OTHER; note = 2'-O-methyl ribonucleotide
  modified_base 89: mod_base = OTHER; note = 2'-O-methyl ribonucleotide
  modified_base 90: mod_base = OTHER; note = 2'-O-methyl ribonucleotide
  modified_base 91: mod_base = OTHER; note = 2'-O-methyl ribonucleotide
  modified_base 92: mod_base = OTHER; note = 2'-O-methyl ribonucleotide
  modified_base 93: mod_base = OTHER; note = 2'-O-methyl ribonucleotide
  modified_base 94: mod_base = OTHER; note = 2'-O-methyl ribonucleotide
  modified_base 95: mod_base = OTHER; note = 2'-O-methyl ribonucleotide
  modified_base 96: mod_base = OTHER; note = 2'-O-methyl ribonucleotide
  modified_base 97: mod_base = OTHER; note = 2'-O-methyl ribonucleotide
  modified_base 98: mod_base = OTHER; note = 2'-O-methyl ribonucleotide
  modified_base 99: mod_base = OTHER; note = 2'-O-methyl ribonucleotide
  modified_base 100: mod_base = OTHER; note = 2'-O-methyl ribonucleotide
  modified_base 9: mod_base = OTHER; note = nebularine
  modified_base 14: mod_base = OTHER; note = nebularine
  modified_base 42: mod_base = OTHER; note = nebularine
  modified_base 1..4: mod_base = OTHER; note = phosphorothioate linkage
  modified_base 97..100: mod_base = OTHER; note = phosphorothioate linkage
caggttccntgggntgctctgttttagagctagaaatagcangttaaaataaggctagtccgttatcaacttgaaaaagtggcaccgagtcggtgctttt

SEQ ID NO: 1927 - RNA, 100 nt, synthetic construct
  source 1..100: mol_type = other RNA
  modified_base 1: mod_base = OTHER; note = 2'-O-methyl ribonucleotide
  modified_base 2: mod_base = OTHER; note = 2'-O-methyl ribonucleotide
  modified_base 3: mod_base = OTHER; note = 2'-O-methyl ribonucleotide
  modified_base 21: mod_base = OTHER; note = 2'-O-methyl ribonucleotide
  modified_base 28: mod_base = OTHER; note = 2'-O-methyl ribonucleotide
  modified_base 29: mod_base = OTHER; note = 2'-O-methyl ribonucleotide
  modified_base 30: mod_base = OTHER; note = 2'-O-methyl ribonucleotide
  modified_base 31: mod_base = OTHER; note = 2'-O-methyl ribonucleotide
  modified_base 32: mod_base = OTHER; note = 2'-O-methyl ribonucleotide
  modified_base 33: mod_base = OTHER; note = 2'-O-methyl ribonucleotide
  modified_base 34: mod_base = OTHER; note = 2'-O-methyl ribonucleotide
  modified_base 35: mod_base = OTHER; note = 2'-O-methyl ribonucleotide
  modified_base 36: mod_base = OTHER; note = 2'-O-methyl ribonucleotide
  modified_base 37: mod_base = OTHER; note = 2'-O-methyl ribonucleotide
  modified_base 38: mod_base = OTHER; note = 2'-O-methyl ribonucleotide
  modified_base 39: mod_base = OTHER; note = 2'-O-methyl ribonucleotide
  modified_base 40: mod_base = OTHER; note = 2'-O-methyl ribonucleotide
  modified_base 41: mod_base = OTHER; note = 2'-O-methyl ribonucleotide
  modified_base 42: mod_base = OTHER; note = 2'-O-methyl ribonucleotide
  modified_base 46: mod_base = OTHER; note = 2'-O-methyl ribonucleotide
  modified_base 48: mod_base = OTHER; note = 2'-O-methyl ribonucleotide
  modified_base 50: mod_base = OTHER; note = 2'-O-methyl ribonucleotide
  modified_base 52: mod_base = OTHER; note = 2'-O-methyl ribonucleotide
  modified_base 53: mod_base = OTHER; note = 2'-O-methyl ribonucleotide
  modified_base 54: mod_base = OTHER; note = 2'-O-methyl ribonucleotide
  modified_base 55: mod_base = OTHER; note = 2'-O-methyl ribonucleotide
  modified_base 56: mod_base = OTHER; note = 2'-O-methyl ribonucleotide
  modified_base 57: mod_base = OTHER; note = 2'-O-methyl ribonucleotide
  modified_base 60: mod_base = OTHER; note = 2'-O-methyl ribonucleotide
  modified_base 61: mod_base = OTHER; note = 2'-O-methyl ribonucleotide
  modified_base 66: mod_base = OTHER; note = 2'-O-methyl ribonucleotide
  modified_base 67: mod_base = OTHER; note = 2'-O-methyl ribonucleotide
  modified_base 70: mod_base = OTHER; note = 2'-O-methyl ribonucleotide
  modified_base 71: mod_base = OTHER; note = 2'-O-methyl ribonucleotide
  modified_base 72: mod_base = OTHER; note = 2'-O-methyl ribonucleotide
  modified_base 73: mod_base = OTHER; note = 2'-O-methyl ribonucleotide
  modified_base 74: mod_base = OTHER; note = 2'-O-methyl ribonucleotide
  modified_base 75: mod_base = OTHER; note = 2'-O-methyl ribonucleotide
  modified_base 76: mod_base = OTHER; note = 2'-O-methyl ribonucleotide
  modified_base 77: mod_base = OTHER; note = 2'-O-methyl ribonucleotide
  modified_base 78: mod_base = OTHER; note = 2'-O-methyl ribonucleotide
  modified_base 79: mod_base = OTHER; note = 2'-O-methyl ribonucleotide
  modified_base 80: mod_base = OTHER; note = 2'-O-methyl ribonucleotide
  modified_base 81: mod_base = OTHER; note = 2'-O-methyl ribonucleotide
  modified_base 83: mod_base = OTHER; note = 2'-O-methyl ribonucleotide
  modified_base 84: mod_base = OTHER; note = 2'-O-methyl ribonucleotide
  modified_base 85: mod_base = OTHER; note = 2'-O-methyl ribonucleotide
  modified_base 86: mod_base = OTHER; note = 2'-O-methyl ribonucleotide
  modified_base 87: mod_base = OTHER; note = 2'-O-methyl ribonucleotide
  modified_base 88: mod_base = OTHER; note = 2'-O-methyl ribonucleotide
  modified_base 89: mod_base = OTHER; note = 2'-O-methyl ribonucleotide
  modified_base 90: mod_base = OTHER; note = 2'-O-methyl ribonucleotide
  modified_base 91: mod_base = OTHER; note = 2'-O-methyl ribonucleotide
  modified_base 92: mod_base = OTHER; note = 2'-O-methyl ribonucleotide
  modified_base 93: mod_base = OTHER; note = 2'-O-methyl ribonucleotide
  modified_base 94: mod_base = OTHER; note = 2'-O-methyl ribonucleotide
  modified_base 95: mod_base = OTHER; note = 2'-O-methyl ribonucleotide
  modified_base 96: mod_base = OTHER; note = 2'-O-methyl ribonucleotide
  modified_base 97: mod_base = OTHER; note = 2'-O-methyl ribonucleotide
  modified_base 98: mod_base = OTHER; note = 2'-O-methyl ribonucleotide
  modified_base 99: mod_base = OTHER; note = 2'-O-methyl ribonucleotide
  modified_base 100: mod_base = OTHER; note = 2'-O-methyl ribonucleotide
  modified_base 9: mod_base = OTHER; note = nebularine
  modified_base 14: mod_base = OTHER; note = nebularine
  modified_base 34: mod_base = OTHER; note = nebularine
  modified_base 42: mod_base = OTHER; note = nebularine
  modified_base 1..4: mod_base = OTHER; note = phosphorothioate linkage
  modified_base 97..100: mod_base = OTHER; note = phosphorothioate linkage
caggttccntgggntgctctgttttagagctagnaatagcangttaaaataaggctagtccgttatcaacttgaaaaagtggcaccgagtcggtgctttt

SEQ ID NO: 1928 - RNA, 100 nt, synthetic construct
  source 1..100: mol_type = other RNA
  modified_base 1: mod_base = OTHER; note = 2'-O-methyl ribonucleotide
  modified_base 2: mod_base = OTHER; note = 2'-O-methyl ribonucleotide
  modified_base 3: mod_base = OTHER; note = 2'-O-methyl ribonucleotide
  modified_base 21: mod_base = OTHER; note = 2'-O-methyl ribonucleotide
  modified_base 28: mod_base = OTHER; note = 2'-O-methyl ribonucleotide
  modified_base 29: mod_base = OTHER; note = 2'-O-methyl ribonucleotide
  modified_base 30: mod_base = OTHER; note = 2'-O-methyl ribonucleotide
  modified_base 31: mod_base = OTHER; note = 2'-O-methyl ribonucleotide
  modified_base 32: mod_base = OTHER; note = 2'-O-methyl ribonucleotide
  modified_base 33: mod_base = OTHER; note = 2'-O-methyl ribonucleotide
  modified_base 34: mod_base = OTHER; note = 2'-O-methyl ribonucleotide
  modified_base 35: mod_base = OTHER; note = 2'-O-methyl ribonucleotide
  modified_base 36: mod_base = OTHER; note = 2'-O-methyl ribonucleotide
  modified_base 37: mod_base = OTHER; note = 2'-O-methyl ribonucleotide
  modified_base 38: mod_base = OTHER; note = 2'-O-methyl ribonucleotide
  modified_base 39: mod_base = OTHER; note = 2'-O-methyl ribonucleotide
  modified_base 40: mod_base = OTHER; note = 2'-O-methyl ribonucleotide
  modified_base 41: mod_base = OTHER; note = 2'-O-methyl ribonucleotide
  modified_base 42: mod_base = OTHER; note = 2'-O-methyl ribonucleotide
  modified_base 46: mod_base = OTHER; note = 2'-O-methyl ribonucleotide
  modified_base 48: mod_base = OTHER; note = 2'-O-methyl ribonucleotide
  modified_base 50: mod_base = OTHER; note = 2'-O-methyl ribonucleotide
  modified_base 52: mod_base = OTHER; note = 2'-O-methyl ribonucleotide
  modified_base 53: mod_base = OTHER; note = 2'-O-methyl ribonucleotide
  modified_base 54: mod_base = OTHER; note = 2'-O-methyl ribonucleotide
  modified_base 55: mod_base = OTHER; note = 2'-O-methyl ribonucleotide
  modified_base 56: mod_base = OTHER; note = 2'-O-methyl ribonucleotide
  modified_base 57: mod_base = OTHER; note = 2'-O-methyl ribonucleotide
  modified_base 60: mod_base = OTHER; note = 2'-O-methyl ribonucleotide
  modified_base 61: mod_base = OTHER; note = 2'-O-methyl ribonucleotide
  modified_base 66: mod_base = OTHER; note = 2'-O-methyl ribonucleotide
  modified_base 67: mod_base = OTHER; note = 2'-O-methyl ribonucleotide
  modified_base 70: mod_base = OTHER; note = 2'-O-methyl ribonucleotide
  modified_base 71: mod_base = OTHER; note = 2'-O-methyl ribonucleotide
  modified_base 72: mod_base = OTHER; note = 2'-O-methyl ribonucleotide
  modified_base 73: mod_base = OTHER; note = 2'-O-methyl ribonucleotide
  modified_base 74: mod_base = OTHER; note = 2'-O-methyl ribonucleotide
  modified_base 75: mod_base = OTHER; note = 2'-O-methyl ribonucleotide
  modified_base 76: mod_base = OTHER; note = 2'-O-methyl ribonucleotide
  modified_base 77: mod_base = OTHER; note = 2'-O-methyl ribonucleotide
  modified_base 78: mod_base = OTHER; note = 2'-O-methyl ribonucleotide
  modified_base 79: mod_base = OTHER; note = 2'-O-methyl ribonucleotide
  modified_base 80: mod_base = OTHER; note = 2'-O-methyl ribonucleotide
  modified_base 81: mod_base = OTHER; note = 2'-O-methyl ribonucleotide
  modified_base 83: mod_base = OTHER; note = 2'-O-methyl ribonucleotide
  modified_base 84: mod_base = OTHER; note = 2'-O-methyl ribonucleotide
  modified_base 85: mod_base = OTHER; note = 2'-O-methyl ribonucleotide
  modified_base 86: mod_base = OTHER; note = 2'-O-methyl ribonucleotide
  modified_base 87: mod_base = OTHER; note = 2'-O-methyl ribonucleotide
  modified_base 88: mod_base = OTHER; note = 2'-O-methyl ribonucleotide
  modified_base 89: mod_base = OTHER; note = 2'-O-methyl ribonucleotide
  modified_base 90: mod_base = OTHER; note = 2'-O-methyl ribonucleotide
  modified_base 91: mod_base = OTHER; note = 2'-O-methyl ribonucleotide
  modified_base 92: mod_base = OTHER; note = 2'-O-methyl ribonucleotide
  modified_base 93: mod_base = OTHER; note = 2'-O-methyl ribonucleotide
  modified_base 94: mod_base = OTHER; note = 2'-O-methyl ribonucleotide
  modified_base 95: mod_base = OTHER; note = 2'-O-methyl ribonucleotide
  modified_base 96: mod_base = OTHER; note = 2'-O-methyl ribonucleotide
  modified_base 97: mod_base = OTHER; note = 2'-O-methyl ribonucleotide
  modified_base 98: mod_base = OTHER; note = 2'-O-methyl ribonucleotide
  modified_base 99: mod_base = OTHER; note = 2'-O-methyl ribonucleotide
  modified_base 100: mod_base = OTHER; note = 2'-O-methyl ribonucleotide
  modified_base 14: mod_base = OTHER; note = nebularine
  modified_base 28: mod_base = OTHER; note = nebularine
  modified_base 34: mod_base = OTHER; note = nebularine
  modified_base 42: mod_base = OTHER; note = nebularine
  modified_base 57: mod_base = OTHER; note = nebularine
  modified_base 1..4: mod_base = OTHER; note = phosphorothioate linkage
  modified_base 97..100: mod_base = OTHER; note = phosphorothioate linkage
caggttccatgggntgctctgttttagngctagnaatagcangttaaaataaggctngtccgttatcaacttgaaaaagtggcaccgagtcggtgctttt

SEQ ID NO: 1929 - RNA, 100 nt, synthetic construct
  source 1..100: mol_type = other RNA
  modified_base 1: mod_base = OTHER; note = 2'-O-methyl ribonucleotide
  modified_base 2: mod_base = OTHER; note = 2'-O-methyl ribonucleotide
  modified_base 3: mod_base = OTHER; note = 2'-O-methyl ribonucleotide
  modified_base 21: mod_base = OTHER; note = 2'-O-methyl ribonucleotide
  modified_base 28: mod_base = OTHER; note = 2'-O-methyl ribonucleotide
  modified_base 29: mod_base = OTHER; note = 2'-O-methyl ribonucleotide
  modified_base 30: mod_base = OTHER; note = 2'-O-methyl ribonucleotide
  modified_base 31: mod_base = OTHER; note = 2'-O-methyl ribonucleotide
  modified_base 32: mod_base = OTHER; note = 2'-O-methyl ribonucleotide
  modified_base 33: mod_base = OTHER; note = 2'-O-methyl ribonucleotide
  modified_base 34: mod_base = OTHER; note = 2'-O-methyl ribonucleotide
  modified_base 35: mod_base = OTHER; note = 2'-O-methyl ribonucleotide
  modified_base 36: mod_base = OTHER; note = 2'-O-methyl ribonucleotide
  modified_base 37: mod_base = OTHER; note = 2'-O-methyl ribonucleotide
  modified_base 38: mod_base = OTHER; note = 2'-O-methyl ribonucleotide
  modified_base 39: mod_base = OTHER; note = 2'-O-methyl ribonucleotide
  modified_base 40: mod_base = OTHER; note = 2'-O-methyl ribonucleotide
  modified_base 41: mod_base = OTHER; note = 2'-O-methyl ribonucleotide
  modified_base 42: mod_base = OTHER; note = 2'-O-methyl ribonucleotide
  modified_base 46: mod_base = OTHER; note = 2'-O-methyl ribonucleotide
  modified_base 48: mod_base = OTHER; note = 2'-O-methyl ribonucleotide
  modified_base 50: mod_base = OTHER; note = 2'-O-methyl ribonucleotide
  modified_base 52: mod_base = OTHER; note = 2'-O-methyl ribonucleotide
  modified_base 53: mod_base = OTHER; note = 2'-O-methyl ribonucleotide
  modified_base 54: mod_base = OTHER; note = 2'-O-methyl ribonucleotide
  modified_base 55: mod_base = OTHER; note = 2'-O-methyl ribonucleotide
  modified_base 56: mod_base = OTHER; note = 2'-O-methyl ribonucleotide
  modified_base 57: mod_base = OTHER; note = 2'-O-methyl ribonucleotide
  modified_base 60: mod_base = OTHER; note = 2'-O-methyl ribonucleotide
  modified_base 61: mod_base = OTHER; note = 2'-O-methyl ribonucleotide
  modified_base 66: mod_base = OTHER; note = 2'-O-methyl ribonucleotide
  modified_base 67: mod_base = OTHER; note = 2'-O-methyl ribonucleotide
  modified_base 70: mod_base = OTHER; note = 2'-O-methyl ribonucleotide
  modified_base 71: mod_base = OTHER; note = 2'-O-methyl ribonucleotide
  modified_base 72: mod_base = OTHER; note = 2'-O-methyl ribonucleotide
  modified_base 73: mod_base = OTHER; note = 2'-O-methyl ribonucleotide
  modified_base 74: mod_base = OTHER; note = 2'-O-methyl ribonucleotide
  modified_base 75: mod_base = OTHER; note = 2'-O-methyl ribonucleotide
  modified_base 76: mod_base = OTHER; note = 2'-O-methyl ribonucleotide
  modified_base 77: mod_base = OTHER; note = 2'-O-methyl ribonucleotide
  modified_base 78: mod_base = OTHER; note = 2'-O-methyl ribonucleotide
  modified_base 79: mod_base = OTHER; note = 2'-O-methyl ribonucleotide
  modified_base 80: mod_base = OTHER; note = 2'-O-methyl ribonucleotide
  modified_base 81: mod_base = OTHER; note = 2'-O-methyl ribonucleotide
  modified_base 83: mod_base = OTHER; note = 2'-O-methyl ribonucleotide
  modified_base 84: mod_base = OTHER; note = 2'-O-methyl ribonucleotide
  modified_base 85: mod_base = OTHER; note = 2'-O-methyl ribonucleotide
  modified_base 86: mod_base = OTHER; note = 2'-O-methyl ribonucleotide
  modified_base 87: mod_base = OTHER; note = 2'-O-methyl ribonucleotide
  modified_base 88: mod_base = OTHER; note = 2'-O-methyl ribonucleotide
  modified_base 89: mod_base = OTHER; note = 2'-O-methyl ribonucleotide
  modified_base 90: mod_base = OTHER; note = 2'-O-methyl ribonucleotide
  modified_base 91: mod_base = OTHER; note = 2'-O-methyl ribonucleotide
  modified_base 92: mod_base = OTHER; note = 2'-O-methyl ribonucleotide
  modified_base 93: mod_base = OTHER; note = 2'-O-methyl ribonucleotide
  modified_base 94: mod_base = OTHER; note = 2'-O-methyl ribonucleotide
  modified_base 95: mod_base = OTHER; note = 2'-O-methyl ribonucleotide
  modified_base 96: mod_base = OTHER; note = 2'-O-methyl ribonucleotide
  modified_base 97: mod_base = OTHER; note = 2'-O-methyl ribonucleotide
  modified_base 98: mod_base = OTHER; note = 2'-O-methyl ribonucleotide
  modified_base 99: mod_base = OTHER; note = 2'-O-methyl ribonucleotide
  modified_base 100: mod_base = OTHER; note = 2'-O-methyl ribonucleotide
  modified_base 14: mod_base = OTHER; note = nebularine
  modified_base 34: mod_base = OTHER; note = nebularine
  modified_base 42: mod_base = OTHER; note = nebularine
  modified_base 57: mod_base = OTHER; note = nebularine
  modified_base 1..4: mod_base = OTHER; note = phosphorothioate linkage
  modified_base 97..100: mod_base = OTHER; note = phosphorothioate linkage
caggttccatgggntgctctgttttagagctagnaatagcangttaaaataaggctngtccgttatcaacttgaaaaagtggcaccgagtcggtgctttt

SEQ ID NO: 1930 - RNA, 100 nt, synthetic construct
  source 1..100: mol_type = other RNA
  modified_base 1: mod_base = OTHER; note = 2'-O-methyl ribonucleotide
  modified_base 2: mod_base = OTHER; note = 2'-O-methyl ribonucleotide
  modified_base 3: mod_base = OTHER; note = 2'-O-methyl ribonucleotide
  modified_base 21: mod_base = OTHER; note = 2'-O-methyl ribonucleotide
  modified_base 28: mod_base = OTHER; note = 2'-O-methyl ribonucleotide
  modified_base 29: mod_base = OTHER; note = 2'-O-methyl ribonucleotide
  modified_base 30: mod_base = OTHER; note = 2'-O-methyl ribonucleotide
  modified_base 31: mod_base = OTHER; note = 2'-O-methyl ribonucleotide
  modified_base 32: mod_base = OTHER; note = 2'-O-methyl ribonucleotide
  modified_base 33: mod_base = OTHER; note = 2'-O-methyl ribonucleotide
  modified_base 34: mod_base = OTHER; note = 2'-O-methyl ribonucleotide
  modified_base 35: mod_base = OTHER; note = 2'-O-methyl ribonucleotide
  modified_base 36: mod_base = OTHER; note = 2'-O-methyl ribonucleotide
  modified_base 37: mod_base = OTHER; note = 2'-O-methyl ribonucleotide
  modified_base 38: mod_base = OTHER; note = 2'-O-methyl ribonucleotide
  modified_base 39: mod_base = OTHER; note = 2'-O-methyl ribonucleotide
  modified_base 40: mod_base = OTHER; note = 2'-O-methyl ribonucleotide
  modified_base 41: mod_base = OTHER; note = 2'-O-methyl ribonucleotide
  modified_base 42: mod_base = OTHER; note = 2'-O-methyl ribonucleotide
  modified_base 46: mod_base = OTHER; note = 2'-O-methyl ribonucleotide
  modified_base 48: mod_base = OTHER; note = 2'-O-methyl ribonucleotide
  modified_base 50: mod_base = OTHER; note = 2'-O-methyl ribonucleotide
  modified_base 52: mod_base = OTHER; note = 2'-O-methyl ribonucleotide
  modified_base 53: mod_base = OTHER; note = 2'-O-methyl ribonucleotide
  modified_base 54: mod_base = OTHER; note = 2'-O-methyl ribonucleotide
  modified_base 55: mod_base = OTHER; note = 2'-O-methyl ribonucleotide
  modified_base 56: mod_base = OTHER; note = 2'-O-methyl ribonucleotide
  modified_base 57: mod_base = OTHER; note = 2'-O-methyl ribonucleotide
  modified_base 60: mod_base = OTHER; note = 2'-O-methyl ribonucleotide
  modified_base 61: mod_base = OTHER; note = 2'-O-methyl ribonucleotide
  modified_base 66: mod_base = OTHER; note = 2'-O-methyl ribonucleotide
  modified_base 67: mod_base = OTHER; note = 2'-O-methyl ribonucleotide
  modified_base 70: mod_base = OTHER; note = 2'-O-methyl ribonucleotide
  modified_base 71: mod_base = OTHER; note = 2'-O-methyl ribonucleotide
  modified_base 72: mod_base = OTHER; note = 2'-O-methyl ribonucleotide
  modified_base 73: mod_base = OTHER; note = 2'-O-methyl ribonucleotide
  modified_base 74: mod_base = OTHER; note = 2'-O-methyl ribonucleotide
  modified_base 75: mod_base = OTHER; note = 2'-O-methyl ribonucleotide
  modified_base 76: mod_base = OTHER; note = 2'-O-methyl ribonucleotide
  modified_base 77: mod_base = OTHER; note = 2'-O-methyl ribonucleotide
  modified_base 78: mod_base = OTHER; note = 2'-O-methyl ribonucleotide
  modified_base 79: mod_base = OTHER; note = 2'-O-methyl ribonucleotide
  modified_base 80: mod_base = OTHER; note = 2'-O-methyl ribonucleotide
  modified_base 81: mod_base = OTHER; note = 2'-O-methyl ribonucleotide
  modified_base 83: mod_base = OTHER; note = 2'-O-methyl ribonucleotide
  modified_base 84: mod_base = OTHER; note = 2'-O-methyl ribonucleotide
  modified_base 85: mod_base = OTHER; note = 2'-O-methyl ribonucleotide
  modified_base 86: mod_base = OTHER; note = 2'-O-methyl ribonucleotide
  modified_base 87: mod_base = OTHER; note = 2'-O-methyl ribonucleotide
  modified_base 88: mod_base = OTHER; note = 2'-O-methyl ribonucleotide
  modified_base 89: mod_base = OTHER; note = 2'-O-methyl ribonucleotide
  modified_base 90: mod_base = OTHER; note = 2'-O-methyl ribonucleotide
  modified_base 91: mod_base = OTHER; note = 2'-O-methyl ribonucleotide
  modified_base 92: mod_base = OTHER; note = 2'-O-methyl ribonucleotide
  modified_base 93: mod_base = OTHER; note = 2'-O-methyl ribonucleotide
  modified_base 94: mod_base = OTHER; note = 2'-O-methyl ribonucleotide
  modified_base 95: mod_base = OTHER; note = 2'-O-methyl ribonucleotide
  modified_base 96: mod_base = OTHER; note = 2'-O-methyl ribonucleotide
  modified_base 97: mod_base = OTHER; note = 2'-O-methyl ribonucleotide
  modified_base 98: mod_base = OTHER; note = 2'-O-methyl ribonucleotide
  modified_base 99: mod_base = OTHER; note = 2'-O-methyl ribonucleotide
  modified_base 100: mod_base = OTHER; note = 2'-O-methyl ribonucleotide
  modified_base 14: mod_base = OTHER; note = nebularine
  modified_base 42: mod_base = OTHER; note = nebularine
  modified_base 57: mod_base = OTHER; note = nebularine
  modified_base 1..4: mod_base = OTHER; note = phosphorothioate linkage
  modified_base 97..100: mod_base = OTHER; note = phosphorothioate linkage
caggttccatgggntgctctgttttagagctagaaatagcangttaaaataaggctngtccgttatcaacttgaaaaagtggcaccgagtcggtgctttt

SEQ ID NO: 1931 - RNA, 100 nt, synthetic construct
  source 1..100: mol_type = other RNA
  modified_base 1: mod_base = OTHER; note = 2'-O-methyl ribonucleotide
  modified_base 2: mod_base = OTHER; note = 2'-O-methyl ribonucleotide
  modified_base 3: mod_base = OTHER; note = 2'-O-methyl ribonucleotide
  modified_base 21: mod_base = OTHER; note = 2'-O-methyl ribonucleotide
  modified_base 28: mod_base = OTHER; note = 2'-O-methyl ribonucleotide
  modified_base 29: mod_base = OTHER; note = 2'-O-methyl ribonucleotide
  modified_base 30: mod_base = OTHER; note = 2'-O-methyl ribonucleotide
  modified_base 31: mod_base = OTHER; note = 2'-O-methyl ribonucleotide
  modified_base 32: mod_base = OTHER; note = 2'-O-methyl ribonucleotide
  modified_base 33: mod_base = OTHER; note = 2'-O-methyl ribonucleotide
  modified_base 34: mod_base = OTHER; note = 2'-O-methyl ribonucleotide
  modified_base 35: mod_base = OTHER; note = 2'-O-methyl ribonucleotide
  modified_base 36: mod_base = OTHER; note = 2'-O-methyl ribonucleotide
  modified_base 37: mod_base = OTHER; note = 2'-O-methyl ribonucleotide
  modified_base 38: mod_base = OTHER; note = 2'-O-methyl ribonucleotide
  modified_base 39: mod_base = OTHER; note = 2'-O-methyl ribonucleotide
  modified_base 40: mod_base = OTHER; note = 2'-O-methyl ribonucleotide
  modified_base 41: mod_base = OTHER; note = 2'-O-methyl ribonucleotide
  modified_base 42: mod_base = OTHER; note = 2'-O-methyl ribonucleotide
  modified_base 46: mod_base = OTHER; note = 2'-O-methyl ribonucleotide
  modified_base 48: mod_base = OTHER; note = 2'-O-methyl ribonucleotide
  modified_base 50: mod_base = OTHER; note = 2'-O-methyl ribonucleotide
  modified_base 52: mod_base = OTHER; note = 2'-O-methyl ribonucleotide
  modified_base 53: mod_base = OTHER; note = 2'-O-methyl ribonucleotide
  modified_base 54: mod_base = OTHER; note = 2'-O-methyl ribonucleotide
  modified_base 55: mod_base = OTHER; note = 2'-O-methyl ribonucleotide
  modified_base 56: mod_base = OTHER; note = 2'-O-methyl ribonucleotide
  modified_base 57: mod_base = OTHER; note = 2'-O-methyl ribonucleotide
  modified_base 60: mod_base = OTHER; note = 2'-O-methyl ribonucleotide
  modified_base 61: mod_base = OTHER; note = 2'-O-methyl ribonucleotide
  modified_base 66: mod_base = OTHER; note = 2'-O-methyl ribonucleotide
  modified_base 67: mod_base = OTHER; note = 2'-O-methyl ribonucleotide
  modified_base 70: mod_base = OTHER; note = 2'-O-methyl ribonucleotide
  modified_base 71: mod_base = OTHER; note = 2'-O-methyl ribonucleotide
  modified_base 72: mod_base = OTHER; note = 2'-O-methyl ribonucleotide
  modified_base 73: mod_base = OTHER; note = 2'-O-methyl ribonucleotide
  modified_base 74: mod_base = OTHER; note = 2'-O-methyl ribonucleotide
  modified_base 75: mod_base = OTHER; note = 2'-O-methyl ribonucleotide
  modified_base 76: mod_base = OTHER; note = 2'-O-methyl ribonucleotide
  modified_base 77: mod_base = OTHER; note = 2'-O-methyl ribonucleotide
  modified_base 78: mod_base = OTHER; note = 2'-O-methyl ribonucleotide
  modified_base 79: mod_base = OTHER; note = 2'-O-methyl ribonucleotide
  modified_base 80: mod_base = OTHER; note = 2'-O-methyl ribonucleotide
  modified_base 81: mod_base = OTHER; note = 2'-O-methyl ribonucleotide
  modified_base 83: mod_base = OTHER; note = 2'-O-methyl ribonucleotide
  modified_base 84: mod_base = OTHER; note = 2'-O-methyl ribonucleotide
  modified_base 85: mod_base = OTHER; note = 2'-O-methyl ribonucleotide
  modified_base 86: mod_base = OTHER; note = 2'-O-methyl ribonucleotide
  modified_base 87: mod_base = OTHER; note = 2'-O-methyl ribonucleotide
  modified_base 88: mod_base = OTHER; note = 2'-O-methyl ribonucleotide
  modified_base 89: mod_base = OTHER; note = 2'-O-methyl ribonucleotide
  modified_base 90: mod_base = OTHER; note = 2'-O-methyl ribonucleotide
  modified_base 91: mod_base = OTHER; note = 2'-O-methyl ribonucleotide
  modified_base 92: mod_base = OTHER; note = 2'-O-methyl ribonucleotide
  modified_base 93: mod_base = OTHER; note = 2'-O-methyl ribonucleotide
  modified_base 94: mod_base = OTHER; note = 2'-O-methyl ribonucleotide
  modified_base 95: mod_base = OTHER; note = 2'-O-methyl ribonucleotide
  modified_base 96: mod_base = OTHER; note = 2'-O-methyl ribonucleotide
  modified_base 97: mod_base = OTHER; note = 2'-O-methyl ribonucleotide
  modified_base 98: mod_base = OTHER; note = 2'-O-methyl ribonucleotide
  modified_base 99: mod_base = OTHER; note = 2'-O-methyl ribonucleotide
  modified_base 100: mod_base = OTHER; note = 2'-O-methyl ribonucleotide
  modified_base 14: mod_base = OTHER; note = nebularine
  modified_base 28: mod_base = OTHER; note = nebularine
  modified_base 1..4: mod_base = OTHER; note = phosphorothioate linkage
  modified_base 97..100: mod_base = OTHER; note = phosphorothioate linkage
caggttccatgggntgctctgttttagngctagaaatagcaagttaaaataaggctagtccgttatcaacttgaaaaagtggcaccgagtcggtgctttt

SEQ ID NO: 1932 - RNA, 100 nt, synthetic construct
  source 1..100: mol_type = other RNA
  modified_base 1: mod_base = OTHER; note = 2'-O-methyl ribonucleotide
  modified_base 2: mod_base = OTHER; note = 2'-O-methyl ribonucleotide
  modified_base 3: mod_base = OTHER; note = 2'-O-methyl ribonucleotide
  modified_base 21: mod_base = OTHER; note = 2'-O-methyl ribonucleotide
  modified_base 28: mod_base = OTHER; note = 2'-O-methyl ribonucleotide
  modified_base 29: mod_base = OTHER; note = 2'-O-methyl ribonucleotide
  modified_base 30: mod_base = OTHER; note = 2'-O-methyl ribonucleotide
  modified_base 31: mod_base = OTHER; note = 2'-O-methyl ribonucleotide
  modified_base 32: mod_base = OTHER; note = 2'-O-methyl ribonucleotide
  modified_base 33: mod_base = OTHER; note = 2'-O-methyl ribonucleotide
  modified_base 34: mod_base = OTHER; note = 2'-O-methyl ribonucleotide
  modified_base 35: mod_base = OTHER; note = 2'-O-methyl ribonucleotide
  modified_base 36: mod_base = OTHER; note = 2'-O-methyl ribonucleotide
  modified_base 37: mod_base = OTHER; note = 2'-O-methyl ribonucleotide
  modified_base 38: mod_base = OTHER; note = 2'-O-methyl ribonucleotide
  modified_base 39: mod_base = OTHER; note = 2'-O-methyl ribonucleotide
  modified_base 40: mod_base = OTHER; note = 2'-O-methyl ribonucleotide
  modified_base 41: mod_base = OTHER; note = 2'-O-methyl ribonucleotide
  modified_base 42: mod_base = OTHER; note = 2'-O-methyl ribonucleotide
  modified_base 46: mod_base = OTHER; note = 2'-O-methyl ribonucleotide
  modified_base 48: mod_base = OTHER; note = 2'-O-methyl ribonucleotide
  modified_base 50: mod_base = OTHER; note = 2'-O-methyl ribonucleotide
  modified_base 52: mod_base = OTHER; note = 2'-O-methyl ribonucleotide
  modified_base 53: mod_base = OTHER; note = 2'-O-methyl ribonucleotide
  modified_base 54: mod_base = OTHER; note = 2'-O-methyl ribonucleotide
  modified_base 55: mod_base = OTHER; note = 2'-O-methyl ribonucleotide
  modified_base 56: mod_base = OTHER; note = 2'-O-methyl ribonucleotide
  modified_base 57: mod_base = OTHER; note = 2'-O-methyl ribonucleotide
  modified_base 60: mod_base = OTHER; note = 2'-O-methyl ribonucleotide
  modified_base 61: mod_base = OTHER; note = 2'-O-methyl ribonucleotide
  modified_base 66: mod_base = OTHER; note = 2'-O-methyl ribonucleotide
  modified_base 67: mod_base = OTHER; note = 2'-O-methyl ribonucleotide
  modified_base 70: mod_base = OTHER; note = 2'-O-methyl ribonucleotide
  modified_base 71: mod_base = OTHER; note = 2'-O-methyl ribonucleotide
  modified_base 72: mod_base = OTHER; note = 2'-O-methyl ribonucleotide
  modified_base 73: mod_base = OTHER; note = 2'-O-methyl ribonucleotide
  modified_base 74: mod_base = OTHER; note = 2'-O-methyl ribonucleotide
  modified_base 75: mod_base = OTHER; note = 2'-O-methyl ribonucleotide
  modified_base 76: mod_base = OTHER; note = 2'-O-methyl ribonucleotide
  modified_base 77: mod_base = OTHER; note = 2'-O-methyl ribonucleotide
  modified_base 78: mod_base = OTHER; note = 2'-O-methyl ribonucleotide
  modified_base 79: mod_base = OTHER; note = 2'-O-methyl ribonucleotide
  modified_base 80: mod_base = OTHER; note = 2'-O-methyl ribonucleotide
  modified_base 81: mod_base = OTHER; note = 2'-O-methyl ribonucleotide
  modified_base 83: mod_base = OTHER; note = 2'-O-methyl ribonucleotide
  modified_base 84: mod_base = OTHER; note = 2'-O-methyl ribonucleotide
  modified_base 85: mod_base = OTHER; note = 2'-O-methyl ribonucleotide
  modified_base 86: mod_base = OTHER; note = 2'-O-methyl ribonucleotide
  modified_base 87: mod_base = OTHER; note = 2'-O-methyl ribonucleotide
  modified_base 88: mod_base = OTHER; note = 2'-O-methyl ribonucleotide
  modified_base 89: mod_base = OTHER; note = 2'-O-methyl ribonucleotide
  modified_base 90: mod_base = OTHER; note = 2'-O-methyl ribonucleotide
  modified_base 91: mod_base = OTHER; note = 2'-O-methyl ribonucleotide
  modified_base 92: mod_base = OTHER; note = 2'-O-methyl ribonucleotide
  modified_base 93: mod_base = OTHER; note = 2'-O-methyl ribonucleotide
  modified_base 94: mod_base = OTHER; note = 2'-O-methyl ribonucleotide
  modified_base 95: mod_base = OTHER; note = 2'-O-methyl ribonucleotide
  modified_base 96: mod_base = OTHER; note = 2'-O-methyl ribonucleotide
  modified_base 97: mod_base = OTHER; note = 2'-O-methyl ribonucleotide
  modified_base 98: mod_base = OTHER; note = 2'-O-methyl ribonucleotide
  modified_base 99: mod_base = OTHER; note = 2'-O-methyl ribonucleotide
  modified_base 100: mod_base = OTHER; note = 2'-O-methyl ribonucleotide
  modified_base 14: mod_base = OTHER; note = nebularine
  modified_base 42: mod_base = OTHER; note = nebularine
  modified_base 1..4: mod_base = OTHER; note = phosphorothioate linkage
  modified_base 97..100: mod_base = OTHER; note = phosphorothioate linkage
caggttccatgggntgctctgttttagagctagaaatagcangttaaaataaggctagtccgttatcaacttgaaaaagtggcaccgagtcggtgctttt

SEQ ID NO: 1933 - RNA, 100 nt, synthetic construct
  source 1..100: mol_type = other RNA
  modified_base 1: mod_base = OTHER; note = 2'-O-methyl ribonucleotide
  modified_base 2: mod_base = OTHER; note = 2'-O-methyl ribonucleotide
  modified_base 3: mod_base = OTHER; note = 2'-O-methyl ribonucleotide
  modified_base 21: mod_base = OTHER; note = 2'-O-methyl ribonucleotide
  modified_base 28: mod_base = OTHER; note = 2'-O-methyl ribonucleotide
  modified_base 29: mod_base = OTHER; note = 2'-O-methyl ribonucleotide
  modified_base 30: mod_base = OTHER; note = 2'-O-methyl ribonucleotide
  modified_base 31: mod_base = OTHER; note = 2'-O-methyl ribonucleotide
  modified_base 32: mod_base = OTHER; note = 2'-O-methyl ribonucleotide
  modified_base 33: mod_base = OTHER; note = 2'-O-methyl ribonucleotide
  modified_base 34: mod_base = OTHER; note = 2'-O-methyl ribonucleotide
  modified_base 35: mod_base = OTHER; note = 2'-O-methyl ribonucleotide
  modified_base 36: mod_base = OTHER; note = 2'-O-methyl ribonucleotide
  modified_base 37: mod_base = OTHER; note = 2'-O-methyl ribonucleotide
  modified_base 38: mod_base = OTHER; note = 2'-O-methyl ribonucleotide
  modified_base 39: mod_base = OTHER; note = 2'-O-methyl ribonucleotide
  modified_base 40: mod_base = OTHER; note = 2'-O-methyl ribonucleotide
  modified_base 41: mod_base = OTHER; note = 2'-O-methyl ribonucleotide
  modified_base 42: mod_base = OTHER; note = 2'-O-methyl ribonucleotide
  modified_base 46: mod_base = OTHER; note = 2'-O-methyl ribonucleotide
  modified_base 48: mod_base = OTHER; note = 2'-O-methyl ribonucleotide
  modified_base 50: mod_base = OTHER; note = 2'-O-methyl ribonucleotide
  modified_base 52: mod_base = OTHER; note = 2'-O-methyl ribonucleotide
  modified_base 53: mod_base = OTHER; note = 2'-O-methyl ribonucleotide
  modified_base 54: mod_base = OTHER; note = 2'-O-methyl ribonucleotide
  modified_base 55: mod_base = OTHER; note = 2'-O-methyl ribonucleotide
  modified_base 56: mod_base = OTHER; note = 2'-O-methyl ribonucleotide
  modified_base 57: mod_base = OTHER; note = 2'-O-methyl ribonucleotide
  modified_base 60: mod_base = OTHER; note = 2'-O-methyl ribonucleotide
  modified_base 61: mod_base = OTHER; note = 2'-O-methyl ribonucleotide
  modified_base 66: mod_base = OTHER; note = 2'-O-methyl ribonucleotide
  modified_base 67: mod_base = OTHER; note = 2'-O-methyl ribonucleotide
  modified_base 70: mod_base = OTHER; note = 2'-O-methyl ribonucleotide
  modified_base 71: mod_base = OTHER; note = 2'-O-methyl ribonucleotide
  modified_base 72: mod_base = OTHER; note = 2'-O-methyl ribonucleotide
  modified_base 73: mod_base = OTHER; note = 2'-O-methyl ribonucleotide
  modified_base 74: mod_base = OTHER; note = 2'-O-methyl ribonucleotide
  modified_base 75: mod_base = OTHER; note = 2'-O-methyl ribonucleotide
  modified_base 76: mod_base = OTHER; note = 2'-O-methyl ribonucleotide
  modified_base 77: mod_base = OTHER; note = 2'-O-methyl ribonucleotide
  modified_base 78: mod_base = OTHER; note = 2'-O-methyl ribonucleotide
  modified_base 79: mod_base = OTHER; note = 2'-O-methyl ribonucleotide
  modified_base 80: mod_base = OTHER; note = 2'-O-methyl ribonucleotide
  modified_base 81: mod_base = OTHER; note = 2'-O-methyl ribonucleotide
  modified_base 83: mod_base = OTHER; note = 2'-O-methyl ribonucleotide
  modified_base 84: mod_base = OTHER; note = 2'-O-methyl ribonucleotide
  modified_base 85: mod_base = OTHER; note = 2'-O-methyl ribonucleotide
  modified_base 86: mod_base = OTHER; note = 2'-O-methyl ribonucleotide
  modified_base 87: mod_base = OTHER; note = 2'-O-methyl ribonucleotide
  modified_base 88: mod_base = OTHER; note = 2'-O-methyl ribonucleotide
  modified_base 89: mod_base = OTHER; note = 2'-O-methyl ribonucleotide
  modified_base 90: mod_base = OTHER; note = 2'-O-methyl ribonucleotide
  modified_base 91: mod_base = OTHER; note = 2'-O-methyl ribonucleotide
  modified_base 92: mod_base = OTHER; note = 2'-O-methyl ribonucleotide
  modified_base 93: mod_base = OTHER; note = 2'-O-methyl ribonucleotide
  modified_base 94: mod_base = OTHER; note = 2'-O-methyl ribonucleotide
  modified_base 95: mod_base = OTHER; note = 2'-O-methyl ribonucleotide
  modified_base 96: mod_base = OTHER; note = 2'-O-methyl ribonucleotide
  modified_base 97: mod_base = OTHER; note = 2'-O-methyl ribonucleotide
  modified_base 98: mod_base = OTHER; note = 2'-O-methyl ribonucleotide
  modified_base 99: mod_base = OTHER; note = 2'-O-methyl ribonucleotide
  modified_base 100: mod_base = OTHER; note = 2'-O-methyl ribonucleotide
  modified_base 14: mod_base = OTHER; note = nebularine
  modified_base 34: mod_base = OTHER; note = nebularine
  modified_base 42: mod_base = OTHER; note = nebularine
  modified_base 1..4: mod_base = OTHER; note = phosphorothioate linkage
  modified_base 97..100: mod_base = OTHER; note = phosphorothioate linkage
caggttccatgggntgctctgttttagagctagnaatagcangttaaaataaggctagtccgttatcaacttgaaaaagtggcaccgagtcggtgctttt

SEQ ID NO: 1934 - RNA, 100 nt, synthetic construct
  source 1..100: mol_type = other RNA
  modified_base 1: mod_base = OTHER; note = 2'-O-methyl ribonucleotide
  modified_base 2: mod_base = OTHER; note = 2'-O-methyl ribonucleotide
  modified_base 3: mod_base = OTHER; note = 2'-O-methyl ribonucleotide
  modified_base 21: mod_base = OTHER; note = 2'-O-methyl ribonucleotide
  modified_base 28: mod_base = OTHER; note = 2'-O-methyl ribonucleotide
  modified_base 29: mod_base = OTHER; note = 2'-O-methyl ribonucleotide
  modified_base 30: mod_base = OTHER; note = 2'-O-methyl ribonucleotide
  modified_base 31: mod_base = OTHER; note = 2'-O-methyl ribonucleotide
  modified_base 32: mod_base = OTHER; note = 2'-O-methyl ribonucleotide
  modified_base 33: mod_base = OTHER; note = 2'-O-methyl ribonucleotide
  modified_base 34: mod_base = OTHER; note = 2'-O-methyl ribonucleotide
  modified_base 35: mod_base = OTHER; note = 2'-O-methyl ribonucleotide
  modified_base 36: mod_base = OTHER; note = 2'-O-methyl ribonucleotide
  modified_base 37: mod_base = OTHER; note = 2'-O-methyl ribonucleotide
  modified_base 38: mod_base = OTHER; note = 2'-O-methyl ribonucleotide
  modified_base 39: mod_base = OTHER; note = 2'-O-methyl ribonucleotide
  modified_base 40: mod_base = OTHER; note = 2'-O-methyl ribonucleotide
  modified_base 41: mod_base = OTHER; note = 2'-O-methyl ribonucleotide
  modified_base 42: mod_base = OTHER; note = 2'-O-methyl ribonucleotide
  modified_base 46: mod_base = OTHER; note = 2'-O-methyl ribonucleotide
  modified_base 48: mod_base = OTHER; note = 2'-O-methyl ribonucleotide
  modified_base 50: mod_base = OTHER; note = 2'-O-methyl ribonucleotide
  modified_base 52: mod_base = OTHER; note = 2'-O-methyl ribonucleotide
  modified_base 53: mod_base = OTHER; note = 2'-O-methyl ribonucleotide
  modified_base 54: mod_base = OTHER; note = 2'-O-methyl ribonucleotide
  modified_base 55: mod_base = OTHER; note = 2'-O-methyl ribonucleotide
  modified_base 56: mod_base = OTHER; note = 2'-O-methyl ribonucleotide
  modified_base 57: mod_base = OTHER; note = 2'-O-methyl ribonucleotide
  modified_base 60: mod_base = OTHER; note = 2'-O-methyl ribonucleotide
  modified_base 61: mod_base = OTHER; note = 2'-O-methyl ribonucleotide
  modified_base 66: mod_base = OTHER; note = 2'-O-methyl ribonucleotide
  modified_base 67: mod_base = OTHER; note = 2'-O-methyl ribonucleotide
  modified_base 70: mod_base = OTHER; note = 2'-O-methyl ribonucleotide
  modified_base 71: mod_base = OTHER; note = 2'-O-methyl ribonucleotide
  modified_base 72: mod_base = OTHER; note = 2'-O-methyl ribonucleotide
  modified_base 73: mod_base = OTHER; note = 2'-O-methyl ribonucleotide
  modified_base 74: mod_base = OTHER; note = 2'-O-methyl ribonucleotide
  modified_base 75: mod_base = OTHER; note = 2'-O-methyl ribonucleotide
  modified_base 76: mod_base = OTHER; note = 2'-O-methyl ribonucleotide
  modified_base 77: mod_base = OTHER; note = 2'-O-methyl ribonucleotide
  modified_base 78: mod_base = OTHER; note = 2'-O-methyl ribonucleotide
  modified_base 79: mod_base = OTHER; note = 2'-O-methyl ribonucleotide
  modified_base 80: mod_base = OTHER; note = 2'-O-methyl ribonucleotide
  modified_base 81: mod_base = OTHER; note = 2'-O-methyl ribonucleotide
  modified_base 83: mod_base = OTHER; note = 2'-O-methyl ribonucleotide
  modified_base 84: mod_base = OTHER; note = 2'-O-methyl ribonucleotide
  modified_base 85: mod_base = OTHER; note = 2'-O-methyl ribonucleotide
  modified_base 86: mod_base = OTHER; note = 2'-O-methyl ribonucleotide
  modified_base 87: mod_base = OTHER; note = 2'-O-methyl ribonucleotide
  modified_base 88: mod_base = OTHER; note = 2'-O-methyl ribonucleotide
  modified_base 89: mod_base = OTHER; note = 2'-O-methyl ribonucleotide
  modified_base 90: mod_base = OTHER; note = 2'-O-methyl ribonucleotide
  modified_base 91: mod_base = OTHER; note = 2'-O-methyl ribonucleotide
  modified_base 92: mod_base = OTHER; note = 2'-O-methyl ribonucleotide
  modified_base 93: mod_base = OTHER; note = 2'-O-methyl ribonucleotide
  modified_base 94: mod_base = OTHER; note = 2'-O-methyl ribonucleotide
  modified_base 95: mod_base = OTHER; note = 2'-O-methyl ribonucleotide
  modified_base 96: mod_base = OTHER; note = 2'-O-methyl ribonucleotide
  modified_base 97: mod_base = OTHER; note = 2'-O-methyl ribonucleotide
  modified_base 98: mod_base = OTHER; note = 2'-O-methyl ribonucleotide
  modified_base 99: mod_base = OTHER; note = 2'-O-methyl ribonucleotide
  modified_base 100: mod_base = OTHER; note = 2'-O-methyl ribonucleotide
  modified_base 9: mod_base = OTHER; note = nebularine
  modified_base 28: mod_base = OTHER; note = nebularine
  modified_base 34: mod_base = OTHER; note = nebularine
  modified_base 42: mod_base = OTHER; note = nebularine
  modified_base 57: mod_base = OTHER; note = nebularine
  modified_base 1..4: mod_base = OTHER; note = phosphorothioate linkage
  modified_base 97..100: mod_base = OTHER; note = phosphorothioate linkage
caggttccntgggatgctctgttttagngctagnaatagcangttaaaataaggctngtccgttatcaacttgaaaaagtggcaccgagtcggtgctttt

SEQ ID NO: 1935 - RNA, 100 nt, synthetic construct
  source 1..100: mol_type = other RNA
  modified_base 1: mod_base = OTHER; note = 2'-O-methyl ribonucleotide
  modified_base 2: mod_base = OTHER; note = 2'-O-methyl ribonucleotide
  modified_base 3: mod_base = OTHER; note = 2'-O-methyl ribonucleotide
  modified_base 21: mod_base = OTHER; note = 2'-O-methyl ribonucleotide
  modified_base 28: mod_base = OTHER; note = 2'-O-methyl ribonucleotide
  modified_base 29: mod_base = OTHER; note = 2'-O-methyl ribonucleotide
  modified_base 30: mod_base = OTHER; note = 2'-O-methyl ribonucleotide
  modified_base 31: mod_base = OTHER; note = 2'-O-methyl ribonucleotide
  modified_base 32: mod_base = OTHER; note = 2'-O-methyl ribonucleotide
  modified_base 33: mod_base = OTHER; note = 2'-O-methyl ribonucleotide
  modified_base 34: mod_base = OTHER; note = 2'-O-methyl ribonucleotide
  modified_base 35: mod_base = OTHER; note = 2'-O-methyl ribonucleotide
  modified_base 36: mod_base = OTHER; note = 2'-O-methyl ribonucleotide
  modified_base 37: mod_base = OTHER; note = 2'-O-methyl ribonucleotide
  modified_base 38: mod_base = OTHER; note = 2'-O-methyl ribonucleotide
  modified_base 39: mod_base = OTHER; note = 2'-O-methyl ribonucleotide
  modified_base 40: mod_base = OTHER; note = 2'-O-methyl ribonucleotide
  modified_base 41: mod_base = OTHER; note = 2'-O-methyl ribonucleotide
  modified_base 42: mod_base = OTHER; note = 2'-O-methyl ribonucleotide
  modified_base 46: mod_base = OTHER; note = 2'-O-methyl ribonucleotide
  modified_base 48: mod_base = OTHER; note = 2'-O-methyl ribonucleotide
  modified_base 50: mod_base = OTHER; note = 2'-O-methyl ribonucleotide
  modified_base 52: mod_base = OTHER; note = 2'-O-methyl ribonucleotide
  modified_base 53: mod_base = OTHER; note = 2'-O-methyl ribonucleotide
  modified_base 54: mod_base = OTHER; note = 2'-O-methyl ribonucleotide
  modified_base 55: mod_base = OTHER; note = 2'-O-methyl ribonucleotide
  modified_base 56: mod_base = OTHER; note = 2'-O-methyl ribonucleotide
  modified_base 57: mod_base = OTHER; note = 2'-O-methyl ribonucleotide
  modified_base 60: mod_base = OTHER; note = 2'-O-methyl ribonucleotide
  modified_base 61: mod_base = OTHER; note = 2'-O-methyl ribonucleotide
  modified_base 66: mod_base = OTHER; note = 2'-O-methyl ribonucleotide
  modified_base 67: mod_base = OTHER; note = 2'-O-methyl ribonucleotide
  modified_base 70: mod_base = OTHER; note = 2'-O-methyl ribonucleotide
  modified_base 71: mod_base = OTHER; note = 2'-O-methyl ribonucleotide
  modified_base 72: mod_base = OTHER; note = 2'-O-methyl ribonucleotide
  modified_base 73: mod_base = OTHER; note = 2'-O-methyl ribonucleotide
  modified_base 74: mod_base = OTHER; note = 2'-O-methyl ribonucleotide
  modified_base 75: mod_base = OTHER; note = 2'-O-methyl ribonucleotide
  modified_base 76: mod_base = OTHER; note = 2'-O-methyl ribonucleotide
  modified_base 77: mod_base = OTHER; note = 2'-O-methyl ribonucleotide
  modified_base 78: mod_base = OTHER; note = 2'-O-methyl ribonucleotide
  modified_base 79: mod_base = OTHER; note = 2'-O-methyl ribonucleotide
  modified_base 80: mod_base = OTHER; note = 2'-O-methyl ribonucleotide
  modified_base 81: mod_base = OTHER; note = 2'-O-methyl ribonucleotide
  modified_base 83: mod_base = OTHER; note = 2'-O-methyl ribonucleotide
  modified_base 84: mod_base = OTHER; note = 2'-O-methyl ribonucleotide
  modified_base 85: mod_base = OTHER; note = 2'-O-methyl ribonucleotide
  modified_base 86: mod_base = OTHER; note = 2'-O-methyl ribonucleotide
  modified_base 87: mod_base = OTHER; note = 2'-O-methyl ribonucleotide
  modified_base 88: mod_base = OTHER; note = 2'-O-methyl ribonucleotide
  modified_base 89: mod_base = OTHER; note = 2'-O-methyl ribonucleotide
  modified_base 90: mod_base = OTHER; note = 2'-O-methyl ribonucleotide
  modified_base 91: mod_base = OTHER; note = 2'-O-methyl ribonucleotide
  modified_base 92: mod_base = OTHER; note = 2'-O-methyl ribonucleotide
  modified_base 93: mod_base = OTHER; note = 2'-O-methyl ribonucleotide
  modified_base 94: mod_base = OTHER; note = 2'-O-methyl ribonucleotide
  modified_base 95: mod_base = OTHER; note = 2'-O-methyl ribonucleotide
  modified_base 96: mod_base = OTHER; note = 2'-O-methyl ribonucleotide
  modified_base 97: mod_base = OTHER; note = 2'-O-methyl ribonucleotide
  modified_base 98: mod_base = OTHER; note = 2'-O-methyl ribonucleotide
  modified_base 99: mod_base = OTHER; note = 2'-O-methyl ribonucleotide
  modified_base 100: mod_base = OTHER; note = 2'-O-methyl ribonucleotide
  modified_base 9: mod_base = OTHER; note = nebularine
  modified_base 34: mod_base = OTHER; note = nebularine
  modified_base 42: mod_base = OTHER; note = nebularine
  modified_base 57: mod_base = OTHER; note = nebularine
  modified_base 1..4: mod_base = OTHER; note = phosphorothioate linkage
  modified_base 97..100: mod_base = OTHER; note = phosphorothioate linkage
caggttccntgggatgctctgttttagagctagnaatagcangttaaaataaggctngtccgttatcaacttgaaaaagtggcaccgagtcggtgctttt

SEQ ID NO: 1936 - RNA, 100 nt, synthetic construct
  source 1..100: mol_type = other RNA
  modified_base 1: mod_base = OTHER; note = 2'-O-methyl ribonucleotide
  modified_base 2: mod_base = OTHER; note = 2'-O-methyl ribonucleotide
  modified_base 3: mod_base = OTHER; note = 2'-O-methyl ribonucleotide
  modified_base 21: mod_base = OTHER; note = 2'-O-methyl ribonucleotide
  modified_base 28: mod_base = OTHER; note = 2'-O-methyl ribonucleotide
  modified_base 29: mod_base = OTHER; note = 2'-O-methyl ribonucleotide
  modified_base 30: mod_base = OTHER; note = 2'-O-methyl ribonucleotide
  modified_base 31: mod_base = OTHER; note = 2'-O-methyl ribonucleotide
  modified_base 32: mod_base = OTHER; note = 2'-O-methyl ribonucleotide
  modified_base 33: mod_base = OTHER; note = 2'-O-methyl ribonucleotide
  modified_base 34: mod_base = OTHER; note = 2'-O-methyl ribonucleotide
  modified_base 35: mod_base = OTHER; note = 2'-O-methyl ribonucleotide
  modified_base 36: mod_base = OTHER; note = 2'-O-methyl ribonucleotide
  modified_base 37: mod_base = OTHER; note = 2'-O-methyl ribonucleotide
  modified_base 38: mod_base = OTHER; note = 2'-O-methyl ribonucleotide
  modified_base 39: mod_base = OTHER; note = 2'-O-methyl ribonucleotide
  modified_base 40: mod_base = OTHER; note = 2'-O-methyl ribonucleotide
  modified_base 41: mod_base = OTHER; note = 2'-O-methyl ribonucleotide
  modified_base 42: mod_base = OTHER; note = 2'-O-methyl ribonucleotide
  modified_base 46: mod_base = OTHER; note = 2'-O-methyl ribonucleotide
  modified_base 48: mod_base = OTHER; note = 2'-O-methyl ribonucleotide
  modified_base 50: mod_base = OTHER; note = 2'-O-methyl ribonucleotide
  modified_base 52: mod_base = OTHER; note = 2'-O-methyl ribonucleotide
  modified_base 53: mod_base = OTHER; note = 2'-O-methyl ribonucleotide
  modified_base 54: mod_base = OTHER; note = 2'-O-methyl ribonucleotide
  modified_base 55: mod_base = OTHER; note = 2'-O-methyl ribonucleotide
  modified_base 56: mod_base = OTHER; note = 2'-O-methyl ribonucleotide
  modified_base 57: mod_base = OTHER; note = 2'-O-methyl ribonucleotide
  modified_base 60: mod_base = OTHER; note = 2'-O-methyl ribonucleotide
  modified_base 61: mod_base = OTHER; note = 2'-O-methyl ribonucleotide
  modified_base 66: mod_base = OTHER; note = 2'-O-methyl ribonucleotide
  modified_base 67: mod_base = OTHER; note = 2'-O-methyl ribonucleotide
  modified_base 70: mod_base = OTHER; note = 2'-O-methyl ribonucleotide
  modified_base 71: mod_base = OTHER; note = 2'-O-methyl ribonucleotide
  modified_base 72: mod_base = OTHER; note = 2'-O-methyl ribonucleotide
  modified_base 73: mod_base = OTHER; note = 2'-O-methyl ribonucleotide
  modified_base 74: mod_base = OTHER; note = 2'-O-methyl ribonucleotide
  modified_base 75: mod_base = OTHER; note = 2'-O-methyl ribonucleotide
  modified_base 76: mod_base = OTHER; note = 2'-O-methyl ribonucleotide
  modified_base 77: mod_base = OTHER; note = 2'-O-methyl ribonucleotide
  modified_base 78: mod_base = OTHER; note = 2'-O-methyl ribonucleotide
  modified_base 79: mod_base = OTHER; note = 2'-O-methyl ribonucleotide
  modified_base 80: mod_base = OTHER; note = 2'-O-methyl ribonucleotide
  modified_base 81: mod_base = OTHER; note = 2'-O-methyl ribonucleotide
  modified_base 83: mod_base = OTHER; note = 2'-O-methyl ribonucleotide
  modified_base 84: mod_base = OTHER; note = 2'-O-methyl ribonucleotide
  modified_base 85: mod_base = OTHER; note = 2'-O-methyl ribonucleotide
  modified_base 86: mod_base = OTHER; note = 2'-O-methyl ribonucleotide
  modified_base 87: mod_base = OTHER; note = 2'-O-methyl ribonucleotide
  modified_base 88: mod_base = OTHER; note = 2'-O-methyl ribonucleotide
  modified_base 89: mod_base = OTHER; note = 2'-O-methyl ribonucleotide
  modified_base 90: mod_base = OTHER; note = 2'-O-methyl ribonucleotide
  modified_base 91: mod_base = OTHER; note = 2'-O-methyl ribonucleotide
  modified_base 92: mod_base = OTHER; note = 2'-O-methyl ribonucleotide
  modified_base 93: mod_base = OTHER; note = 2'-O-methyl ribonucleotide
  modified_base 94: mod_base = OTHER; note = 2'-O-methyl ribonucleotide
  modified_base 95: mod_base = OTHER; note = 2'-O-methyl ribonucleotide
  modified_base 96: mod_base = OTHER; note = 2'-O-methyl ribonucleotide
  modified_base 97: mod_base = OTHER; note = 2'-O-methyl ribonucleotide
  modified_base 98: mod_base = OTHER; note = 2'-O-methyl ribonucleotide
  modified_base 99: mod_base = OTHER; note = 2'-O-methyl ribonucleotide
  modified_base 100: mod_base = OTHER; note = 2'-O-methyl ribonucleotide
  modified_base 9: mod_base = OTHER; note = nebularine
  modified_base 42: mod_base = OTHER; note = nebularine
  modified_base 57: mod_base = OTHER; note = nebularine
  modified_base 1..4: mod_base = OTHER; note = phosphorothioate linkage
  modified_base 97..100: mod_base = OTHER; note = phosphorothioate linkage
caggttccntgggatgctctgttttagagctagaaatagcangttaaaataaggctngtccgttatcaacttgaaaaagtggcaccgagtcggtgctttt

SEQ ID NO: 1937 - RNA, 100 nt, synthetic construct
  source 1..100: mol_type = other RNA
  modified_base 1: mod_base = OTHER; note = 2'-O-methyl ribonucleotide
  modified_base 2: mod_base = OTHER; note = 2'-O-methyl ribonucleotide
  modified_base 3: mod_base = OTHER; note = 2'-O-methyl ribonucleotide
  modified_base 21: mod_base = OTHER; note = 2'-O-methyl ribonucleotide
  modified_base 28: mod_base = OTHER; note = 2'-O-methyl ribonucleotide
  modified_base 29: mod_base = OTHER; note = 2'-O-methyl ribonucleotide
  modified_base 30: mod_base = OTHER; note = 2'-O-methyl ribonucleotide
  modified_base 31: mod_base = OTHER; note = 2'-O-methyl ribonucleotide
  modified_base 32: mod_base = OTHER; note = 2'-O-methyl ribonucleotide
  modified_base 33: mod_base = OTHER; note = 2'-O-methyl ribonucleotide
  modified_base 34: mod_base = OTHER; note = 2'-O-methyl ribonucleotide
  modified_base 35: mod_base = OTHER; note = 2'-O-methyl ribonucleotide
  modified_base 36: mod_base = OTHER; note = 2'-O-methyl ribonucleotide
  modified_base 37: mod_base = OTHER; note = 2'-O-methyl ribonucleotide
  modified_base 38: mod_base = OTHER; note = 2'-O-methyl ribonucleotide
  modified_base 39: mod_base = OTHER; note = 2'-O-methyl ribonucleotide
  modified_base 40: mod_base = OTHER; note = 2'-O-methyl ribonucleotide
  modified_base 41: mod_base = OTHER; note = 2'-O-methyl ribonucleotide
  modified_base 42: mod_base = OTHER; note = 2'-O-methyl ribonucleotide
  modified_base 46: mod_base = OTHER; note = 2'-O-methyl ribonucleotide
  modified_base 48: mod_base = OTHER; note = 2'-O-methyl ribonucleotide
  modified_base 50: mod_base = OTHER; note = 2'-O-methyl ribonucleotide
  modified_base 52: mod_base = OTHER; note = 2'-O-methyl ribonucleotide
  modified_base 53: mod_base = OTHER; note = 2'-O-methyl ribonucleotide
  modified_base 54: mod_base = OTHER; note = 2'-O-methyl ribonucleotide
  modified_base 55: mod_base = OTHER; note = 2'-O-methyl ribonucleotide
  modified_base 56: mod_base = OTHER; note = 2'-O-methyl ribonucleotide
  modified_base 57: mod_base = OTHER; note = 2'-O-methyl ribonucleotide
  modified_base 60: mod_base = OTHER; note = 2'-O-methyl ribonucleotide
  modified_base 61: mod_base = OTHER; note = 2'-O-methyl ribonucleotide
  modified_base 66: mod_base = OTHER; note = 2'-O-methyl ribonucleotide
  modified_base 67: mod_base = OTHER; note = 2'-O-methyl ribonucleotide
  modified_base 70: mod_base = OTHER; note = 2'-O-methyl ribonucleotide
  modified_base 71: mod_base = OTHER; note = 2'-O-methyl ribonucleotide
  modified_base 72: mod_base = OTHER; note = 2'-O-methyl ribonucleotide
  modified_base 73: mod_base = OTHER; note = 2'-O-methyl ribonucleotide
  modified_base 74: mod_base = OTHER; note = 2'-O-methyl ribonucleotide
  modified_base 75: mod_base = OTHER; note = 2'-O-methyl ribonucleotide
  modified_base 76: mod_base = OTHER; note = 2'-O-methyl ribonucleotide
  modified_base 77: mod_base = OTHER; note = 2'-O-methyl ribonucleotide
  modified_base 78: mod_base = OTHER; note = 2'-O-methyl ribonucleotide
  modified_base 79: mod_base = OTHER; note = 2'-O-methyl ribonucleotide
  modified_base 80: mod_base = OTHER; note = 2'-O-methyl ribonucleotide
  modified_base 81: mod_base = OTHER; note = 2'-O-methyl ribonucleotide
  modified_base 83: mod_base = OTHER; note = 2'-O-methyl ribonucleotide
  modified_base 84: mod_base = OTHER; note = 2'-O-methyl ribonucleotide
  modified_base 85: mod_base = OTHER; note = 2'-O-methyl ribonucleotide
  modified_base 86: mod_base = OTHER; note = 2'-O-methyl ribonucleotide
  modified_base 87: mod_base = OTHER; note = 2'-O-methyl ribonucleotide
  modified_base 88: mod_base = OTHER; note = 2'-O-methyl ribonucleotide
  modified_base 89: mod_base = OTHER; note = 2'-O-methyl ribonucleotide
  modified_base 90: mod_base = OTHER; note = 2'-O-methyl ribonucleotide
  modified_base 91: mod_base = OTHER; note = 2'-O-methyl ribonucleotide
  modified_base 92: mod_base = OTHER; note = 2'-O-methyl ribonucleotide
  modified_base 93: mod_base = OTHER; note = 2'-O-methyl ribonucleotide
  modified_base 94: mod_base = OTHER; note = 2'-O-methyl ribonucleotide
  modified_base 95: mod_base = OTHER; note = 2'-O-methyl ribonucleotide
  modified_base 96: mod_base = OTHER; note = 2'-O-methyl ribonucleotide
  modified_base 97: mod_base = OTHER; note = 2'-O-methyl ribonucleotide
  modified_base 98: mod_base = OTHER; note = 2'-O-methyl ribonucleotide
  modified_base 99: mod_base = OTHER; note = 2'-O-methyl ribonucleotide
  modified_base 100: mod_base = OTHER; note = 2'-O-methyl ribonucleotide
  modified_base 9: mod_base = OTHER; note = nebularine
  modified_base 28: mod_base = OTHER; note = nebularine
  modified_base 1..4: mod_base = OTHER; note = phosphorothioate linkage
  modified_base 97..100: mod_base = OTHER; note = phosphorothioate linkage
caggttccntgggatgctctgttttagngctagaaatagcaagttaaaataaggctagtccgttatcaacttgaaaaagtggcaccgagtcggtgctttt

SEQ ID NO: 1938 - RNA, 100 nt, synthetic construct
  source 1..100: mol_type = other RNA
  modified_base 1: mod_base = OTHER; note = 2'-O-methyl ribonucleotide
  modified_base 2: mod_base = OTHER; note = 2'-O-methyl ribonucleotide
  modified_base 3: mod_base = OTHER; note = 2'-O-methyl ribonucleotide
  modified_base 21: mod_base = OTHER; note = 2'-O-methyl ribonucleotide
  modified_base 28: mod_base = OTHER; note = 2'-O-methyl ribonucleotide
  modified_base 29: mod_base = OTHER; note = 2'-O-methyl ribonucleotide
  modified_base 30: mod_base = OTHER; note = 2'-O-methyl ribonucleotide
  modified_base 31: mod_base = OTHER; note = 2'-O-methyl ribonucleotide
  modified_base 32: mod_base = OTHER; note = 2'-O-methyl ribonucleotide
  modified_base 33: mod_base = OTHER; note = 2'-O-methyl ribonucleotide
  modified_base 34: mod_base = OTHER; note = 2'-O-methyl ribonucleotide
  modified_base 35: mod_base = OTHER; note = 2'-O-methyl ribonucleotide
  modified_base 36: mod_base = OTHER; note = 2'-O-methyl ribonucleotide
  modified_base 37: mod_base = OTHER; note = 2'-O-methyl ribonucleotide
  modified_base 38: mod_base = OTHER; note = 2'-O-methyl ribonucleotide
  modified_base 39: mod_base = OTHER; note = 2'-O-methyl ribonucleotide
  modified_base 40: mod_base = OTHER; note = 2'-O-methyl ribonucleotide
  modified_base 41: mod_base = OTHER; note = 2'-O-methyl ribonucleotide
  modified_base 42: mod_base = OTHER; note = 2'-O-methyl ribonucleotide
  modified_base 46: mod_base = OTHER; note = 2'-O-methyl ribonucleotide
  modified_base 48: mod_base = OTHER; note = 2'-O-methyl ribonucleotide
  modified_base 50: mod_base = OTHER; note = 2'-O-methyl ribonucleotide
  modified_base 52: mod_base = OTHER; note = 2'-O-methyl ribonucleotide
  modified_base 53: mod_base = OTHER; note = 2'-O-methyl ribonucleotide
  modified_base 54: mod_base = OTHER; note = 2'-O-methyl ribonucleotide
  modified_base 55: mod_base = OTHER; note = 2'-O-methyl ribonucleotide
  modified_base 56: mod_base = OTHER; note = 2'-O-methyl ribonucleotide
  modified_base 57: mod_base = OTHER; note = 2'-O-methyl ribonucleotide
  modified_base 60: mod_base = OTHER; note = 2'-O-methyl ribonucleotide
  modified_base 61: mod_base = OTHER; note = 2'-O-methyl ribonucleotide
  modified_base 66: mod_base = OTHER; note = 2'-O-methyl ribonucleotide
  modified_base 67: mod_base = OTHER; note = 2'-O-methyl ribonucleotide
  modified_base 70: mod_base = OTHER; note = 2'-O-methyl ribonucleotide
  modified_base 71: mod_base = OTHER; note = 2'-O-methyl ribonucleotide
  modified_base 72: mod_base = OTHER; note = 2'-O-methyl ribonucleotide
  modified_base 73: mod_base = OTHER; note = 2'-O-methyl ribonucleotide
  modified_base 74: mod_base = OTHER; note = 2'-O-methyl ribonucleotide
  modified_base 75: mod_base = OTHER; note = 2'-O-methyl ribonucleotide
  modified_base 76: mod_base = OTHER; note = 2'-O-methyl ribonucleotide
  modified_base 77: mod_base = OTHER; note = 2'-O-methyl ribonucleotide
  modified_base 78: mod_base = OTHER; note = 2'-O-methyl ribonucleotide
  modified_base 79: mod_base = OTHER; note = 2'-O-methyl ribonucleotide
  modified_base 80: mod_base = OTHER; note = 2'-O-methyl ribonucleotide
  modified_base 81: mod_base = OTHER; note = 2'-O-methyl ribonucleotide
  modified_base 83: mod_base = OTHER; note = 2'-O-methyl ribonucleotide
  modified_base 84: mod_base = OTHER; note = 2'-O-methyl ribonucleotide
  modified_base 85: mod_base = OTHER; note = 2'-O-methyl ribonucleotide
  modified_base 86: mod_base = OTHER; note = 2'-O-methyl ribonucleotide
  modified_base 87: mod_base = OTHER; note = 2'-O-methyl ribonucleotide
  modified_base 88: mod_base = OTHER; note = 2'-O-methyl ribonucleotide
  modified_base 89: mod_base = OTHER; note = 2'-O-methyl ribonucleotide
  modified_base 90: mod_base = OTHER; note = 2'-O-methyl ribonucleotide
  modified_base 91: mod_base = OTHER; note = 2'-O-methyl ribonucleotide
  modified_base 92: mod_base = OTHER; note = 2'-O-methyl ribonucleotide
  modified_base 93: mod_base = OTHER; note = 2'-O-methyl ribonucleotide
  modified_base 94: mod_base = OTHER; note = 2'-O-methyl ribonucleotide
  modified_base 95: mod_base = OTHER; note = 2'-O-methyl ribonucleotide
  modified_base 96: mod_base = OTHER; note = 2'-O-methyl ribonucleotide
  modified_base 97: mod_base = OTHER; note = 2'-O-methyl ribonucleotide
  modified_base 98: mod_base = OTHER; note = 2'-O-methyl ribonucleotide
  modified_base 99: mod_base = OTHER; note = 2'-O-methyl ribonucleotide
  modified_base 100: mod_base = OTHER; note = 2'-O-methyl ribonucleotide
  modified_base 9: mod_base = OTHER; note = nebularine
  modified_base 42: mod_base = OTHER; note = nebularine
  modified_base 1..4: mod_base = OTHER; note = phosphorothioate linkage
  modified_base 97..100: mod_base = OTHER; note = phosphorothioate linkage
caggttccntgggatgctctgttttagagctagaaatagcangttaaaataaggctagtccgttatcaacttgaaaaagtggcaccgagtcggtgctttt

SEQ ID NO: 1939 - RNA, 100 nt, synthetic construct
  source 1..100: mol_type = other RNA
  modified_base 1: mod_base = OTHER; note = 2'-O-methyl ribonucleotide
  modified_base 2: mod_base = OTHER; note = 2'-O-methyl ribonucleotide
  modified_base 3: mod_base = OTHER; note = 2'-O-methyl ribonucleotide
  modified_base 21: mod_base = OTHER; note = 2'-O-methyl ribonucleotide
  modified_base 28: mod_base = OTHER; note = 2'-O-methyl ribonucleotide
  modified_base 29: mod_base = OTHER; note = 2'-O-methyl ribonucleotide
  modified_base 30: mod_base = OTHER; note = 2'-O-methyl ribonucleotide
  modified_base 31: mod_base = OTHER; note = 2'-O-methyl ribonucleotide
  modified_base 32: mod_base = OTHER; note = 2'-O-methyl ribonucleotide
  modified_base 33: mod_base = OTHER; note = 2'-O-methyl ribonucleotide
  modified_base 34: mod_base = OTHER; note = 2'-O-methyl ribonucleotide
  modified_base 35: mod_base = OTHER; note = 2'-O-methyl ribonucleotide
  modified_base 36: mod_base = OTHER; note = 2'-O-methyl ribonucleotide
  modified_base 37: mod_base = OTHER; note = 2'-O-methyl ribonucleotide
  modified_base 38: mod_base = OTHER; note = 2'-O-methyl ribonucleotide
  modified_base 39: mod_base = OTHER; note = 2'-O-methyl ribonucleotide
  modified_base 40: mod_base = OTHER; note = 2'-O-methyl ribonucleotide
  modified_base 41: mod_base = OTHER; note = 2'-O-methyl ribonucleotide
  modified_base 42: mod_base = OTHER; note = 2'-O-methyl ribonucleotide
  modified_base 46: mod_base = OTHER; note = 2'-O-methyl ribonucleotide
  modified_base 48: mod_base = OTHER; note = 2'-O-methyl ribonucleotide
  modified_base 50: mod_base = OTHER; note = 2'-O-methyl ribonucleotide
  modified_base 52: mod_base = OTHER; note = 2'-O-methyl ribonucleotide
  modified_base 53: mod_base = OTHER; note = 2'-O-methyl ribonucleotide
  modified_base 54: mod_base = OTHER; note = 2'-O-methyl ribonucleotide
  modified_base 55: mod_base = OTHER; note = 2'-O-methyl ribonucleotide
  modified_base 56: mod_base = OTHER; note = 2'-O-methyl ribonucleotide
  modified_base 57: mod_base = OTHER; note = 2'-O-methyl ribonucleotide
  modified_base 60: mod_base = OTHER; note = 2'-O-methyl ribonucleotide
  modified_base 61: mod_base = OTHER; note = 2'-O-methyl ribonucleotide
  modified_base 66: mod_base = OTHER; note = 2'-O-methyl ribonucleotide
  modified_base 67: mod_base = OTHER; note = 2'-O-methyl ribonucleotide
  modified_base 70: mod_base = OTHER; note = 2'-O-methyl ribonucleotide
  modified_base 71: mod_base = OTHER; note = 2'-O-methyl ribonucleotide
  modified_base 72: mod_base = OTHER; note = 2'-O-methyl ribonucleotide
  modified_base 73: mod_base = OTHER; note = 2'-O-methyl ribonucleotide
  modified_base 74: mod_base = OTHER; note = 2'-O-methyl ribonucleotide
  modified_base 75: mod_base = OTHER; note = 2'-O-methyl ribonucleotide
  modified_base 76: mod_base = OTHER; note = 2'-O-methyl ribonucleotide
  modified_base 77: mod_base = OTHER; note = 2'-O-methyl ribonucleotide
  modified_base 78: mod_base = OTHER; note = 2'-O-methyl ribonucleotide
  modified_base 79: mod_base = OTHER; note = 2'-O-methyl ribonucleotide
  modified_base 80: mod_base = OTHER; note = 2'-O-methyl ribonucleotide
  modified_base 81: mod_base = OTHER; note = 2'-O-methyl ribonucleotide
  modified_base 83: mod_base = OTHER; note = 2'-O-methyl ribonucleotide
  modified_base 84: mod_base = OTHER; note = 2'-O-methyl ribonucleotide
  modified_base 85: mod_base = OTHER; note = 2'-O-methyl ribonucleotide
  modified_base 86: mod_base = OTHER; note = 2'-O-methyl ribonucleotide
  modified_base 87: mod_base = OTHER; note = 2'-O-methyl ribonucleotide
  modified_base 88: mod_base = OTHER; note = 2'-O-methyl ribonucleotide
  modified_base 89: mod_base = OTHER; note = 2'-O-methyl ribonucleotide
  modified_base 90: mod_base = OTHER; note = 2'-O-methyl ribonucleotide
  modified_base 91: mod_base = OTHER; note = 2'-O-methyl ribonucleotide
  modified_base 92: mod_base = OTHER; note = 2'-O-methyl ribonucleotide
  modified_base 93: mod_base = OTHER; note = 2'-O-methyl ribonucleotide
  modified_base 94: mod_base = OTHER; note = 2'-O-methyl ribonucleotide
  modified_base 95: mod_base = OTHER; note = 2'-O-methyl ribonucleotide
  modified_base 96: mod_base = OTHER; note = 2'-O-methyl ribonucleotide
  modified_base 97: mod_base = OTHER; note = 2'-O-methyl ribonucleotide
  modified_base 98: mod_base = OTHER; note = 2'-O-methyl ribonucleotide
  modified_base 99: mod_base = OTHER; note = 2'-O-methyl ribonucleotide
  modified_base 100: mod_base = OTHER; note = 2'-O-methyl ribonucleotide
  modified_base 9: mod_base = OTHER; note = nebularine
  modified_base 34: mod_base = OTHER; note = nebularine
  modified_base 42: mod_base = OTHER; note = nebularine
  modified_base 1..4: mod_base = OTHER; note = phosphorothioate linkage
  modified_base 97..100: mod_base = OTHER; note = phosphorothioate linkage
caggttccntgggatgctctgttttagagctagnaatagcangttaaaataaggctagtccgttatcaacttgaaaaagtggcaccgagtcggtgctttt

SEQ ID NO: 1940 - RNA, 100 nt, synthetic construct
  source 1..100: mol_type = other RNA
  modified_base 1: mod_base = OTHER; note = 2'-O-methyl ribonucleotide
  modified_base 2: mod_base = OTHER; note = 2'-O-methyl ribonucleotide
  modified_base 3: mod_base = OTHER; note = 2'-O-methyl ribonucleotide
  modified_base 21: mod_base = OTHER; note = 2'-O-methyl ribonucleotide
  modified_base 28: mod_base = OTHER; note = 2'-O-methyl ribonucleotide
  modified_base 29: mod_base = OTHER; note = 2'-O-methyl ribonucleotide
  modified_base 30: mod_base = OTHER; note = 2'-O-methyl ribonucleotide
  modified_base 31: mod_base = OTHER; note = 2'-O-methyl ribonucleotide
  modified_base 32: mod_base = OTHER; note = 2'-O-methyl ribonucleotide
  modified_base 33: mod_base = OTHER; note = 2'-O-methyl ribonucleotide
  modified_base 34: mod_base = OTHER; note = 2'-O-methyl ribonucleotide
  modified_base 35: mod_base = OTHER; note = 2'-O-methyl ribonucleotide
  modified_base 36: mod_base = OTHER; note = 2'-O-methyl ribonucleotide
  modified_base 37: mod_base = OTHER; note = 2'-O-methyl ribonucleotide
  modified_base 38: mod_base = OTHER; note = 2'-O-methyl ribonucleotide
  modified_base 39: mod_base = OTHER; note = 2'-O-methyl ribonucleotide
  modified_base 40: mod_base = OTHER; note = 2'-O-methyl ribonucleotide
  modified_base 41: mod_base = OTHER; note = 2'-O-methyl ribonucleotide
  modified_base 42: mod_base = OTHER; note = 2'-O-methyl ribonucleotide
  modified_base 46: mod_base = OTHER; note = 2'-O-methyl ribonucleotide
  modified_base 48: mod_base = OTHER; note = 2'-O-methyl ribonucleotide
  modified_base 50: mod_base = OTHER; note = 2'-O-methyl ribonucleotide
  modified_base 52: mod_base = OTHER; note = 2'-O-methyl ribonucleotide
  modified_base 53: mod_base = OTHER; note = 2'-O-methyl ribonucleotide
  modified_base 54: mod_base = OTHER; note = 2'-O-methyl ribonucleotide
  modified_base 55: mod_base = OTHER; note = 2'-O-methyl ribonucleotide
  modified_base 56: mod_base = OTHER; note = 2'-O-methyl ribonucleotide
  modified_base 57: mod_base = OTHER; note = 2'-O-methyl ribonucleotide
  modified_base 60: mod_base = OTHER; note = 2'-O-methyl ribonucleotide
  modified_base 61: mod_base = OTHER; note = 2'-O-methyl ribonucleotide
  modified_base 66: mod_base = OTHER; note = 2'-O-methyl ribonucleotide
  modified_base 67: mod_base = OTHER; note = 2'-O-methyl ribonucleotide
  modified_base 70: mod_base = OTHER; note = 2'-O-methyl ribonucleotide
  modified_base 71: mod_base = OTHER; note = 2'-O-methyl ribonucleotide
  modified_base 72: mod_base = OTHER; note = 2'-O-methyl ribonucleotide
  modified_base 73: mod_base = OTHER; note = 2'-O-methyl ribonucleotide
  modified_base 74: mod_base = OTHER; note = 2'-O-methyl ribonucleotide
  modified_base 75: mod_base = OTHER; note = 2'-O-methyl ribonucleotide
  modified_base 76: mod_base = OTHER; note = 2'-O-methyl ribonucleotide
  modified_base 77: mod_base = OTHER; note = 2'-O-methyl ribonucleotide
  modified_base 78: mod_base = OTHER; note = 2'-O-methyl ribonucleotide
  modified_base 79: mod_base = OTHER; note = 2'-O-methyl ribonucleotide
  modified_base 80: mod_base = OTHER; note = 2'-O-methyl ribonucleotide
  modified_base 81: mod_base = OTHER; note = 2'-O-methyl ribonucleotide
  modified_base 83: mod_base = OTHER; note = 2'-O-methyl ribonucleotide
  modified_base 84: mod_base = OTHER; note = 2'-O-methyl ribonucleotide
  modified_base 85: mod_base = OTHER; note = 2'-O-methyl ribonucleotide
  modified_base 86: mod_base = OTHER; note = 2'-O-methyl ribonucleotide
  modified_base 87: mod_base = OTHER; note = 2'-O-methyl ribonucleotide
  modified_base 88: mod_base = OTHER; note = 2'-O-methyl ribonucleotide
  modified_base 89: mod_base = OTHER; note = 2'-O-methyl ribonucleotide
  modified_base 90: mod_base = OTHER; note = 2'-O-methyl ribonucleotide
  modified_base 91: mod_base = OTHER; note = 2'-O-methyl ribonucleotide
  modified_base 92: mod_base = OTHER; note = 2'-O-methyl ribonucleotide
  modified_base 93: mod_base = OTHER; note = 2'-O-methyl ribonucleotide
  modified_base 94: mod_base = OTHER; note = 2'-O-methyl ribonucleotide
  modified_base 95: mod_base = OTHER; note = 2'-O-methyl ribonucleotide
  modified_base 96: mod_base = OTHER; note = 2'-O-methyl ribonucleotide
  modified_base 97: mod_base = OTHER; note = 2'-O-methyl ribonucleotide
  modified_base 98: mod_base = OTHER; note = 2'-O-methyl ribonucleotide
  modified_base 99: mod_base = OTHER; note = 2'-O-methyl ribonucleotide
  modified_base 100: mod_base = OTHER; note = 2'-O-methyl ribonucleotide
  modified_base 9: mod_base = OTHER; note = nebularine
  modified_base 34: mod_base = OTHER; note = nebularine
  modified_base 1..4: mod_base = OTHER; note = phosphorothioate linkage
  modified_base 97..100: mod_base = OTHER; note = phosphorothioate linkage
caggttccntgggatgctctgttttagagctagnaatagcaagttaaaataaggctagtccgttatcaacttgaaaaagtggcaccgagtcggtgctttt

SEQ ID NO: 1941 - DNA, 100 bp, synthetic construct
  source 1..100: mol_type = other DNA
  modified_base 1: mod_base = OTHER; note = 2'-O-methyl ribonucleotide
  modified_base 2: mod_base = OTHER; note = 2'-O-methyl ribonucleotide
  modified_base 3: mod_base = OTHER; note = 2'-O-methyl ribonucleotide
  modified_base 21: mod_base = OTHER; note = 2'-O-methyl ribonucleotide
  modified_base 28: mod_base = OTHER; note = 2'-O-methyl ribonucleotide
  modified_base 29: mod_base = OTHER; note = 2'-O-methyl ribonucleotide
  modified_base 30: mod_base = OTHER; note = 2'-O-methyl ribonucleotide
  modified_base 31: mod_base = OTHER; note = 2'-O-methyl ribonucleotide
  modified_base 32: mod_base = OTHER; note = 2'-O-methyl ribonucleotide
  modified_base 33: mod_base = OTHER; note = 2'-O-methyl ribonucleotide
  modified_base 34: mod_base = OTHER; note = 2'-O-methyl ribonucleotide
  modified_base 35: mod_base = OTHER; note = 2'-O-methyl ribonucleotide
  modified_base 36: mod_base = OTHER; note = 2'-O-methyl ribonucleotide
  modified_base 37: mod_base = OTHER; note = 2'-O-methyl ribonucleotide
  modified_base 38: mod_base = OTHER; note = 2'-O-methyl ribonucleotide
  modified_base 39: mod_base = OTHER; note = 2'-O-methyl ribonucleotide
  modified_base 40: mod_base = OTHER; note = 2'-O-methyl ribonucleotide
  modified_base 41: mod_base = OTHER; note = 2'-O-methyl ribonucleotide
  modified_base 42: mod_base = OTHER; note = 2'-O-methyl ribonucleotide
  modified_base 46: mod_base = OTHER; note = 2'-O-methyl ribonucleotide
  modified_base 48: mod_base = OTHER; note = 2'-O-methyl ribonucleotide
  modified_base 50: mod_base = OTHER; note = 2'-O-methyl ribonucleotide
  modified_base 52: mod_base = OTHER; note = 2'-O-methyl ribonucleotide
  modified_base 53: mod_base = OTHER; note = 2'-O-methyl ribonucleotide
  modified_base 54: mod_base = OTHER; note = 2'-O-methyl ribonucleotide
  modified_base 55: mod_base = OTHER; note = 2'-O-methyl ribonucleotide
  modified_base 56: mod_base = OTHER; note = 2'-O-methyl ribonucleotide
  modified_base 57: mod_base = OTHER; note = 2'-O-methyl ribonucleotide
  modified_base 60: mod_base = OTHER; note = 2'-O-methyl ribonucleotide
  modified_base 61: mod_base = OTHER; note = 2'-O-methyl ribonucleotide
  modified_base 66: mod_base = OTHER; note = 2'-O-methyl ribonucleotide
  modified_base 67: mod_base = OTHER; note = 2'-O-methyl ribonucleotide
  modified_base 70: mod_base = OTHER; note = 2'-O-methyl ribonucleotide
  modified_base 71: mod_base = OTHER; note = 2'-O-methyl ribonucleotide
  modified_base 72: mod_base = OTHER; note = 2'-O-methyl ribonucleotide
  modified_base 73: mod_base = OTHER; note = 2'-O-methyl ribonucleotide
  modified_base 74: mod_base = OTHER; note = 2'-O-methyl ribonucleotide
  modified_base 75: mod_base = OTHER; note = 2'-O-methyl ribonucleotide
  modified_base 76: mod_base = OTHER; note = 2'-O-methyl ribonucleotide
  modified_base 77: mod_base = OTHER; note = 2'-O-methyl ribonucleotide
  modified_base 78: mod_base = OTHER; note = 2'-O-methyl ribonucleotide
  modified_base 79: mod_base = OTHER; note = 2'-O-methyl ribonucleotide
  modified_base 80: mod_base = OTHER; note = 2'-O-methyl ribonucleotide
  modified_base 81: mod_base = OTHER; note = 2'-O-methyl ribonucleotide
  modified_base 83: mod_base = OTHER; note = 2'-O-methyl ribonucleotide
  modified_base 84: mod_base = OTHER; note = 2'-O-methyl ribonucleotide
  modified_base 85: mod_base = OTHER; note = 2'-O-methyl ribonucleotide
  modified_base 86: mod_base = OTHER; note = 2'-O-methyl ribonucleotide
  modified_base 87: mod_base = OTHER; note = 2'-O-methyl ribonucleotide
  modified_base 88: mod_base = OTHER; note = 2'-O-methyl ribonucleotide
  modified_base 89: mod_base = OTHER; note = 2'-O-methyl ribonucleotide
  modified_base 90: mod_base = OTHER; note = 2'-O-methyl ribonucleotide
  modified_base 91: mod_base = OTHER; note = 2'-O-methyl ribonucleotide
  modified_base 92: mod_base = OTHER; note = 2'-O-methyl ribonucleotide
  modified_base 93: mod_base = OTHER; note = 2'-O-methyl ribonucleotide
  modified_base 94: mod_base = OTHER; note = 2'-O-methyl ribonucleotide
  modified_base 95: mod_base = OTHER; note = 2'-O-methyl ribonucleotide
  modified_base 96: mod_base = OTHER; note = 2'-O-methyl ribonucleotide
  modified_base 97: mod_base = OTHER; note = 2'-O-methyl ribonucleotide
  modified_base 98: mod_base = OTHER; note = 2'-O-methyl ribonucleotide
  modified_base 99: mod_base = OTHER; note = 2'-O-methyl ribonucleotide
  modified_base 100: mod_base = OTHER; note = 2'-O-methyl ribonucleotide
  modified_base 9: mod_base = OTHER; note = nebularine
  modified_base 14: mod_base = OTHER; note = nebularine
  modified_base 1..4: mod_base = OTHER; note = phosphorothioate linkage
  modified_base 97..100: mod_base = OTHER; note = phosphorothioate linkage
  misc_feature 1: note = RNA
  misc_feature 2: note = RNA
  misc_feature 3: note = RNA
  misc_feature 4: note = RNA
  misc_feature 5: note = RNA
  misc_feature 6: note = RNA
  misc_feature 7: note = RNA
  misc_feature 8: note = RNA
  misc_feature 10: note = RNA
  misc_feature 11: note = RNA
  misc_feature 12: note = RNA
  misc_feature 13: note = RNA
  misc_feature 15: note = RNA
  misc_feature 16: note = RNA
  misc_feature 17: note = RNA
  misc_feature 18: note = RNA
  misc_feature 19: note = RNA
  misc_feature 20: note = RNA
  misc_feature 21: note = RNA
  misc_feature 22: note = RNA
  misc_feature 23: note = RNA
  misc_feature 24: note = RNA
  misc_feature 25: note = RNA
  misc_feature 26: note = RNA
  misc_feature 27: note = RNA
  misc_feature 28: note = RNA
  misc_feature 29: note = RNA
  misc_feature 30: note = RNA
  misc_feature 31: note = RNA
  misc_feature 32: note = RNA
  misc_feature 33: note = RNA
  misc_feature 34: note = RNA
  misc_feature 35: note = RNA
  misc_feature 36: note = RNA
  misc_feature 37: note = RNA
  misc_feature 38: note = RNA
  misc_feature 39: note = RNA
  misc_feature 40: note = RNA
  misc_feature 41: note = RNA
  misc_feature 42: note = RNA
  misc_feature 43: note = RNA
  misc_feature 44: note = RNA
  misc_feature 45: note = RNA
  misc_feature 46: note = RNA
  misc_feature 47: note = RNA
  misc_feature 48: note = RNA
  misc_feature 49: note = RNA
  misc_feature 50: note = RNA
  misc_feature 51: note = RNA
  misc_feature 52: note = RNA
  misc_feature 53: note = RNA
  misc_feature 54: note = RNA
  misc_feature 55: note = RNA
  misc_feature 56: note = RNA
  misc_feature 57: note = RNA
  misc_feature 58: note = RNA
  misc_feature 59: note = RNA
  misc_feature 60: note = RNA
  misc_feature 61: note = RNA
  misc_feature 62: note = RNA
  misc_feature 63: note = RNA
  misc_feature 64: note = RNA
  misc_feature 65: note = RNA
  misc_feature 66: note = RNA
  misc_feature 67: note = RNA
  misc_feature 68: note = RNA
  misc_feature 69: note = RNA
  misc_feature 70: note = RNA
  misc_feature 71: note = RNA
  misc_feature 72: note = RNA
  misc_feature 73: note = RNA
  misc_feature 74: note = RNA
  misc_feature 75: note = RNA
  misc_feature 76: note = RNA
  misc_feature 77: note = RNA
  misc_feature 78: note = RNA
  misc_feature 79: note = RNA
  misc_feature 80: note = RNA
  misc_feature 81: note = RNA
  misc_feature 82: note = RNA
  misc_feature 83: note = RNA
  misc_feature 84: note = RNA
  misc_feature 85: note = RNA
  misc_feature 86: note = RNA
  misc_feature 87: note = RNA
  misc_feature 88: note = RNA
  misc_feature 89: note = RNA
  misc_feature 90: note = RNA
  misc_feature 91: note = RNA
  misc_feature 92: note = RNA
  misc_feature 93: note = RNA
  misc_feature 94: note = RNA
  misc_feature 95: note = RNA
  misc_feature 96: note = RNA
  misc_feature 97: note = RNA
  misc_feature 98: note = RNA
  misc_feature 99: note = RNA
  misc_feature 100: note = RNA
  misc_feature 9: note = DNA
  misc_feature 14: note = DNA
caggttccntgggntgctctgttttagagctagaaatagcaagttaaaataaggctagtccgttatcaacttgaaaaagtggcaccgagtcggtgctttt

SEQ ID NO: 1942 - DNA, 100 bp, synthetic construct
  source 1..100: mol_type = other DNA
  modified_base 1: mod_base = OTHER; note = 2'-O-methyl ribonucleotide
  modified_base 2: mod_base = OTHER; note = 2'-O-methyl ribonucleotide
  modified_base 3: mod_base = OTHER; note = 2'-O-methyl ribonucleotide
  modified_base 21: mod_base = OTHER; note = 2'-O-methyl ribonucleotide
  modified_base 28: mod_base = OTHER; note = 2'-O-methyl ribonucleotide
  modified_base 29: mod_base = OTHER; note = 2'-O-methyl ribonucleotide
  modified_base 30: mod_base = OTHER; note = 2'-O-methyl ribonucleotide
  modified_base 31: mod_base = OTHER; note = 2'-O-methyl ribonucleotide
  modified_base 32: mod_base = OTHER; note = 2'-O-methyl ribonucleotide
  modified_base 33: mod_base = OTHER; note = 2'-O-methyl ribonucleotide
  modified_base 34: mod_base = OTHER; note = 2'-O-methyl ribonucleotide
  modified_base 35: mod_base = OTHER; note = 2'-O-methyl ribonucleotide
  modified_base 36: mod_base = OTHER; note = 2'-O-methyl ribonucleotide
  modified_base 37: mod_base = OTHER; note = 2'-O-methyl ribonucleotide
  modified_base 38: mod_base = OTHER; note = 2'-O-methyl ribonucleotide
  modified_base 39: mod_base = OTHER; note = 2'-O-methyl ribonucleotide
  modified_base 40: mod_base = OTHER; note = 2'-O-methyl ribonucleotide
  modified_base 41: mod_base = OTHER; note = 2'-O-methyl ribonucleotide
  modified_base 42: mod_base = OTHER; note = 2'-O-methyl ribonucleotide
  modified_base 46: mod_base = OTHER; note = 2'-O-methyl ribonucleotide
  modified_base 48: mod_base = OTHER; note = 2'-O-methyl ribonucleotide
  modified_base 50: mod_base = OTHER; note = 2'-O-methyl ribonucleotide
  modified_base 52: mod_base = OTHER; note = 2'-O-methyl ribonucleotide
  modified_base 53: mod_base = OTHER; note = 2'-O-methyl ribonucleotide
  modified_base 54: mod_base = OTHER; note = 2'-O-methyl ribonucleotide
  modified_base 55: mod_base = OTHER; note = 2'-O-methyl ribonucleotide
  modified_base 56: mod_base = OTHER; note = 2'-O-methyl ribonucleotide
  modified_base 57: mod_base = OTHER; note = 2'-O-methyl ribonucleotide
  modified_base 60: mod_base = OTHER; note = 2'-O-methyl ribonucleotide
  modified_base 61: mod_base = OTHER; note = 2'-O-methyl ribonucleotide
  modified_base 66: mod_base = OTHER; note = 2'-O-methyl ribonucleotide
  modified_base 67: mod_base = OTHER; note = 2'-O-methyl ribonucleotide
  modified_base 70: mod_base = OTHER; note = 2'-O-methyl ribonucleotide
  modified_base 71: mod_base = OTHER; note = 2'-O-methyl ribonucleotide
  modified_base 72: mod_base = OTHER; note = 2'-O-methyl ribonucleotide
  modified_base 73: mod_base = OTHER; note = 2'-O-methyl ribonucleotide
  modified_base 74: mod_base = OTHER; note = 2'-O-methyl ribonucleotide
  modified_base 75: mod_base = OTHER; note = 2'-O-methyl ribonucleotide
  modified_base 76: mod_base = OTHER; note = 2'-O-methyl ribonucleotide
  modified_base 77: mod_base = OTHER; note = 2'-O-methyl ribonucleotide
  modified_base 78: mod_base = OTHER; note = 2'-O-methyl ribonucleotide
  modified_base 79: mod_base = OTHER; note = 2'-O-methyl ribonucleotide
  modified_base 80: mod_base = OTHER; note = 2'-O-methyl ribonucleotide
  modified_base 81: mod_base = OTHER; note = 2'-O-methyl ribonucleotide
  modified_base 83: mod_base = OTHER; note = 2'-O-methyl ribonucleotide
  modified_base 84: mod_base = OTHER; note = 2'-O-methyl ribonucleotide
  modified_base 85: mod_base = OTHER; note = 2'-O-methyl ribonucleotide
  modified_base 86: mod_base = OTHER; note = 2'-O-methyl ribonucleotide
  modified_base 87: mod_base = OTHER; note = 2'-O-methyl ribonucleotide
  modified_base 88: mod_base = OTHER; note = 2'-O-methyl ribonucleotide
  modified_base 89: mod_base = OTHER; note = 2'-O-methyl ribonucleotide
  modified_base 90: mod_base = OTHER; note = 2'-O-methyl ribonucleotide
  modified_base 91: mod_base = OTHER; note = 2'-O-methyl ribonucleotide
  modified_base 92: mod_base = OTHER; note = 2'-O-methyl ribonucleotide
  modified_base 93: mod_base = OTHER; note = 2'-O-methyl ribonucleotide
  modified_base 94: mod_base = OTHER; note = 2'-O-methyl ribonucleotide
  modified_base 95: mod_base = OTHER; note = 2'-O-methyl ribonucleotide
  modified_base 96: mod_base = OTHER; note = 2'-O-methyl ribonucleotide
  modified_base 97: mod_base = OTHER; note = 2'-O-methyl ribonucleotide
  modified_base 98: mod_base = OTHER; note = 2'-O-methyl ribonucleotide
  modified_base 99: mod_base = OTHER; note = 2'-O-methyl ribonucleotide
  modified_base 100: mod_base = OTHER; note = 2'-O-methyl ribonucleotide
  modified_base 9: mod_base = OTHER; note = nebularine
  modified_base 1..4: mod_base = OTHER; note = phosphorothioate linkage
  modified_base 97..100: mod_base = OTHER; note = phosphorothioate linkage
  misc_feature 1: note = RNA
  misc_feature 2: note = RNA
  misc_feature 3: note = RNA
  misc_feature 4: note = RNA
  misc_feature 5: note = RNA
  misc_feature 6: note = RNA
  misc_feature 7: note = RNA
  misc_feature 8: note = RNA
  misc_feature 10: note = RNA
  misc_feature 11: note = RNA
  misc_feature 12: note = RNA
  misc_feature 13: note = RNA
  misc_feature 14: note = RNA
  misc_feature 15: note = RNA
  misc_feature 16: note = RNA
  misc_feature 17: note = RNA
  misc_feature 18: note = RNA
  misc_feature 19: note = RNA
  misc_feature 20: note = RNA
  misc_feature 21: note = RNA
  misc_feature 22: note = RNA
  misc_feature 23: note = RNA
  misc_feature 24: note = RNA
  misc_feature 25: note = RNA
  misc_feature 26: note = RNA
  misc_feature 27: note = RNA
  misc_feature 28: note = RNA
  misc_feature 29: note = RNA
  misc_feature 30: note = RNA
  misc_feature 31: note = RNA
  misc_feature 32: note = RNA
  misc_feature 33: note = RNA
  misc_feature 34: note = RNA
  misc_feature 35: note = RNA
  misc_feature 36: note = RNA
  misc_feature 37: note = RNA
  misc_feature 38: note = RNA
  misc_feature 39: note = RNA
  misc_feature 40: note = RNA
  misc_feature 41: note = RNA
  misc_feature 42: note = RNA
  misc_feature 43: note = RNA
  misc_feature 44: note = RNA
  misc_feature 45: note = RNA
  misc_feature 46: note = RNA
  misc_feature 47: note = RNA
  misc_feature 48: note = RNA
  misc_feature 49: note = RNA
  misc_feature 50: note = RNA
  misc_feature 51: note = RNA
  misc_feature 52: note = RNA
  misc_feature 53: note = RNA
  misc_feature 54: note = RNA
  misc_feature 55: note = RNA
  misc_feature 56: note = RNA
  misc_feature 57: note = RNA
  misc_feature 58: note = RNA
  misc_feature 59: note = RNA
  misc_feature 60: note = RNA
  misc_feature 61: note = RNA
  misc_feature 62: note = RNA
  misc_feature 63: note = RNA
  misc_feature 64: note = RNA
  misc_feature 65: note = RNA
  misc_feature 66: note = RNA
  misc_feature 67: note = RNA
  misc_feature 68: note = RNA
  misc_feature 69: note = RNA
  misc_feature 70: note = RNA
  misc_feature 71: note = RNA
  misc_feature 72: note = RNA
  misc_feature 73: note = RNA
  misc_feature 74: note = RNA
  misc_feature 75: note = RNA
  misc_feature 76: note = RNA
  misc_feature 77: note = RNA
  misc_feature 78: note = RNA
  misc_feature 79: note = RNA
  misc_feature 80: note = RNA
  misc_feature 81: note = RNA
  misc_feature 82: note = RNA
  misc_feature 83: note = RNA
  misc_feature 84: note = RNA
  misc_feature 85: note = RNA
  misc_feature 86: note = RNA
  misc_feature 87: note = RNA
  misc_feature 88: note = RNA
  misc_feature 89: note = RNA
  misc_feature 90: note = RNA
  misc_feature 91: note = RNA
  misc_feature 92: note = RNA
  misc_feature 93: note = RNA
  misc_feature 94: note = RNA
  misc_feature 95: note = RNA
  misc_feature 96: note = RNA
  misc_feature 97: note = RNA
  misc_feature 98: note = RNA
  misc_feature 99: note = RNA
  misc_feature 100: note = RNA
  misc_feature 9: note = DNA
caggttccntgggatgctctgttttagagctagaaatagcaagttaaaataaggctagtccgttatcaacttgaaaaagtggcaccgagtcggtgctttt

SEQ ID NO: 1943 - DNA, 100 bp, synthetic construct
  source 1..100: mol_type = other DNA
  modified_base 1: mod_base = OTHER; note = 2'-O-methyl ribonucleotide
  modified_base 2: mod_base = OTHER; note = 2'-O-methyl ribonucleotide
  modified_base 3: mod_base = OTHER; note = 2'-O-methyl ribonucleotide
  modified_base 21: mod_base = OTHER; note = 2'-O-methyl ribonucleotide
  modified_base 28: mod_base = OTHER; note = 2'-O-methyl ribonucleotide
  modified_base 29: mod_base = OTHER; note = 2'-O-methyl ribonucleotide
  modified_base 30: mod_base = OTHER; note = 2'-O-methyl ribonucleotide
  modified_base 31: mod_base = OTHER; note = 2'-O-methyl ribonucleotide
  modified_base 32: mod_base = OTHER; note = 2'-O-methyl ribonucleotide
  modified_base 33: mod_base = OTHER; note = 2'-O-methyl ribonucleotide
  modified_base 34: mod_base = OTHER; note = 2'-O-methyl ribonucleotide
  modified_base 35: mod_base = OTHER; note = 2'-O-methyl ribonucleotide
  modified_base 36: mod_base = OTHER; note = 2'-O-methyl ribonucleotide
  modified_base 37: mod_base = OTHER; note = 2'-O-methyl ribonucleotide
  modified_base 38: mod_base = OTHER; note = 2'-O-methyl ribonucleotide
  modified_base 39: mod_base = OTHER; note = 2'-O-methyl ribonucleotide
  modified_base 40: mod_base = OTHER; note = 2'-O-methyl ribonucleotide
  modified_base 41: mod_base = OTHER; note = 2'-O-methyl ribonucleotide
  modified_base 42: mod_base = OTHER; note = 2'-O-methyl ribonucleotide
  modified_base 46: mod_base = OTHER; note = 2'-O-methyl ribonucleotide
  modified_base 48: mod_base = OTHER; note = 2'-O-methyl ribonucleotide
  modified_base 50: mod_base = OTHER; note = 2'-O-methyl ribonucleotide
  modified_base 52: mod_base = OTHER; note = 2'-O-methyl ribonucleotide
  modified_base 53: mod_base = OTHER; note = 2'-O-methyl ribonucleotide
  modified_base 54: mod_base = OTHER; note = 2'-O-methyl ribonucleotide
  modified_base 55: mod_base = OTHER; note = 2'-O-methyl ribonucleotide
  modified_base 56: mod_base = OTHER; note = 2'-O-methyl ribonucleotide
  modified_base 57: mod_base = OTHER; note = 2'-O-methyl ribonucleotide
  modified_base 60: mod_base = OTHER; note = 2'-O-methyl ribonucleotide
  modified_base 61: mod_base = OTHER; note = 2'-O-methyl ribonucleotide
  modified_base 66: mod_base = OTHER; note = 2'-O-methyl ribonucleotide
  modified_base 67: mod_base = OTHER; note = 2'-O-methyl ribonucleotide
  modified_base 70: mod_base = OTHER; note = 2'-O-methyl ribonucleotide
  modified_base 71: mod_base = OTHER; note = 2'-O-methyl ribonucleotide
  modified_base 72: mod_base = OTHER; note = 2'-O-methyl ribonucleotide
  modified_base 73: mod_base = OTHER; note = 2'-O-methyl ribonucleotide
  modified_base 74: mod_base = OTHER; note = 2'-O-methyl ribonucleotide
  modified_base 75: mod_base = OTHER; note = 2'-O-methyl ribonucleotide
  modified_base 76: mod_base = OTHER; note = 2'-O-methyl ribonucleotide
  modified_base 77: mod_base = OTHER; note = 2'-O-methyl ribonucleotide
  modified_base 78: mod_base = OTHER; note = 2'-O-methyl ribonucleotide
  modified_base 79: mod_base = OTHER; note = 2'-O-methyl ribonucleotide
  modified_base 80: mod_base = OTHER; note = 2'-O-methyl ribonucleotide
  modified_base 81: mod_base = OTHER; note = 2'-O-methyl ribonucleotide
  modified_base 83: mod_base = OTHER; note = 2'-O-methyl ribonucleotide
  modified_base 84: mod_base = OTHER; note = 2'-O-methyl ribonucleotide
  modified_base 85: mod_base = OTHER; note = 2'-O-methyl ribonucleotide
  modified_base 86: mod_base = OTHER; note = 2'-O-methyl ribonucleotide
  modified_base 87: mod_base = OTHER; note = 2'-O-methyl ribonucleotide
  modified_base 88: mod_base = OTHER; note = 2'-O-methyl ribonucleotide
  modified_base 89: mod_base = OTHER; note = 2'-O-methyl ribonucleotide
  modified_base 90: mod_base = OTHER; note = 2'-O-methyl ribonucleotide
  modified_base 91: mod_base = OTHER; note = 2'-O-methyl ribonucleotide
  modified_base 92: mod_base = OTHER; note = 2'-O-methyl ribonucleotide
  modified_base 93: mod_base = OTHER; note = 2'-O-methyl ribonucleotide
  modified_base 94: mod_base = OTHER; note = 2'-O-methyl ribonucleotide
  modified_base 95: mod_base = OTHER; note = 2'-O-methyl ribonucleotide
  modified_base 96: mod_base = OTHER; note = 2'-O-methyl ribonucleotide
  modified_base 97: mod_base = OTHER; note = 2'-O-methyl ribonucleotide
  modified_base 98: mod_base = OTHER; note = 2'-O-methyl ribonucleotide
  modified_base 99: mod_base = OTHER; note = 2'-O-methyl ribonucleotide
  modified_base 100: mod_base = OTHER; note = 2'-O-methyl ribonucleotide
  modified_base 14: mod_base = OTHER; note = nebularine
  modified_base 1..4: mod_base = OTHER; note = phosphorothioate linkage
  modified_base 97..100: mod_base = OTHER; note = phosphorothioate linkage
  misc_feature 1: note = RNA
  misc_feature 2: note = RNA
  misc_feature 3: note = RNA
  misc_feature 4: note = RNA
  misc_feature 5: note = RNA
  misc_feature 6: note = RNA
  misc_feature 7: note = RNA
  misc_feature 8: note = RNA
  misc_feature 9: note = RNA
  misc_feature 10: note = RNA
  misc_feature 11: note = RNA
  misc_feature 12: note = RNA
  misc_feature 13: note = RNA
  misc_feature 15: note = RNA
  misc_feature 16: note = RNA
  misc_feature 17: note = RNA
  misc_feature 18: note = RNA
  misc_feature 19: note = RNA
  misc_feature 20: note = RNA
  misc_feature 21: note = RNA
  misc_feature 22: note = RNA
  misc_feature 23: note = RNA
  misc_feature 24: note = RNA
  misc_feature 25: note = RNA
  misc_feature 26: note = RNA
  misc_feature 27: note = RNA
  misc_feature 28: note = RNA
  misc_feature 29: note = RNA
  misc_feature 30: note = RNA
  misc_feature 31: note = RNA
  misc_feature 32: note = RNA
  misc_feature 33: note = RNA
  misc_feature 34: note = RNA
  misc_feature 35: note = RNA
  misc_feature 36: note = RNA
  misc_feature 37: note = RNA
  misc_feature 38: note = RNA
  misc_feature 39: note = RNA
  misc_feature 40: note = RNA
  misc_feature 41: note = RNA
  misc_feature 42: note = RNA
  misc_feature 43: note = RNA
  misc_feature 44: note = RNA
  misc_feature 45: note = RNA
  misc_feature 46: note = RNA
  misc_feature 47: note = RNA
  misc_feature 48: note = RNA
  misc_feature 49: note = RNA
  misc_feature 50: note = RNA
  misc_feature 51: note = RNA
  misc_feature 52: note = RNA
  misc_feature 53: note = RNA
  misc_feature 54: note = RNA
  misc_feature 55: note = RNA
  misc_feature 56: note = RNA
  misc_feature 57: note = RNA
  misc_feature 58: note = RNA
  misc_feature 59: note = RNA
  misc_feature 60: note = RNA
  misc_feature 61: note = RNA
  misc_feature 62: note = RNA
  misc_feature 63: note = RNA
  misc_feature 64: note = RNA
  misc_feature 65: note = RNA
  misc_feature 66: note = RNA
  misc_feature 67: note = RNA
  misc_feature 68: note = RNA
  misc_feature 69: note = RNA
  misc_feature 70: note = RNA
  misc_feature 71: note = RNA
  misc_feature 72: note = RNA
  misc_feature 73: note = RNA
  misc_feature 74: note = RNA
  misc_feature 75: note = RNA
  misc_feature 76: note = RNA
  misc_feature 77: note = RNA
  misc_feature 78: note = RNA
  misc_feature 79: note = RNA
  misc_feature 80: note = RNA
  misc_feature 81: note = RNA
  misc_feature 82: note = RNA
  misc_feature 83: note = RNA
  misc_feature 84: note = RNA
  misc_feature 85: note = RNA
  misc_feature 86: note = RNA
  misc_feature 87: note = RNA
  misc_feature 88: note = RNA
  misc_feature 89: note = RNA
  misc_feature 90: note = RNA
  misc_feature 91: note = RNA
  misc_feature 92: note = RNA
  misc_feature 93: note = RNA
  misc_feature 94: note = RNA
  misc_feature 95: note = RNA
  misc_feature 96: note = RNA
  misc_feature 97: note = RNA
  misc_feature 98: note = RNA
  misc_feature 99: note = RNA
  misc_feature 100: note = RNA
  misc_feature 14: note = DNA
caggttccatgggntgctctgttttagagctagaaatagcaagttaaaataaggctagtccgttatcaacttgaaaaagtggcaccgagtcggtgctttt

SEQ ID NO: 1944 - DNA, 100 bp, synthetic construct
  source 1..100: mol_type = other DNA
  modified_base 1: mod_base = OTHER; note = 2'-O-methyl ribonucleotide
  modified_base 2: mod_base = OTHER; note = 2'-O-methyl ribonucleotide
  modified_base 3: mod_base = OTHER; note = 2'-O-methyl ribonucleotide
  modified_base 21: mod_base = OTHER; note = 2'-O-methyl ribonucleotide
  modified_base 28: mod_base = OTHER; note = 2'-O-methyl ribonucleotide
  modified_base 29: mod_base = OTHER; note = 2'-O-methyl ribonucleotide
  modified_base 30: mod_base = OTHER; note = 2'-O-methyl ribonucleotide
  modified_base 31: mod_base = OTHER; note = 2'-O-methyl ribonucleotide
  modified_base 32: mod_base = OTHER; note = 2'-O-methyl ribonucleotide
  modified_base 33: mod_base = OTHER; note = 2'-O-methyl ribonucleotide
  modified_base 35: mod_base = OTHER; note = 2'-O-methyl ribonucleotide
  modified_base 36: mod_base = OTHER; note = 2'-O-methyl ribonucleotide
  modified_base 37: mod_base = OTHER; note = 2'-O-methyl ribonucleotide
  modified_base 38: mod_base = OTHER; note = 2'-O-methyl ribonucleotide
  modified_base 39: mod_base = OTHER; note = 2'-O-methyl ribonucleotide
  modified_base 40: mod_base = OTHER; note = 2'-O-methyl ribonucleotide
  modified_base 41: mod_base = OTHER; note = 2'-O-methyl ribonucleotide
  modified_base 42: mod_base = OTHER; note = 2'-O-methyl ribonucleotide
  modified_base 46: mod_base = OTHER; note = 2'-O-methyl ribonucleotide
  modified_base 48: mod_base = OTHER; note = 2'-O-methyl ribonucleotide
  modified_base 50: mod_base = OTHER; note = 2'-O-methyl ribonucleotide
  modified_base 52: mod_base = OTHER; note = 2'-O-methyl ribonucleotide
  modified_base 53: mod_base = OTHER; note = 2'-O-methyl ribonucleotide
  modified_base 54: mod_base = OTHER; note = 2'-O-methyl ribonucleotide
  modified_base 55: mod_base = OTHER; note = 2'-O-methyl ribonucleotide
  modified_base 56: mod_base = OTHER; note = 2'-O-methyl ribonucleotide
  modified_base 57: mod_base = OTHER; note = 2'-O-methyl ribonucleotide
  modified_base 60: mod_base = OTHER; note = 2'-O-methyl ribonucleotide
  modified_base 61: mod_base = OTHER; note = 2'-O-methyl ribonucleotide
  modified_base 66: mod_base = OTHER; note = 2'-O-methyl ribonucleotide
  modified_base 67: mod_base = OTHER; note = 2'-O-methyl ribonucleotide
  modified_base 70: mod_base = OTHER; note = 2'-O-methyl ribonucleotide
  modified_base 71: mod_base = OTHER; note = 2'-O-methyl ribonucleotide
  modified_base 72: mod_base = OTHER; note = 2'-O-methyl ribonucleotide
  modified_base 73: mod_base = OTHER; note = 2'-O-methyl ribonucleotide
  modified_base 74: mod_base = OTHER; note = 2'-O-methyl ribonucleotide
  modified_base 75: mod_base = OTHER; note = 2'-O-methyl ribonucleotide
  modified_base 76: mod_base = OTHER; note = 2'-O-methyl ribonucleotide
  modified_base 77: mod_base = OTHER; note = 2'-O-methyl ribonucleotide
  modified_base 78: mod_base = OTHER; note = 2'-O-methyl ribonucleotide
  modified_base 79: mod_base = OTHER; note = 2'-O-methyl ribonucleotide
  modified_base 80: mod_base = OTHER; note = 2'-O-methyl ribonucleotide
  modified_base 81: mod_base = OTHER; note = 2'-O-methyl ribonucleotide
  modified_base 83: mod_base = OTHER; note = 2'-O-methyl ribonucleotide
  modified_base 84: mod_base = OTHER; note = 2'-O-methyl ribonucleotide
  modified_base 85: mod_base = OTHER; note = 2'-O-methyl ribonucleotide
  modified_base 86: mod_base = OTHER; note = 2'-O-methyl ribonucleotide
  modified_base 87: mod_base = OTHER; note = 2'-O-methyl ribonucleotide
  modified_base 88: mod_base = OTHER; note = 2'-O-methyl ribonucleotide
  modified_base 89: mod_base = OTHER; note = 2'-O-methyl ribonucleotide
  modified_base 90: mod_base = OTHER; note = 2'-O-methyl ribonucleotide
  modified_base 91: mod_base = OTHER; note = 2'-O-methyl ribonucleotide
  modified_base 92: mod_base = OTHER; note = 2'-O-methyl ribonucleotide
  modified_base 93: mod_base = OTHER; note = 2'-O-methyl ribonucleotide
  modified_base 94: mod_base = OTHER; note = 2'-O-methyl ribonucleotide
  modified_base 95: mod_base = OTHER; note = 2'-O-methyl ribonucleotide
  modified_base 96: mod_base = OTHER; note = 2'-O-methyl ribonucleotide
  modified_base 97: mod_base = OTHER; note = 2'-O-methyl ribonucleotide
  modified_base 98: mod_base = OTHER; note = 2'-O-methyl ribonucleotide
  modified_base 99: mod_base = OTHER; note = 2'-O-methyl ribonucleotide
  modified_base 100: mod_base = OTHER; note = 2'-O-methyl ribonucleotide
  modified_base 34: mod_base = OTHER; note = nebularine
  modified_base 1..4: mod_base = OTHER; note = phosphorothioate linkage
  modified_base 97..100: mod_base = OTHER; note = phosphorothioate linkage
  misc_feature 1: note = RNA
  misc_feature 2: note = RNA
  misc_feature 3: note = RNA
  misc_feature 4: note = RNA
  misc_feature 5: note = RNA
  misc_feature 6: note = RNA
  misc_feature 7: note = RNA
  misc_feature 8: note = RNA
  misc_feature 9: note = RNA
  misc_feature 10: note = RNA
  misc_feature 11: note = RNA
  misc_feature 12: note = RNA
  misc_feature 13: note = RNA
  misc_feature 14: note = RNA
  misc_feature 15: note = RNA
  misc_feature 16: note = RNA
  misc_feature 17: note = RNA
  misc_feature 18: note = RNA
  misc_feature 19: note = RNA
  misc_feature 20: note = RNA
  misc_feature 21: note = RNA
  misc_feature 22: note = RNA
  misc_feature 23: note = RNA
  misc_feature 24: note = RNA
  misc_feature 25: note = RNA
  misc_feature 26: note = RNA
  misc_feature 27: note = RNA
  misc_feature 28: note = RNA
  misc_feature 29: note = RNA
  misc_feature 30: note = RNA
  misc_feature 31: note = RNA
  misc_feature 32: note = RNA
  misc_feature 33: note = RNA
  misc_feature 35: note = RNA
  misc_feature 36: note = RNA
  misc_feature 37: note = RNA
  misc_feature 38: note = RNA
  misc_feature 39: note = RNA
  misc_feature 40: note = RNA
  misc_feature 41: note = RNA
  misc_feature 42: note = RNA
  misc_feature 43: note = RNA
  misc_feature 44: note = RNA
  misc_feature 45: note = RNA
  misc_feature 46: note = RNA
  misc_feature 47: note = RNA
  misc_feature 48: note = RNA
  misc_feature 49: note = RNA
  misc_feature 50: note = RNA
  misc_feature 51: note = RNA
  misc_feature 52: note = RNA
  misc_feature 53: note = RNA
  misc_feature 54: note = RNA
  misc_feature 55: note = RNA
  misc_feature 56: note = RNA
  misc_feature 57: note = RNA
  misc_feature 58: note = RNA
  misc_feature 59: note = RNA
  misc_feature 60: note = RNA
  misc_feature 61: note = RNA
  misc_feature 62: note = RNA
  misc_feature 63: note = RNA
  misc_feature 64: note = RNA
  misc_feature 65: note = RNA
  misc_feature 66: note = RNA
  misc_feature 67: note = RNA
  misc_feature 68: note = RNA
  misc_feature 69: note = RNA
  misc_feature 70: note = RNA
  misc_feature 71: note = RNA
  misc_feature 72: note = RNA
  misc_feature 73: note = RNA
  misc_feature 74: note = RNA
  misc_feature 75: note = RNA
  misc_feature 76: note = RNA
  misc_feature 77: note = RNA
  misc_feature 78: note = RNA
  misc_feature 79: note = RNA
  misc_feature 80: note = RNA
  misc_feature 81: note = RNA
  misc_feature 82: note = RNA
  misc_feature 83: note = RNA
  misc_feature 84: note = RNA
  misc_feature 85: note = RNA
  misc_feature 86: note = RNA
  misc_feature 87: note = RNA
  misc_feature 88: note = RNA
  misc_feature 89: note = RNA
  misc_feature 90: note = RNA
  misc_feature 91: note = RNA
  misc_feature 92: note = RNA
  misc_feature 93: note = RNA
  misc_feature 94: note = RNA
  misc_feature 95: note = RNA
  misc_feature 96: note = RNA
  misc_feature 97: note = RNA
  misc_feature 98: note = RNA
  misc_feature 99: note = RNA
  misc_feature 100: note = RNA
  misc_feature 34: note = DNA
caggttccatgggatgctctgttttagagctagnaatagcaagttaaaataaggctagtccgttatcaacttgaaaaagtggcaccgagtcggtgctttt

SEQ ID NO: 1945 - DNA, 100 bp, synthetic construct
  source 1..100: mol_type = other DNA
  modified_base 1: mod_base = OTHER; note = 2'-O-methyl ribonucleotide
  modified_base 2: mod_base = OTHER; note = 2'-O-methyl ribonucleotide
  modified_base 3: mod_base = OTHER; note = 2'-O-methyl ribonucleotide
  modified_base 21: mod_base = OTHER; note = 2'-O-methyl ribonucleotide
  modified_base 28: mod_base = OTHER; note = 2'-O-methyl ribonucleotide
  modified_base 29: mod_base = OTHER; note = 2'-O-methyl ribonucleotide
  modified_base 30: mod_base = OTHER; note = 2'-O-methyl ribonucleotide
  modified_base 31: mod_base = OTHER; note = 2'-O-methyl ribonucleotide
  modified_base 32: mod_base = OTHER; note = 2'-O-methyl ribonucleotide
  modified_base 33: mod_base = OTHER; note = 2'-O-methyl ribonucleotide
  modified_base 35: mod_base = OTHER; note = 2'-O-methyl ribonucleotide
  modified_base 36: mod_base = OTHER; note = 2'-O-methyl ribonucleotide
  modified_base 37: mod_base = OTHER; note = 2'-O-methyl ribonucleotide
  modified_base 38: mod_base = OTHER; note = 2'-O-methyl ribonucleotide
  modified_base 39: mod_base = OTHER; note = 2'-O-methyl ribonucleotide
  modified_base 40: mod_base = OTHER; note = 2'-O-methyl ribonucleotide
  modified_base 41: mod_base = OTHER; note = 2'-O-methyl ribonucleotide
  modified_base 42: mod_base = OTHER; note = 2'-O-methyl ribonucleotide
  modified_base 46: mod_base = OTHER; note = 2'-O-methyl ribonucleotide
  modified_base 48: mod_base = OTHER; note = 2'-O-methyl ribonucleotide
  modified_base 50: mod_base = OTHER; note = 2'-O-methyl ribonucleotide
  modified_base 52: mod_base = OTHER; note = 2'-O-methyl ribonucleotide
  modified_base 53: mod_base = OTHER; note = 2'-O-methyl ribonucleotide
  modified_base 54: mod_base = OTHER; note = 2'-O-methyl ribonucleotide
  modified_base 55: mod_base = OTHER; note = 2'-O-methyl ribonucleotide
  modified_base 56: mod_base = OTHER; note = 2'-O-methyl ribonucleotide
  modified_base 60: mod_base = OTHER; note = 2'-O-methyl ribonucleotide
  modified_base 61: mod_base = OTHER; note = 2'-O-methyl ribonucleotide
  modified_base 66: mod_base = OTHER; note = 2'-O-methyl ribonucleotide
  modified_base 67: mod_base = OTHER; note = 2'-O-methyl ribonucleotide
  modified_base 70: mod_base = OTHER; note = 2'-O-methyl ribonucleotide
  modified_base 71: mod_base = OTHER; note = 2'-O-methyl ribonucleotide
  modified_base 72: mod_base = OTHER; note = 2'-O-methyl ribonucleotide
  modified_base 73: mod_base = OTHER; note = 2'-O-methyl ribonucleotide
  modified_base 74: mod_base = OTHER; note = 2'-O-methyl ribonucleotide
  modified_base 75: mod_base = OTHER; note = 2'-O-methyl ribonucleotide
  modified_base 76: mod_base = OTHER; note = 2'-O-methyl ribonucleotide
  modified_base 77: mod_base = OTHER; note = 2'-O-methyl ribonucleotide
  modified_base 78: mod_base = OTHER; note = 2'-O-methyl ribonucleotide
  modified_base 79: mod_base = OTHER; note = 2'-O-methyl ribonucleotide
  modified_base 80: mod_base = OTHER; note = 2'-O-methyl ribonucleotide
  modified_base 81: mod_base = OTHER; note = 2'-O-methyl ribonucleotide
  modified_base 83: mod_base = OTHER; note = 2'-O-methyl ribonucleotide
  modified_base 84: mod_base = OTHER; note = 2'-O-methyl ribonucleotide
  modified_base 85: mod_base = OTHER; note = 2'-O-methyl ribonucleotide
  modified_base 86: mod_base = OTHER; note = 2'-O-methyl ribonucleotide
  modified_base 87: mod_base = OTHER; note = 2'-O-methyl ribonucleotide
  modified_base 88: mod_base = OTHER; note = 2'-O-methyl ribonucleotide
  modified_base 89: mod_base = OTHER; note = 2'-O-methyl ribonucleotide
  modified_base 90: mod_base = OTHER; note = 2'-O-methyl ribonucleotide
  modified_base 91: mod_base = OTHER; note = 2'-O-methyl ribonucleotide
  modified_base 92: mod_base = OTHER; note = 2'-O-methyl ribonucleotide
  modified_base 93: mod_base = OTHER; note = 2'-O-methyl ribonucleotide
  modified_base 94: mod_base = OTHER; note = 2'-O-methyl ribonucleotide
  modified_base 95: mod_base = OTHER; note = 2'-O-methyl ribonucleotide
  modified_base 96: mod_base = OTHER; note = 2'-O-methyl ribonucleotide
  modified_base 97: mod_base = OTHER; note = 2'-O-methyl ribonucleotide
  modified_base 98: mod_base = OTHER; note = 2'-O-methyl ribonucleotide
  modified_base 99: mod_base = OTHER; note = 2'-O-methyl ribonucleotide
  modified_base 100: mod_base = OTHER; note = 2'-O-methyl ribonucleotide
  modified_base 34: mod_base = OTHER; note = nebularine
  modified_base 57: mod_base = OTHER; note = nebularine
  modified_base 1..4: mod_base = OTHER; note = phosphorothioate linkage
  modified_base 97..100: mod_base = OTHER; note = phosphorothioate linkage
  misc_feature 1: note = RNA
  misc_feature 2: note = RNA
  misc_feature 3: note = RNA
  misc_feature 4: note = RNA
  misc_feature 5: note = RNA
  misc_feature 6: note = RNA
  misc_feature 7: note = RNA
  misc_feature 8: note = RNA
  misc_feature 9: note = RNA
  misc_feature 10: note = RNA
  misc_feature 11: note = RNA
  misc_feature 12: note = RNA
  misc_feature 13: note = RNA
  misc_feature 14: note = RNA
  misc_feature 15: note = RNA
  misc_feature 16: note = RNA
  misc_feature 17: note = RNA
  misc_feature 18: note = RNA
  misc_feature 19: note = RNA
  misc_feature 20: note = RNA
  misc_feature 21: note = RNA
  misc_feature 22: note = RNA
  misc_feature 23: note = RNA
  misc_feature 24: note = RNA
  misc_feature 25: note = RNA
  misc_feature 26: note = RNA
  misc_feature 27: note = RNA
  misc_feature 28: note = RNA
  misc_feature 29: note = RNA
  misc_feature 30: note = RNA
  misc_feature 31: note = RNA
  misc_feature 32: note = RNA
  misc_feature 33: note = RNA
  misc_feature 35: note = RNA
  misc_feature 36: note = RNA
  misc_feature 37: note = RNA
  misc_feature 38: note = RNA
  misc_feature 39: note = RNA
  misc_feature 40: note = RNA
  misc_feature 41: note = RNA
  misc_feature 42: note = RNA
  misc_feature 43: note = RNA
  misc_feature 44: note = RNA
  misc_feature 45: note = RNA
  misc_feature 46: note = RNA
  misc_feature 47: note = RNA
  misc_feature 48: note = RNA
  misc_feature 49: note = RNA
  misc_feature 50: note = RNA
  misc_feature 51: note = RNA
  misc_feature 52: note = RNA
  misc_feature 53: note = RNA
  misc_feature 54: note = RNA
  misc_feature 55: note = RNA
  misc_feature 56: note = RNA
  misc_feature 58: note = RNA
  misc_feature 59: note = RNA
  misc_feature 60: note = RNA
  misc_feature 61: note = RNA
  misc_feature 62: note = RNA
  misc_feature 63: note = RNA
  misc_feature 64: note = RNA
  misc_feature 65: note = RNA
  misc_feature 66: note = RNA
  misc_feature 67: note = RNA
  misc_feature 68: note = RNA
  misc_feature 69: note = RNA
  misc_feature 70: note = RNA
  misc_feature 71: note = RNA
  misc_feature 72: note = RNA
  misc_feature 73: note = RNA
  misc_feature 74: note = RNA
  misc_feature 75: note = RNA
  misc_feature 76: note = RNA
  misc_feature 77: note = RNA
  misc_feature 78: note = RNA
  misc_feature 79: note = RNA
  misc_feature 80: note = RNA
  misc_feature 81: note = RNA
  misc_feature 82: note = RNA
  misc_feature 83: note = RNA
  misc_feature 84: note = RNA
  misc_feature 85: note = RNA
  misc_feature 86: note = RNA
  misc_feature 87: note = RNA
  misc_feature 88: note = RNA
  misc_feature 89: note = RNA
  misc_feature 90: note = RNA
  misc_feature 91: note = RNA
  misc_feature 92: note = RNA
  misc_feature 93: note = RNA
  misc_feature 94: note = RNA
  misc_feature 95: note = RNA
  misc_feature 96: note = RNA
  misc_feature 97: note = RNA
  misc_feature 98: note = RNA
  misc_feature 99: note = RNA
  misc_feature 100: note = RNA
  misc_feature 34: note = DNA
  misc_feature 57: note = DNA
caggttccatgggatgctctgttttagagctagnaatagcaagttaaaataaggctngtccgttatcaacttgaaaaagtggcaccgagtcggtgctttt

SEQ ID NO: 1946 - DNA, 100 bp, synthetic construct
  source 1..100: mol_type = other DNA
  modified_base 1: mod_base = OTHER; note = 2'-O-methyl ribonucleotide
  modified_base 2: mod_base = OTHER; note = 2'-O-methyl ribonucleotide
  modified_base 3: mod_base = OTHER; note = 2'-O-methyl ribonucleotide
  modified_base 21: mod_base = OTHER; note = 2'-O-methyl ribonucleotide
  modified_base 28: mod_base = OTHER; note = 2'-O-methyl ribonucleotide
  modified_base 29: mod_base = OTHER; note = 2'-O-methyl ribonucleotide
  modified_base 30: mod_base = OTHER; note = 2'-O-methyl ribonucleotide
  modified_base 31: mod_base = OTHER; note = 2'-O-methyl ribonucleotide
  modified_base 32: mod_base = OTHER; note = 2'-O-methyl ribonucleotide
  modified_base 33: mod_base = OTHER; note = 2'-O-methyl ribonucleotide
  modified_base 34: mod_base = OTHER; note = 2'-O-methyl ribonucleotide
  modified_base 35: mod_base = OTHER; note = 2'-O-methyl ribonucleotide
  modified_base 36: mod_base = OTHER; note = 2'-O-methyl ribonucleotide
  modified_base 37: mod_base = OTHER; note = 2'-O-methyl ribonucleotide
  modified_base 38: mod_base = OTHER; note = 2'-O-methyl ribonucleotide
  modified_base 39: mod_base = OTHER; note = 2'-O-methyl ribonucleotide
  modified_base 40: mod_base = OTHER; note = 2'-O-methyl ribonucleotide
  modified_base 41: mod_base = OTHER; note = 2'-O-methyl ribonucleotide
  modified_base 42: mod_base = OTHER; note = 2'-O-methyl ribonucleotide
  modified_base 46: mod_base = OTHER; note = 2'-O-methyl ribonucleotide
  modified_base 48: mod_base = OTHER; note = 2'-O-methyl ribonucleotide
  modified_base 50: mod_base = OTHER; note = 2'-O-methyl ribonucleotide
  modified_base 52: mod_base = OTHER; note = 2'-O-methyl ribonucleotide
  modified_base 53: mod_base = OTHER; note = 2'-O-methyl ribonucleotide
  modified_base 54: mod_base = OTHER; note = 2'-O-methyl ribonucleotide
  modified_base 55: mod_base = OTHER; note = 2'-O-methyl ribonucleotide
  modified_base 56: mod_base = OTHER; note = 2'-O-methyl ribonucleotide
  modified_base 60: mod_base = OTHER; note = 2'-O-methyl ribonucleotide
  modified_base 61: mod_base = OTHER; note = 2'-O-methyl ribonucleotide
  modified_base 66: mod_base = OTHER; note = 2'-O-methyl ribonucleotide
  modified_base 67: mod_base = OTHER; note = 2'-O-methyl ribonucleotide
  modified_base 70: mod_base = OTHER; note = 2'-O-methyl ribonucleotide
  modified_base 71: mod_base = OTHER; note = 2'-O-methyl ribonucleotide
  modified_base 72: mod_base = OTHER; note = 2'-O-methyl ribonucleotide
  modified_base 73: mod_base = OTHER; note = 2'-O-methyl ribonucleotide
  modified_base 74: mod_base = OTHER; note = 2'-O-methyl ribonucleotide
  modified_base 75: mod_base = OTHER; note = 2'-O-methyl ribonucleotide
  modified_base 76: mod_base = OTHER; note = 2'-O-methyl ribonucleotide
  modified_base 77: mod_base = OTHER; note = 2'-O-methyl ribonucleotide
  modified_base 78: mod_base = OTHER; note = 2'-O-methyl ribonucleotide
  modified_base 79: mod_base = OTHER; note = 2'-O-methyl ribonucleotide
  modified_base 80: mod_base = OTHER; note = 2'-O-methyl ribonucleotide
  modified_base 81: mod_base = OTHER; note = 2'-O-methyl ribonucleotide
  modified_base 83: mod_base = OTHER; note = 2'-O-methyl ribonucleotide
  modified_base 84: mod_base = OTHER; note = 2'-O-methyl ribonucleotide
  modified_base 85: mod_base = OTHER; note = 2'-O-methyl ribonucleotide
  modified_base 86: mod_base = OTHER; note = 2'-O-methyl ribonucleotide
  modified_base 87: mod_base = OTHER; note = 2'-O-methyl ribonucleotide
  modified_base 88: mod_base = OTHER; note = 2'-O-methyl ribonucleotide
  modified_base 89: mod_base = OTHER; note = 2'-O-methyl ribonucleotide
  modified_base 90: mod_base = OTHER; note = 2'-O-methyl ribonucleotide
  modified_base 91: mod_base = OTHER; note = 2'-O-methyl ribonucleotide
  modified_base 92: mod_base = OTHER; note = 2'-O-methyl ribonucleotide
  modified_base 93: mod_base = OTHER; note = 2'-O-methyl ribonucleotide
  modified_base 94: mod_base = OTHER; note = 2'-O-methyl ribonucleotide
  modified_base 95: mod_base = OTHER; note = 2'-O-methyl ribonucleotide
  modified_base 96: mod_base = OTHER; note = 2'-O-methyl ribonucleotide
  modified_base 97: mod_base = OTHER; note = 2'-O-methyl ribonucleotide
  modified_base 98: mod_base = OTHER; note = 2'-O-methyl ribonucleotide
  modified_base 99: mod_base = OTHER; note = 2'-O-methyl ribonucleotide
  modified_base 100: mod_base = OTHER; note = 2'-O-methyl ribonucleotide
  modified_base 57: mod_base = OTHER; note = nebularine
  modified_base 1..4: mod_base = OTHER; note = phosphorothioate linkage
  modified_base 97..100: mod_base = OTHER; note = phosphorothioate linkage
  misc_feature 1: note = RNA
  misc_feature 2: note = RNA
  misc_feature 3: note = RNA
  misc_feature 4: note = RNA
  misc_feature 5: note = RNA
  misc_feature 6: note = RNA
  misc_feature 7: note = RNA
  misc_feature 8: note = RNA
  misc_feature 9: note = RNA
  misc_feature 10: note = RNA
  misc_feature 11: note = RNA
  misc_feature 12: note = RNA
  misc_feature 13: note = RNA
  misc_feature 14: note = RNA
  misc_feature 15: note = RNA
  misc_feature 16: note = RNA
  misc_feature 17: note = RNA
  misc_feature 18: note = RNA
  misc_feature 19: note = RNA
  misc_feature 20: note = RNA
  misc_feature 21: note = RNA
  misc_feature 22: note = RNA
  misc_feature 23: note = RNA
  misc_feature 24: note = RNA
  misc_feature 25: note = RNA
  misc_feature 26: note = RNA
  misc_feature 27: note = RNA
  misc_feature 28: note = RNA
  misc_feature 29: note = RNA
  misc_feature 30: note = RNA
  misc_feature 31: note = RNA
  misc_feature 32: note = RNA
  misc_feature 33: note = RNA
  misc_feature 34: note = RNA
  misc_feature 35: note = RNA
  misc_feature 36: note = RNA
  misc_feature 37: note = RNA
  misc_feature 38: note = RNA
  misc_feature 39: note = RNA
  misc_feature 40: note = RNA
  misc_feature 41: note = RNA
  misc_feature 42: note = RNA
  misc_feature 43: note = RNA
  misc_feature 44: note = RNA
  misc_feature 45: note = RNA
  misc_feature 46: note = RNA
  misc_feature 47: note = RNA
  misc_feature 48: note = RNA
  misc_feature 49: note = RNA
  misc_feature 50: note = RNA
  misc_feature 51: note = RNA
  misc_feature 52: note = RNA
  misc_feature 53: note = RNA
  misc_feature 54: note = RNA
  misc_feature 55: note = RNA
  misc_feature 56: note = RNA
  misc_feature 58: note = RNA
  misc_feature 59: note = RNA
  misc_feature 60: note = RNA
  misc_feature 61: note = RNA
  misc_feature 62: note = RNA
  misc_feature 63: note = RNA
  misc_feature 64: note = RNA
  misc_feature 65: note = RNA
  misc_feature 66: note = RNA
  misc_feature 67: note = RNA
  misc_feature 68: note = RNA
  misc_feature 69: note = RNA
  misc_feature 70: note = RNA
  misc_feature 71: note = RNA
  misc_feature 72: note = RNA
  misc_feature 73: note = RNA
  misc_feature 74: note = RNA
  misc_feature 75: note = RNA
  misc_feature 76: note = RNA
  misc_feature 77: note = RNA
  misc_feature 78: note = RNA
  misc_feature 79: note = RNA
  misc_feature 80: note = RNA
  misc_feature 81: note = RNA
  misc_feature 82: note = RNA
  misc_feature 83: note = RNA
  misc_feature 84: note = RNA
  misc_feature 85: note = RNA
  misc_feature 86: note = RNA
  misc_feature 87: note = RNA
  misc_feature 88: note = RNA
  misc_feature 89: note = RNA
  misc_feature 90: note = RNA
  misc_feature 91: note = RNA
  misc_feature 92: note = RNA
  misc_feature 93: note = RNA
  misc_feature 94: note = RNA
  misc_feature 95: note = RNA
  misc_feature 96: note = RNA
  misc_feature 97: note = RNA
  misc_feature 98: note = RNA
  misc_feature 99: note = RNA
  misc_feature 100: note = RNA
  misc_feature 57: note = DNA
caggttccatgggatgctctgttttagagctagaaatagcaagttaaaataaggctngtccgttatcaacttgaaaaagtggcaccgagtcggtgctttt

SEQ ID NO: 1947 - DNA, 100 bp, synthetic construct
  source 1..100: mol_type = other DNA
  modified_base 1: mod_base = OTHER; note = 2'-O-methyl ribonucleotide
  modified_base 2: mod_base = OTHER; note = 2'-O-methyl ribonucleotide
  modified_base 3: mod_base = OTHER; note = 2'-O-methyl ribonucleotide
  modified_base 21: mod_base = OTHER; note = 2'-O-methyl ribonucleotide
  modified_base 28: mod_base = OTHER; note = 2'-O-methyl ribonucleotide
  modified_base 29: mod_base = OTHER; note = 2'-O-methyl ribonucleotide
  modified_base 30: mod_base = OTHER; note = 2'-O-methyl ribonucleotide
  modified_base 31: mod_base = OTHER; note = 2'-O-methyl ribonucleotide
  modified_base 32: mod_base = OTHER; note = 2'-O-methyl ribonucleotide
  modified_base 33: mod_base = OTHER; note = 2'-O-methyl ribonucleotide
  modified_base 34: mod_base = OTHER; note = 2'-O-methyl ribonucleotide
  modified_base 35: mod_base = OTHER; note = 2'-O-methyl ribonucleotide
  modified_base 36: mod_base = OTHER; note = 2'-O-methyl ribonucleotide
  modified_base 37: mod_base = OTHER; note = 2'-O-methyl ribonucleotide
  modified_base 38: mod_base = OTHER; note = 2'-O-methyl ribonucleotide
  modified_base 39: mod_base = OTHER; note = 2'-O-methyl ribonucleotide
  modified_base 40: mod_base = OTHER; note = 2'-O-methyl ribonucleotide
  modified_base 41: mod_base = OTHER; note = 2'-O-methyl ribonucleotide
  modified_base 42: mod_base = OTHER; note = 2'-O-methyl ribonucleotide
  modified_base 46: mod_base = OTHER; note = 2'-O-methyl ribonucleotide
  modified_base 48: mod_base = OTHER; note = 2'-O-methyl ribonucleotide
  modified_base 50: mod_base = OTHER; note = 2'-O-methyl ribonucleotide
  modified_base 52: mod_base = OTHER; note = 2'-O-methyl ribonucleotide
  modified_base 53: mod_base = OTHER; note = 2'-O-methyl ribonucleotide
  modified_base 54: mod_base = OTHER; note = 2'-O-methyl ribonucleotide
  modified_base 55: mod_base = OTHER; note = 2'-O-methyl ribonucleotide
  modified_base 56: mod_base = OTHER; note = 2'-O-methyl ribonucleotide
  modified_base 57: mod_base = OTHER; note = 2'-O-methyl ribonucleotide
  modified_base 60: mod_base = OTHER; note = 2'-O-methyl ribonucleotide
  modified_base 61: mod_base = OTHER; note = 2'-O-methyl ribonucleotide
  modified_base 66: mod_base = OTHER; note = 2'-O-methyl ribonucleotide
  modified_base 67: mod_base = OTHER; note = 2'-O-methyl ribonucleotide
  modified_base 70: mod_base = OTHER; note = 2'-O-methyl ribonucleotide
  modified_base 71: mod_base = OTHER; note = 2'-O-methyl ribonucleotide
  modified_base 72: mod_base = OTHER; note = 2'-O-methyl ribonucleotide
  modified_base 73: mod_base = OTHER; note = 2'-O-methyl ribonucleotide
  modified_base 74: mod_base = OTHER; note = 2'-O-methyl ribonucleotide
  modified_base 75: mod_base = OTHER; note = 2'-O-methyl ribonucleotide
  modified_base 76: mod_base = OTHER; note = 2'-O-methyl ribonucleotide
  modified_base 77: mod_base = OTHER; note = 2'-O-methyl ribonucleotide
  modified_base 78: mod_base = OTHER; note = 2'-O-methyl ribonucleotide
  modified_base 79: mod_base = OTHER; note = 2'-O-methyl ribonucleotide
  modified_base 80: mod_base = OTHER; note = 2'-O-methyl ribonucleotide
  modified_base 81: mod_base = OTHER; note = 2'-O-methyl ribonucleotide
  modified_base 83: mod_base = OTHER; note = 2'-O-methyl ribonucleotide
  modified_base 84: mod_base = OTHER; note = 2'-O-methyl ribonucleotide
  modified_base 85: mod_base = OTHER; note = 2'-O-methyl ribonucleotide
  modified_base 86: mod_base = OTHER; note = 2'-O-methyl ribonucleotide
  modified_base 87: mod_base = OTHER; note = 2'-O-methyl ribonucleotide
  modified_base 88: mod_base = OTHER; note = 2'-O-methyl ribonucleotide
  modified_base 89: mod_base = OTHER; note = 2'-O-methyl ribonucleotide
  modified_base 90: mod_base = OTHER; note = 2'-O-methyl ribonucleotide
  modified_base 91: mod_base = OTHER; note = 2'-O-methyl ribonucleotide
  modified_base 92: mod_base = OTHER; note = 2'-O-methyl ribonucleotide
  modified_base 93: mod_base = OTHER; note = 2'-O-methyl ribonucleotide
  modified_base 94: mod_base = OTHER; note = 2'-O-methyl ribonucleotide
  modified_base 95: mod_base = OTHER; note = 2'-O-methyl ribonucleotide
  modified_base 96: mod_base = OTHER; note = 2'-O-methyl ribonucleotide
  modified_base 97: mod_base = OTHER; note = 2'-O-methyl ribonucleotide
  modified_base 98: mod_base = OTHER; note = 2'-O-methyl ribonucleotide
  modified_base 99: mod_base = OTHER; note = 2'-O-methyl ribonucleotide
  modified_base 100: mod_base = OTHER; note = 2'-O-methyl ribonucleotide
  modified_base 65: mod_base = OTHER; note = nebularine
  modified_base 1..4: mod_base = OTHER; note = phosphorothioate linkage
  modified_base 97..100: mod_base = OTHER; note = phosphorothioate linkage
  misc_feature 1: note = RNA
  misc_feature 2: note = RNA
  misc_feature 3: note = RNA
  misc_feature 4: note = RNA
  misc_feature 5: note = RNA
  misc_feature 6: note = RNA
  misc_feature 7: note = RNA
  misc_feature 8: note = RNA
  misc_feature 9: note = RNA
  misc_feature 10: note = RNA
  misc_feature 11: note = RNA
  misc_feature 12: note = RNA
  misc_feature 13: note = RNA
  misc_feature 14: note = RNA
  misc_feature 15: note = RNA
  misc_feature 16: note = RNA
  misc_feature 17: note = RNA
  misc_feature 18: note = RNA
  misc_feature 19: note = RNA
  misc_feature 20: note = RNA
  misc_feature 21: note = RNA
  misc_feature 22: note = RNA
  misc_feature 23: note = RNA
  misc_feature 24: note = RNA
  misc_feature 25: note = RNA
  misc_feature 26: note = RNA
  misc_feature 27: note = RNA
  misc_feature 28: note = RNA
  misc_feature 29: note = RNA
  misc_feature 30: note = RNA
  misc_feature 31: note = RNA
  misc_feature 32: note = RNA
  misc_feature 33: note = RNA
  misc_feature 34: note = RNA
  misc_feature 35: note = RNA
  misc_feature 36: note = RNA
  misc_feature 37: note = RNA
  misc_feature 38: note = RNA
  misc_feature 39: note = RNA
  misc_feature 40: note = RNA
  misc_feature 41: note = RNA
  misc_feature 42: note = RNA
  misc_feature 43: note = RNA
  misc_feature 44: note = RNA
  misc_feature 45: note = RNA
  misc_feature 46: note = RNA
  misc_feature 47: note = RNA
  misc_feature 48: note = RNA
  misc_feature 49: note = RNA
  misc_feature 50: note = RNA
  misc_feature 51: note = RNA
  misc_feature 52: note = RNA
  misc_feature 53: note = RNA
  misc_feature 54: note = RNA
  misc_feature 55: note = RNA
  misc_feature 56: note = RNA
  misc_feature 57: note = RNA
  misc_feature 58: note = RNA
  misc_feature 59: note = RNA
  misc_feature 60: note = RNA
  misc_feature 61: note = RNA
  misc_feature 62: note = RNA
  misc_feature 63: note = RNA
  misc_feature 64: note = RNA
  misc_feature 66: note = RNA
  misc_feature 67: note = RNA
  misc_feature 68: note = RNA
  misc_feature 69: note = RNA
  misc_feature 70: note = RNA
  misc_feature 71: note = RNA
  misc_feature 72: note = RNA
  misc_feature 73: note = RNA
  misc_feature 74: note = RNA
  misc_feature 75: note = RNA
  misc_feature 76: note = RNA
  misc_feature 77: note = RNA
  misc_feature 78: note = RNA
  misc_feature 79: note = RNA
  misc_feature 80: note = RNA
  misc_feature 81: note = RNA
  misc_feature 82: note = RNA
  misc_feature 83: note = RNA
  misc_feature 84: note = RNA
  misc_feature 85: note = RNA
  misc_feature 86: note = RNA
  misc_feature 87: note = RNA
  misc_feature 88: note = RNA
  misc_feature 89: note = RNA
  misc_feature 90: note = RNA
  misc_feature 91: note = RNA
  misc_feature 92: note = RNA
  misc_feature 93: note = RNA
  misc_feature 94: note = RNA
  misc_feature 95: note = RNA
  misc_feature 96: note = RNA
  misc_feature 97: note = RNA
  misc_feature 98: note = RNA
  misc_feature 99: note = RNA
  misc_feature 100: note = RNA
  misc_feature 65: note = DNA
caggttccatgggatgctctgttttagagctagaaatagcaagttaaaataaggctagtccgttntcaacttgaaaaagtggcaccgagtcggtgctttt

SEQ ID NO: 1948 - DNA, 100 bp, synthetic construct
  source 1..100: mol_type = other DNA
  modified_base 1: mod_base = OTHER; note = 2'-O-methyl ribonucleotide
  modified_base 2: mod_base = OTHER; note = 2'-O-methyl ribonucleotide
  modified_base 3: mod_base = OTHER; note = 2'-O-methyl ribonucleotide
  modified_base 21: mod_base = OTHER; note = 2'-O-methyl ribonucleotide
  modified_base 28: mod_base = OTHER; note = 2'-O-methyl ribonucleotide
  modified_base 29: mod_base = OTHER; note = 2'-O-methyl ribonucleotide
  modified_base 30: mod_base = OTHER; note = 2'-O-methyl ribonucleotide
  modified_base 31: mod_base = OTHER; note = 2'-O-methyl ribonucleotide
  modified_base 32: mod_base = OTHER; note = 2'-O-methyl ribonucleotide
  modified_base 33: mod_base = OTHER; note = 2'-O-methyl ribonucleotide
  modified_base 35: mod_base = OTHER; note = 2'-O-methyl ribonucleotide
  modified_base 36: mod_base = OTHER; note = 2'-O-methyl ribonucleotide
  modified_base 37: mod_base = OTHER; note = 2'-O-methyl ribonucleotide
  modified_base 38: mod_base = OTHER; note = 2'-O-methyl ribonucleotide
  modified_base 39: mod_base = OTHER; note = 2'-O-methyl ribonucleotide
  modified_base 40: mod_base = OTHER; note = 2'-O-methyl ribonucleotide
  modified_base 41: mod_base = OTHER; note = 2'-O-methyl ribonucleotide
  modified_base 42: mod_base = OTHER; note = 2'-O-methyl ribonucleotide
  modified_base 46: mod_base = OTHER; note = 2'-O-methyl ribonucleotide
  modified_base 48: mod_base = OTHER; note = 2'-O-methyl ribonucleotide
  modified_base 50: mod_base = OTHER; note = 2'-O-methyl ribonucleotide
  modified_base 52: mod_base = OTHER; note = 2'-O-methyl ribonucleotide
  modified_base 53: mod_base = OTHER; note = 2'-O-methyl ribonucleotide
  modified_base 54: mod_base = OTHER; note = 2'-O-methyl ribonucleotide
  modified_base 55: mod_base = OTHER; note = 2'-O-methyl ribonucleotide
  modified_base 56: mod_base = OTHER; note = 2'-O-methyl ribonucleotide
  modified_base 60: mod_base = OTHER; note = 2'-O-methyl ribonucleotide
  modified_base 61: mod_base = OTHER; note = 2'-O-methyl ribonucleotide
  modified_base 66: mod_base = OTHER; note = 2'-O-methyl ribonucleotide
  modified_base 67: mod_base = OTHER; note = 2'-O-methyl ribonucleotide
  modified_base 70: mod_base = OTHER; note = 2'-O-methyl ribonucleotide
  modified_base 71: mod_base = OTHER; note = 2'-O-methyl ribonucleotide
  modified_base 72: mod_base = OTHER; note = 2'-O-methyl ribonucleotide
  modified_base 73: mod_base = OTHER; note = 2'-O-methyl ribonucleotide
  modified_base 74: mod_base = OTHER; note = 2'-O-methyl ribonucleotide
  modified_base 75: mod_base = OTHER; note = 2'-O-methyl ribonucleotide
  modified_base 76: mod_base = OTHER; note = 2'-O-methyl ribonucleotide
  modified_base 77: mod_base = OTHER; note = 2'-O-methyl ribonucleotide
  modified_base 78: mod_base = OTHER; note = 2'-O-methyl ribonucleotide
  modified_base 79: mod_base = OTHER; note = 2'-O-methyl ribonucleotide
  modified_base 80: mod_base = OTHER; note = 2'-O-methyl ribonucleotide
  modified_base 81: mod_base = OTHER; note = 2'-O-methyl ribonucleotide
  modified_base 83: mod_base = OTHER; note = 2'-O-methyl ribonucleotide
  modified_base 84: mod_base = OTHER; note = 2'-O-methyl ribonucleotide
  modified_base 85: mod_base = OTHER; note = 2'-O-methyl ribonucleotide
  modified_base 86: mod_base = OTHER; note = 2'-O-methyl ribonucleotide
  modified_base 87: mod_base = OTHER; note = 2'-O-methyl ribonucleotide
  modified_base 88: mod_base = OTHER; note = 2'-O-methyl ribonucleotide
  modified_base 89: mod_base = OTHER; note = 2'-O-methyl ribonucleotide
  modified_base 90: mod_base = OTHER; note = 2'-O-methyl ribonucleotide
  modified_base 91: mod_base = OTHER; note = 2'-O-methyl ribonucleotide
  modified_base 92: mod_base = OTHER; note = 2'-O-methyl ribonucleotide
  modified_base 93: mod_base = OTHER; note = 2'-O-methyl ribonucleotide
  modified_base 94: mod_base = OTHER; note = 2'-O-methyl ribonucleotide
  modified_base 95: mod_base = OTHER; note = 2'-O-methyl ribonucleotide
  modified_base 96: mod_base = OTHER; note = 2'-O-methyl ribonucleotide
  modified_base 97: mod_base = OTHER; note = 2'-O-methyl ribonucleotide
  modified_base 98: mod_base = OTHER; note = 2'-O-methyl ribonucleotide
  modified_base 99: mod_base = OTHER; note = 2'-O-methyl ribonucleotide
  modified_base 100: mod_base = OTHER; note = 2'-O-methyl ribonucleotide
  modified_base 34: mod_base = OTHER; note = nebularine
  modified_base 57: mod_base = OTHER; note = nebularine
  modified_base 65: mod_base = OTHER; note = nebularine
  modified_base 1..4: mod_base = OTHER; note = phosphorothioate linkage
  modified_base 97..100: mod_base = OTHER; note = phosphorothioate linkage
  misc_feature 1: note = RNA
  misc_feature 2: note = RNA
  misc_feature 3: note = RNA
  misc_feature 4: note = RNA
  misc_feature 5: note = RNA
  misc_feature 6: note = RNA
  misc_feature 7: note = RNA
  misc_feature 8: note = RNA
  misc_feature 9: note = RNA
  misc_feature 10: note = RNA
  misc_feature 11: note = RNA
  misc_feature 12: note = RNA
  misc_feature 13: note = RNA
  misc_feature 14: note = RNA
  misc_feature 15: note = RNA
  misc_feature 16: note = RNA
  misc_feature 17: note = RNA
  misc_feature 18: note = RNA
  misc_feature 19: note = RNA
  misc_feature 20: note = RNA
  misc_feature 21: note = RNA
  misc_feature 22: note = RNA
  misc_feature 23: note = RNA
  misc_feature 24: note = RNA
  misc_feature 25: note = RNA
  misc_feature 26: note = RNA
  misc_feature 27: note = RNA
  misc_feature 28: note = RNA
  misc_feature 29: note = RNA
  misc_feature 30: note = RNA
  misc_feature 31: note = RNA
  misc_feature 32: note = RNA
  misc_feature 33: note = RNA
  misc_feature 35: note = RNA
  misc_feature 36: note = RNA
  misc_feature 37: note = RNA
  misc_feature 38: note = RNA
  misc_feature 39: note = RNA
  misc_feature 40: note = RNA
  misc_feature 41: note = RNA
  misc_feature 42: note = RNA
  misc_feature 43: note = RNA
  misc_feature 44: note = RNA
  misc_feature 45: note = RNA
  misc_feature 46: note = RNA
  misc_feature 47: note = RNA
  misc_feature 48: note = RNA
  misc_feature 49: note = RNA
  misc_feature 50: note = RNA
  misc_feature 51: note = RNA
  misc_feature 52: note = RNA
  misc_feature 53: note = RNA
  misc_feature 54: note = RNA
  misc_feature 55: note = RNA
  misc_feature 56: note = RNA
  misc_feature 58: note = RNA
  misc_feature 59: note = RNA
  misc_feature 60: note = RNA
  misc_feature 61: note = RNA
  misc_feature 62: note = RNA
  misc_feature 63: note = RNA
  misc_feature 64: note = RNA
  misc_feature 66: note = RNA
  misc_feature 67: note = RNA
  misc_feature 68: note = RNA
  misc_feature 69: note = RNA
  misc_feature 70: note = RNA
  misc_feature 71: note = RNA
  misc_feature 72: note = RNA
  misc_feature 73: note = RNA
  misc_feature 74: note = RNA
  misc_feature 75: note = RNA
  misc_feature 76: note = RNA
  misc_feature 77: note = RNA
  misc_feature 78: note = RNA
  misc_feature 79: note = RNA
  misc_feature 80: note = RNA
  misc_feature 81: note = RNA
  misc_feature 82: note = RNA
  misc_feature 83: note = RNA
  misc_feature 84: note = RNA
  misc_feature 85: note = RNA
  misc_feature 86: note = RNA
  misc_feature 87: note = RNA
  misc_feature 88: note = RNA
  misc_feature 89: note = RNA
  misc_feature 90: note = RNA
  misc_feature 91: note = RNA
  misc_feature 92: note = RNA
  misc_feature 93: note = RNA
  misc_feature 94: note = RNA
  misc_feature 95: note = RNA
  misc_feature 96: note = RNA
  misc_feature 97: note = RNA
  misc_feature 98: note = RNA
  misc_feature 99: note = RNA
  misc_feature 100: note = RNA
  misc_feature 34: note = DNA
  misc_feature 57: note = DNA
  misc_feature 65: note = DNA
caggttccatgggatgctctgttttagagctagnaatagcaagttaaaataaggctngtccgttntcaacttgaaaaagtggcaccgagtcggtgctttt

SEQ ID NO: 1949 - DNA, 100 bp, synthetic construct
  source 1..100: mol_type = other DNA
  modified_base 1: mod_base = OTHER; note = 2'-O-methyl ribonucleotide
  modified_base 2: mod_base = OTHER; note = 2'-O-methyl ribonucleotide
  modified_base 3: mod_base = OTHER; note = 2'-O-methyl ribonucleotide
  modified_base 21: mod_base = OTHER; note = 2'-O-methyl ribonucleotide
  modified_base 29: mod_base = OTHER; note = 2'-O-methyl ribonucleotide
  modified_base 30: mod_base = OTHER; note = 2'-O-methyl ribonucleotide
  modified_base 31: mod_base = OTHER; note = 2'-O-methyl ribonucleotide
  modified_base 32: mod_base = OTHER; note = 2'-O-methyl ribonucleotide
  modified_base 33: mod_base = OTHER; note = 2'-O-methyl ribonucleotide
  modified_base 35: mod_base = OTHER; note = 2'-O-methyl ribonucleotide
  modified_base 36: mod_base = OTHER; note = 2'-O-methyl ribonucleotide
  modified_base 37: mod_base = OTHER; note = 2'-O-methyl ribonucleotide
  modified_base 38: mod_base = OTHER; note = 2'-O-methyl ribonucleotide
  modified_base 39: mod_base = OTHER; note = 2'-O-methyl ribonucleotide
  modified_base 40: mod_base = OTHER; note = 2'-O-methyl ribonucleotide
  modified_base 41: mod_base = OTHER; note = 2'-O-methyl ribonucleotide
  modified_base 46: mod_base = OTHER; note = 2'-O-methyl ribonucleotide
  modified_base 48: mod_base = OTHER; note = 2'-O-methyl ribonucleotide
  modified_base 50: mod_base = OTHER; note = 2'-O-methyl ribonucleotide
  modified_base 52: mod_base = OTHER; note = 2'-O-methyl ribonucleotide
  modified_base 53: mod_base = OTHER; note = 2'-O-methyl ribonucleotide
  modified_base 54: mod_base = OTHER; note = 2'-O-methyl ribonucleotide
  modified_base 55: mod_base = OTHER; note = 2'-O-methyl ribonucleotide
  modified_base 56: mod_base = OTHER; note = 2'-O-methyl ribonucleotide
  modified_base 60: mod_base = OTHER; note = 2'-O-methyl ribonucleotide
  modified_base 61: mod_base = OTHER; note = 2'-O-methyl ribonucleotide
  modified_base 66: mod_base = OTHER; note = 2'-O-methyl ribonucleotide
  modified_base 67: mod_base = OTHER; note = 2'-O-methyl ribonucleotide
  modified_base 70: mod_base = OTHER; note = 2'-O-methyl ribonucleotide
  modified_base 71: mod_base = OTHER; note = 2'-O-methyl ribonucleotide
  modified_base 72: mod_base = OTHER; note = 2'-O-methyl ribonucleotide
  modified_base 73: mod_base = OTHER; note = 2'-O-methyl ribonucleotide
  modified_base 74: mod_base = OTHER; note = 2'-O-methyl ribonucleotide
  modified_base 75: mod_base = OTHER; note = 2'-O-methyl ribonucleotide
  modified_base 76: mod_base = OTHER; note = 2'-O-methyl ribonucleotide
  modified_base 77: mod_base = OTHER; note = 2'-O-methyl ribonucleotide
  modified_base 78: mod_base = OTHER; note = 2'-O-methyl ribonucleotide
  modified_base 79: mod_base = OTHER; note = 2'-O-methyl ribonucleotide
  modified_base 80: mod_base = OTHER; note = 2'-O-methyl ribonucleotide
  modified_base 81: mod_base = OTHER; note = 2'-O-methyl ribonucleotide
  modified_base 83: mod_base = OTHER; note = 2'-O-methyl ribonucleotide
  modified_base 84: mod_base = OTHER; note = 2'-O-methyl ribonucleotide
  modified_base 85: mod_base = OTHER; note = 2'-O-methyl ribonucleotide
  modified_base 86: mod_base = OTHER; note = 2'-O-methyl ribonucleotide
  modified_base 87: mod_base = OTHER; note = 2'-O-methyl ribonucleotide
  modified_base 88: mod_base = OTHER; note = 2'-O-methyl ribonucleotide
  modified_base 89: mod_base = OTHER; note = 2'-O-methyl ribonucleotide
  modified_base 90: mod_base = OTHER; note = 2'-O-methyl ribonucleotide
  modified_base 91: mod_base = OTHER; note = 2'-O-methyl ribonucleotide
  modified_base 92: mod_base = OTHER; note = 2'-O-methyl ribonucleotide
  modified_base 93: mod_base = OTHER; note = 2'-O-methyl ribonucleotide
  modified_base 94: mod_base = OTHER; note = 2'-O-methyl ribonucleotide
  modified_base 95: mod_base = OTHER; note = 2'-O-methyl ribonucleotide
  modified_base 96: mod_base = OTHER; note = 2'-O-methyl ribonucleotide
  modified_base 97: mod_base = OTHER; note = 2'-O-methyl ribonucleotide
  modified_base 98: mod_base = OTHER; note = 2'-O-methyl ribonucleotide
  modified_base 99: mod_base = OTHER; note = 2'-O-methyl ribonucleotide
  modified_base 100: mod_base = OTHER; note = 2'-O-methyl ribonucleotide
  modified_base 28: mod_base = OTHER; note = nebularine
  modified_base 34: mod_base = OTHER; note = nebularine
  modified_base 42: mod_base = OTHER; note = nebularine
  modified_base 57: mod_base = OTHER; note = nebularine
  modified_base 65: mod_base = OTHER; note = nebularine
  modified_base 1..4: mod_base = OTHER; note = phosphorothioate linkage
  modified_base 97..100: mod_base = OTHER; note = phosphorothioate linkage
  misc_feature 1: note = RNA
  misc_feature 2: note = RNA
  misc_feature 3: note = RNA
  misc_feature 4: note = RNA
  misc_feature 5: note = RNA
  misc_feature 6: note = RNA
  misc_feature 7: note = RNA
  misc_feature 8: note = RNA
  misc_feature 9: note = RNA
  misc_feature 10: note = RNA
  misc_feature 11: note = RNA
  misc_feature 12: note = RNA
  misc_feature 13: note = RNA
  misc_feature 14: note = RNA
  misc_feature 15: note = RNA
  misc_feature 16: note = RNA
  misc_feature 17: note = RNA
  misc_feature 18: note = RNA
  misc_feature 19: note = RNA
  misc_feature 20: note = RNA
  misc_feature 21: note = RNA
  misc_feature 22: note = RNA
  misc_feature 23: note = RNA
  misc_feature 24: note = RNA
  misc_feature 25: note = RNA
  misc_feature 26: note = RNA
  misc_feature 27: note = RNA
  misc_feature 29: note = RNA
  misc_feature 30: note = RNA
  misc_feature 31: note = RNA
  misc_feature 32: note = RNA
  misc_feature 33: note = RNA
  misc_feature 35: note = RNA
  misc_feature 36: note = RNA
  misc_feature 37: note = RNA
  misc_feature 38: note = RNA
  misc_feature 39: note = RNA
  misc_feature 40: note = RNA
  misc_feature 41: note = RNA
  misc_feature 43: note = RNA
  misc_feature 44: note = RNA
  misc_feature 45: note = RNA
  misc_feature 46: note = RNA
  misc_feature 47: note = RNA
  misc_feature 48: note = RNA
  misc_feature 49: note = RNA
  misc_feature 50: note = RNA
  misc_feature 51: note = RNA
  misc_feature 52: note = RNA
  misc_feature 53: note = RNA
  misc_feature 54: note = RNA
  misc_feature 55: note = RNA
  misc_feature 56: note = RNA
  misc_feature 58: note = RNA
  misc_feature 59: note = RNA
  misc_feature 60: note = RNA
  misc_feature 61: note = RNA
  misc_feature 62: note = RNA
  misc_feature 63: note = RNA
  misc_feature 64: note = RNA
  misc_feature 66: note = RNA
  misc_feature 67: note = RNA
  misc_feature 68: note = RNA
  misc_feature 69: note = RNA
  misc_feature 70: note = RNA
  misc_feature 71: note = RNA
  misc_feature 72: note = RNA
  misc_feature 73: note = RNA
  misc_feature 74: note = RNA
  misc_feature 75: note = RNA
  misc_feature 76: note = RNA
  misc_feature 77: note = RNA
  misc_feature 78: note = RNA
  misc_feature 79: note = RNA
  misc_feature 80: note = RNA
  misc_feature 81: note = RNA
  misc_feature 82: note = RNA
  misc_feature 83: note = RNA
  misc_feature 84: note = RNA
  misc_feature 85: note = RNA
  misc_feature 86: note = RNA
  misc_feature 87: note = RNA
  misc_feature 88: note = RNA
  misc_feature 89: note = RNA
  misc_feature 90: note = RNA
  misc_feature 91: note = RNA
  misc_feature 92: note = RNA
  misc_feature 93: note = RNA
  misc_feature 94: note = RNA
  misc_feature 95: note = RNA
  misc_feature 96: note = RNA
  misc_feature 97: note = RNA
  misc_feature 98: note = RNA
  misc_feature 99: note = RNA
  misc_feature 100: note = RNA
  misc_feature 28: note = DNA
  misc_feature 34: note = DNA
  misc_feature 42: note = DNA
  misc_feature 57: note = DNA
  misc_feature 65: note = DNA
caggttccatgggatgctctgttttagngctagnaatagcangttaaaataaggctngtccgttntcaacttgaaaaagtggcaccgagtcggtgctttt

SEQ ID NO: 1950 - RNA, 100 nt, synthetic construct; identical to SEQ ID NO: 1896
  source 1..100: mol_type = other RNA
  modified_base 1: mod_base = OTHER; note = 2'-O-methyl ribonucleotide
  modified_base 2: mod_base = OTHER; note = 2'-O-methyl ribonucleotide
  modified_base 3: mod_base = OTHER; note = 2'-O-methyl ribonucleotide
  modified_base 21: mod_base = OTHER; note = 2'-O-methyl ribonucleotide
  modified_base 28: mod_base = OTHER; note = 2'-O-methyl ribonucleotide
  modified_base 29: mod_base = OTHER; note = 2'-O-methyl ribonucleotide
  modified_base 30: mod_base = OTHER; note = 2'-O-methyl ribonucleotide
  modified_base 31: mod_base = OTHER; note = 2'-O-methyl ribonucleotide
  modified_base 32: mod_base = OTHER; note = 2'-O-methyl ribonucleotide
  modified_base 33: mod_base = OTHER; note = 2'-O-methyl ribonucleotide
  modified_base 34: mod_base = OTHER; note = 2'-O-methyl ribonucleotide
  modified_base 35: mod_base = OTHER; note = 2'-O-methyl ribonucleotide
  modified_base 36: mod_base = OTHER; note = 2'-O-methyl ribonucleotide
  modified_base 37: mod_base = OTHER; note = 2'-O-methyl ribonucleotide
  modified_base 38: mod_base = OTHER; note = 2'-O-methyl ribonucleotide
  modified_base 39: mod_base = OTHER; note = 2'-O-methyl ribonucleotide
  modified_base 40: mod_base = OTHER; note = 2'-O-methyl ribonucleotide
  modified_base 41: mod_base = OTHER; note = 2'-O-methyl ribonucleotide
  modified_base 42: mod_base = OTHER; note = 2'-O-methyl ribonucleotide
  modified_base 46: mod_base = OTHER; note = 2'-O-methyl ribonucleotide
  modified_base 48: mod_base = OTHER; note = 2'-O-methyl ribonucleotide
  modified_base 50: mod_base = OTHER; note = 2'-O-methyl ribonucleotide
  modified_base 52: mod_base = OTHER; note = 2'-O-methyl ribonucleotide
  modified_base 53: mod_base = OTHER; note = 2'-O-methyl ribonucleotide
  modified_base 54: mod_base = OTHER; note = 2'-O-methyl ribonucleotide
  modified_base 55: mod_base = OTHER; note = 2'-O-methyl ribonucleotide
  modified_base 56: mod_base = OTHER; note = 2'-O-methyl ribonucleotide
  modified_base 57: mod_base = OTHER; note = 2'-O-methyl ribonucleotide
  modified_base 60: mod_base = OTHER; note = 2'-O-methyl ribonucleotide
  modified_base 61: mod_base = OTHER; note = 2'-O-methyl ribonucleotide
  modified_base 66: mod_base = OTHER; note = 2'-O-methyl ribonucleotide
  modified_base 67: mod_base = OTHER; note = 2'-O-methyl ribonucleotide
  modified_base 70: mod_base = OTHER; note = 2'-O-methyl ribonucleotide
  modified_base 71: mod_base = OTHER; note = 2'-O-methyl ribonucleotide
  modified_base 72: mod_base = OTHER; note = 2'-O-methyl ribonucleotide
  modified_base 73: mod_base = OTHER; note = 2'-O-methyl ribonucleotide
  modified_base 74: mod_base = OTHER; note = 2'-O-methyl ribonucleotide
  modified_base 75: mod_base = OTHER; note = 2'-O-methyl ribonucleotide
  modified_base 76: mod_base = OTHER; note = 2'-O-methyl ribonucleotide
  modified_base 77: mod_base = OTHER; note = 2'-O-methyl ribonucleotide
  modified_base 78: mod_base = OTHER; note = 2'-O-methyl ribonucleotide
  modified_base 79: mod_base = OTHER; note = 2'-O-methyl ribonucleotide
  modified_base 80: mod_base = OTHER; note = 2'-O-methyl ribonucleotide
  modified_base 81: mod_base = OTHER; note = 2'-O-methyl ribonucleotide
  modified_base 83: mod_base = OTHER; note = 2'-O-methyl ribonucleotide
  modified_base 84: mod_base = OTHER; note = 2'-O-methyl ribonucleotide
  modified_base 85: mod_base = OTHER; note = 2'-O-methyl ribonucleotide
  modified_base 86: mod_base = OTHER; note = 2'-O-methyl ribonucleotide
  modified_base 87: mod_base = OTHER; note = 2'-O-methyl ribonucleotide
  modified_base 88: mod_base = OTHER; note = 2'-O-methyl ribonucleotide
  modified_base 89: mod_base = OTHER; note = 2'-O-methyl ribonucleotide
  modified_base 90: mod_base = OTHER; note = 2'-O-methyl ribonucleotide
  modified_base 91: mod_base = OTHER; note = 2'-O-methyl ribonucleotide
  modified_base 92: mod_base = OTHER; note = 2'-O-methyl ribonucleotide
  modified_base 93: mod_base = OTHER; note = 2'-O-methyl ribonucleotide
  modified_base 94: mod_base = OTHER; note = 2'-O-methyl ribonucleotide
  modified_base 95: mod_base = OTHER; note = 2'-O-methyl ribonucleotide
  modified_base 96: mod_base = OTHER; note = 2'-O-methyl ribonucleotide
  modified_base 97: mod_base = OTHER; note = 2'-O-methyl ribonucleotide
  modified_base 98: mod_base = OTHER; note = 2'-O-methyl ribonucleotide
  modified_base 99: mod_base = OTHER; note = 2'-O-methyl ribonucleotide
  modified_base 100: mod_base = OTHER; note = 2'-O-methyl ribonucleotide
  modified_base 9: mod_base = OTHER; note = nebularine
  modified_base 14: mod_base = OTHER; note = nebularine
  modified_base 1..3: mod_base = OTHER; note = phosphorothioate linkage
  modified_base 97..100: mod_base = OTHER; note = phosphorothioate linkage

SEQ ID NO: 1951 - RNA, 100 nt, synthetic construct; identical to SEQ ID NO: 1897
  source 1..100: mol_type = other RNA
  modified_base 1: mod_base = OTHER; note = 2'-O-methyl ribonucleotide
  modified_base 2: mod_base = OTHER; note = 2'-O-methyl ribonucleotide
  modified_base 3: mod_base = OTHER; note = 2'-O-methyl ribonucleotide
  modified_base 21: mod_base = OTHER; note = 2'-O-methyl ribonucleotide
  modified_base 28: mod_base = OTHER; note = 2'-O-methyl ribonucleotide
  modified_base 29: mod_base = OTHER; note = 2'-O-methyl ribonucleotide
  modified_base 30: mod_base = OTHER; note = 2'-O-methyl ribonucleotide
  modified_base 31: mod_base = OTHER; note = 2'-O-methyl ribonucleotide
  modified_base 32: mod_base = OTHER; note = 2'-O-methyl ribonucleotide
  modified_base 33: mod_base = OTHER; note = 2'-O-methyl ribonucleotide
  modified_base 34: mod_base = OTHER; note = 2'-O-methyl ribonucleotide
  modified_base 35: mod_base = OTHER; note = 2'-O-methyl ribonucleotide
  modified_base 36: mod_base = OTHER; note = 2'-O-methyl ribonucleotide
  modified_base 37: mod_base = OTHER; note = 2'-O-methyl ribonucleotide
  modified_base 38: mod_base = OTHER; note = 2'-O-methyl ribonucleotide
  modified_base 39: mod_base = OTHER; note = 2'-O-methyl ribonucleotide
  modified_base 40: mod_base = OTHER; note = 2'-O-methyl ribonucleotide
  modified_base 41: mod_base = OTHER; note = 2'-O-methyl ribonucleotide
  modified_base 42: mod_base = OTHER; note = 2'-O-methyl ribonucleotide
  modified_base 46: mod_base = OTHER; note = 2'-O-methyl ribonucleotide
  modified_base 48: mod_base = OTHER; note = 2'-O-methyl ribonucleotide
  modified_base 50: mod_base = OTHER; note = 2'-O-methyl ribonucleotide
  modified_base 52: mod_base = OTHER; note = 2'-O-methyl ribonucleotide
  modified_base 53: mod_base = OTHER; note = 2'-O-methyl ribonucleotide
  modified_base 54: mod_base = OTHER; note = 2'-O-methyl ribonucleotide
  modified_base 55: mod_base = OTHER; note = 2'-O-methyl ribonucleotide
  modified_base 56: mod_base = OTHER; note = 2'-O-methyl ribonucleotide
  modified_base 57: mod_base = OTHER; note = 2'-O-methyl ribonucleotide
  modified_base 60: mod_base = OTHER; note = 2'-O-methyl ribonucleotide
  modified_base 61: mod_base = OTHER; note = 2'-O-methyl ribonucleotide
  modified_base 66: mod_base = OTHER; note = 2'-O-methyl ribonucleotide
  modified_base 67: mod_base = OTHER; note = 2'-O-methyl ribonucleotide
  modified_base 70: mod_base = OTHER; note = 2'-O-methyl ribonucleotide
  modified_base 71: mod_base = OTHER; note = 2'-O-methyl ribonucleotide
  modified_base 72: mod_base = OTHER; note = 2'-O-methyl ribonucleotide
  modified_base 73: mod_base = OTHER; note = 2'-O-methyl ribonucleotide
  modified_base 74: mod_base = OTHER; note = 2'-O-methyl ribonucleotide
  modified_base 75: mod_base = OTHER; note = 2'-O-methyl ribonucleotide
  modified_base 76: mod_base = OTHER; note = 2'-O-methyl ribonucleotide
  modified_base 77: mod_base = OTHER; note = 2'-O-methyl ribonucleotide
  modified_base 78: mod_base = OTHER; note = 2'-O-methyl ribonucleotide
  modified_base 79: mod_base = OTHER; note = 2'-O-methyl ribonucleotide
  modified_base 80: mod_base = OTHER; note = 2'-O-methyl ribonucleotide
  modified_base 81: mod_base = OTHER; note = 2'-O-methyl ribonucleotide
  modified_base 83: mod_base = OTHER; note = 2'-O-methyl ribonucleotide
  modified_base 84: mod_base = OTHER; note = 2'-O-methyl ribonucleotide
  modified_base 85: mod_base = OTHER; note = 2'-O-methyl ribonucleotide
  modified_base 86: mod_base = OTHER; note = 2'-O-methyl ribonucleotide
  modified_base 87: mod_base = OTHER; note = 2'-O-methyl ribonucleotide
  modified_base 88: mod_base = OTHER; note = 2'-O-methyl ribonucleotide
  modified_base 89: mod_base = OTHER; note = 2'-O-methyl ribonucleotide
  modified_base 90: mod_base = OTHER; note = 2'-O-methyl ribonucleotide
  modified_base 91: mod_base = OTHER; note = 2'-O-methyl ribonucleotide
  modified_base 92: mod_base = OTHER; note = 2'-O-methyl ribonucleotide
  modified_base 93: mod_base = OTHER; note = 2'-O-methyl ribonucleotide
  modified_base 94: mod_base = OTHER; note = 2'-O-methyl ribonucleotide
  modified_base 95: mod_base = OTHER; note = 2'-O-methyl ribonucleotide
  modified_base 96: mod_base = OTHER; note = 2'-O-methyl ribonucleotide
  modified_base 97: mod_base = OTHER; note = 2'-O-methyl ribonucleotide
  modified_base 98: mod_base = OTHER; note = 2'-O-methyl ribonucleotide
  modified_base 99: mod_base = OTHER; note = 2'-O-methyl ribonucleotide
  modified_base 100: mod_base = OTHER; note = 2'-O-methyl ribonucleotide
  modified_base 9: mod_base = OTHER; note = nebularine
  modified_base 1..3: mod_base = OTHER; note = phosphorothioate linkage
  modified_base 97..100: mod_base = OTHER; note = phosphorothioate linkage

SEQ ID NO: 1952 - RNA, 100 nt, synthetic construct; identical to SEQ ID NO: 1898
  source 1..100: mol_type = other RNA
  modified_base 1: mod_base = OTHER; note = 2'-O-methyl ribonucleotide
  modified_base 2: mod_base = OTHER; note = 2'-O-methyl ribonucleotide
  modified_base 3: mod_base = OTHER; note = 2'-O-methyl ribonucleotide
  modified_base 21: mod_base = OTHER; note = 2'-O-methyl ribonucleotide
  modified_base 28: mod_base = OTHER; note = 2'-O-methyl ribonucleotide
  modified_base 29: mod_base = OTHER; note = 2'-O-methyl ribonucleotide
  modified_base 30: mod_base = OTHER; note = 2'-O-methyl ribonucleotide
  modified_base 31: mod_base = OTHER; note = 2'-O-methyl ribonucleotide
  modified_base 32: mod_base = OTHER; note = 2'-O-methyl ribonucleotide
  modified_base 33: mod_base = OTHER; note = 2'-O-methyl ribonucleotide
  modified_base 34: mod_base = OTHER; note = 2'-O-methyl ribonucleotide
  modified_base 35: mod_base = OTHER; note = 2'-O-methyl ribonucleotide
  modified_base 36: mod_base = OTHER; note = 2'-O-methyl ribonucleotide
  modified_base 37: mod_base = OTHER; note = 2'-O-methyl ribonucleotide
  modified_base 38: mod_base = OTHER; note = 2'-O-methyl ribonucleotide
  modified_base 39: mod_base = OTHER; note = 2'-O-methyl ribonucleotide
  modified_base 40: mod_base = OTHER; note = 2'-O-methyl ribonucleotide
  modified_base 41: mod_base = OTHER; note = 2'-O-methyl ribonucleotide
  modified_base 42: mod_base = OTHER; note = 2'-O-methyl ribonucleotide
  modified_base 46: mod_base = OTHER; note = 2'-O-methyl ribonucleotide
  modified_base 48: mod_base = OTHER; note = 2'-O-methyl ribonucleotide
  modified_base 50: mod_base = OTHER; note = 2'-O-methyl ribonucleotide
  modified_base 52: mod_base = OTHER; note = 2'-O-methyl ribonucleotide
  modified_base 53: mod_base = OTHER; note = 2'-O-methyl ribonucleotide
  modified_base 54: mod_base = OTHER; note = 2'-O-methyl ribonucleotide
  modified_base 55: mod_base = OTHER; note = 2'-O-methyl ribonucleotide
  modified_base 56: mod_base = OTHER; note = 2'-O-methyl ribonucleotide
  modified_base 57: mod_base = OTHER; note = 2'-O-methyl ribonucleotide
  modified_base 60: mod_base = OTHER; note = 2'-O-methyl ribonucleotide
  modified_base 61: mod_base = OTHER; note = 2'-O-methyl ribonucleotide
  modified_base 66: mod_base = OTHER; note = 2'-O-methyl ribonucleotide
  modified_base 67: mod_base = OTHER; note = 2'-O-methyl ribonucleotide
  modified_base 70: mod_base = OTHER; note = 2'-O-methyl ribonucleotide
  modified_base 71: mod_base = OTHER; note = 2'-O-methyl ribonucleotide
  modified_base 72: mod_base = OTHER; note = 2'-O-methyl ribonucleotide
  modified_base 73: mod_base = OTHER; note = 2'-O-methyl ribonucleotide
  modified_base 74: mod_base = OTHER; note = 2'-O-methyl ribonucleotide
  modified_base 75: mod_base = OTHER; note = 2'-O-methyl ribonucleotide
  modified_base 76: mod_base = OTHER; note = 2'-O-methyl ribonucleotide
  modified_base 77: mod_base = OTHER; note = 2'-O-methyl ribonucleotide
  modified_base 78: mod_base = OTHER; note = 2'-O-methyl ribonucleotide
  modified_base 79: mod_base = OTHER; note = 2'-O-methyl ribonucleotide
  modified_base 80: mod_base = OTHER; note = 2'-O-methyl ribonucleotide
  modified_base 81: mod_base = OTHER; note = 2'-O-methyl ribonucleotide
  modified_base 83: mod_base = OTHER; note = 2'-O-methyl ribonucleotide
  modified_base 84: mod_base = OTHER; note = 2'-O-methyl ribonucleotide
  modified_base 85: mod_base = OTHER; note = 2'-O-methyl ribonucleotide
  modified_base 86: mod_base = OTHER; note = 2'-O-methyl ribonucleotide
  modified_base 87: mod_base = OTHER; note = 2'-O-methyl ribonucleotide
  modified_base 88: mod_base = OTHER; note = 2'-O-methyl ribonucleotide
  modified_base 89: mod_base = OTHER; note = 2'-O-methyl ribonucleotide
  modified_base 90: mod_base = OTHER; note = 2'-O-methyl ribonucleotide
  modified_base 91: mod_base = OTHER; note = 2'-O-methyl ribonucleotide
  modified_base 92: mod_base = OTHER; note = 2'-O-methyl ribonucleotide
  modified_base 93: mod_base = OTHER; note = 2'-O-methyl ribonucleotide
  modified_base 94: mod_base = OTHER; note = 2'-O-methyl ribonucleotide
  modified_base 95: mod_base = OTHER; note = 2'-O-methyl ribonucleotide
  modified_base 96: mod_base = OTHER; note = 2'-O-methyl ribonucleotide
  modified_base 97: mod_base = OTHER; note = 2'-O-methyl ribonucleotide
  modified_base 98: mod_base = OTHER; note = 2'-O-methyl ribonucleotide
  modified_base 99: mod_base = OTHER; note = 2'-O-methyl ribonucleotide
  modified_base 100: mod_base = OTHER; note = 2'-O-methyl ribonucleotide
  modified_base 14: mod_base = OTHER; note = nebularine
  modified_base 1..3: mod_base = OTHER; note = phosphorothioate linkage
  modified_base 97..100: mod_base = OTHER; note = phosphorothioate linkage

SEQ ID NO: 1953 - RNA, 100 nt, synthetic construct; identical to SEQ ID NO: 1899
  source 1..100: mol_type = other RNA
  modified_base 1: mod_base = OTHER; note = 2'-O-methyl ribonucleotide
  modified_base 2: mod_base = OTHER; note = 2'-O-methyl ribonucleotide
  modified_base 3: mod_base = OTHER; note = 2'-O-methyl ribonucleotide
  modified_base 21: mod_base = OTHER; note = 2'-O-methyl ribonucleotide
  modified_base 28: mod_base = OTHER; note = 2'-O-methyl ribonucleotide
  modified_base 29: mod_base = OTHER; note = 2'-O-methyl ribonucleotide
  modified_base 30: mod_base = OTHER; note = 2'-O-methyl ribonucleotide
  modified_base 31: mod_base = OTHER; note = 2'-O-methyl ribonucleotide
  modified_base 32: mod_base = OTHER; note = 2'-O-methyl ribonucleotide
  modified_base 33: mod_base = OTHER; note = 2'-O-methyl ribonucleotide
  modified_base 35: mod_base = OTHER; note = 2'-O-methyl ribonucleotide
  modified_base 36: mod_base = OTHER; note = 2'-O-methyl ribonucleotide
  modified_base 37: mod_base = OTHER; note = 2'-O-methyl ribonucleotide
  modified_base 38: mod_base = OTHER; note = 2'-O-methyl ribonucleotide
  modified_base 39: mod_base = OTHER; note = 2'-O-methyl ribonucleotide
  modified_base 40: mod_base = OTHER; note = 2'-O-methyl ribonucleotide
  modified_base 41: mod_base = OTHER; note = 2'-O-methyl ribonucleotide
  modified_base 42: mod_base = OTHER; note = 2'-O-methyl ribonucleotide
  modified_base 46: mod_base = OTHER; note = 2'-O-methyl ribonucleotide
  modified_base 48: mod_base = OTHER; note = 2'-O-methyl ribonucleotide
  modified_base 50: mod_base = OTHER; note = 2'-O-methyl ribonucleotide
  modified_base 52: mod_base = OTHER; note = 2'-O-methyl ribonucleotide
  modified_base 53: mod_base = OTHER; note = 2'-O-methyl ribonucleotide
  modified_base 54: mod_base = OTHER; note = 2'-O-methyl ribonucleotide
  modified_base 55: mod_base = OTHER; note = 2'-O-methyl ribonucleotide
  modified_base 56: mod_base = OTHER; note = 2'-O-methyl ribonucleotide
  modified_base 57: mod_base = OTHER; note = 2'-O-methyl ribonucleotide
  modified_base 60: mod_base = OTHER; note = 2'-O-methyl ribonucleotide
  modified_base 61: mod_base = OTHER; note = 2'-O-methyl ribonucleotide
  modified_base 66: mod_base = OTHER; note = 2'-O-methyl ribonucleotide
  modified_base 67: mod_base = OTHER; note = 2'-O-methyl ribonucleotide
  modified_base 70: mod_base = OTHER; note = 2'-O-methyl ribonucleotide
  modified_base 71: mod_base = OTHER; note = 2'-O-methyl ribonucleotide
  modified_base 72: mod_base = OTHER; note = 2'-O-methyl ribonucleotide
  modified_base 73: mod_base = OTHER; note = 2'-O-methyl ribonucleotide
  modified_base 74: mod_base = OTHER; note = 2'-O-methyl ribonucleotide
  modified_base 75: mod_base = OTHER; note = 2'-O-methyl ribonucleotide
  modified_base 76: mod_base = OTHER; note = 2'-O-methyl ribonucleotide
  modified_base 77: mod_base = OTHER; note = 2'-O-methyl ribonucleotide
  modified_base 78: mod_base = OTHER; note = 2'-O-methyl ribonucleotide
  modified_base 79: mod_base = OTHER; note = 2'-O-methyl ribonucleotide
  modified_base 80: mod_base = OTHER; note = 2'-O-methyl ribonucleotide
  modified_base 81: mod_base = OTHER; note = 2'-O-methyl ribonucleotide
  modified_base 83: mod_base = OTHER; note = 2'-O-methyl ribonucleotide
  modified_base 84: mod_base = OTHER; note = 2'-O-methyl ribonucleotide
  modified_base 85: mod_base = OTHER; note = 2'-O-methyl ribonucleotide
  modified_base 86: mod_base = OTHER; note = 2'-O-methyl ribonucleotide
  modified_base 87: mod_base = OTHER; note = 2'-O-methyl ribonucleotide
  modified_base 88: mod_base = OTHER; note = 2'-O-methyl ribonucleotide
  modified_base 89: mod_base = OTHER; note = 2'-O-methyl ribonucleotide
  modified_base 90: mod_base = OTHER; note = 2'-O-methyl ribonucleotide
  modified_base 91: mod_base = OTHER; note = 2'-O-methyl ribonucleotide
  modified_base 92: mod_base = OTHER; note = 2'-O-methyl ribonucleotide
  modified_base 93: mod_base = OTHER; note = 2'-O-methyl ribonucleotide
  modified_base 94: mod_base = OTHER; note = 2'-O-methyl ribonucleotide
  modified_base 95: mod_base = OTHER; note = 2'-O-methyl ribonucleotide
  modified_base 96: mod_base = OTHER; note = 2'-O-methyl ribonucleotide
  modified_base 97: mod_base = OTHER; note = 2'-O-methyl ribonucleotide
  modified_base 98: mod_base = OTHER; note = 2'-O-methyl ribonucleotide
  modified_base 99: mod_base = OTHER; note = 2'-O-methyl ribonucleotide
  modified_base 100: mod_base = OTHER; note = 2'-O-methyl ribonucleotide
  modified_base 34: mod_base = OTHER; note = nebularine
  modified_base 1..3: mod_base = OTHER; note = phosphorothioate linkage
  modified_base 97..100: mod_base = OTHER; note = phosphorothioate linkage

SEQ ID NO: 1954 - RNA, 100 nt, synthetic construct; identical to SEQ ID NO: 1900
  source 1..100: mol_type = other RNA
  modified_base 1: mod_base = OTHER; note = 2'-O-methyl ribonucleotide
  modified_base 2: mod_base = OTHER; note = 2'-O-methyl ribonucleotide
  modified_base 3: mod_base = OTHER; note = 2'-O-methyl ribonucleotide
  modified_base 21: mod_base = OTHER; note = 2'-O-methyl ribonucleotide
  modified_base 28: mod_base = OTHER; note = 2'-O-methyl ribonucleotide
  modified_base 29: mod_base = OTHER; note = 2'-O-methyl ribonucleotide
  modified_base 30: mod_base = OTHER; note = 2'-O-methyl ribonucleotide
  modified_base 31: mod_base = OTHER; note = 2'-O-methyl ribonucleotide
  modified_base 32: mod_base = OTHER; note = 2'-O-methyl ribonucleotide
  modified_base 33: mod_base = OTHER; note = 2'-O-methyl ribonucleotide
  modified_base 35: mod_base = OTHER; note = 2'-O-methyl ribonucleotide
  modified_base 36: mod_base = OTHER; note = 2'-O-methyl ribonucleotide
  modified_base 37: mod_base = OTHER; note = 2'-O-methyl ribonucleotide
  modified_base 38: mod_base = OTHER; note = 2'-O-methyl ribonucleotide
  modified_base 39: mod_base = OTHER; note = 2'-O-methyl ribonucleotide
  modified_base 40: mod_base = OTHER; note = 2'-O-methyl ribonucleotide
  modified_base 41: mod_base = OTHER; note = 2'-O-methyl ribonucleotide
  modified_base 42: mod_base = OTHER; note = 2'-O-methyl ribonucleotide
  modified_base 46: mod_base = OTHER; note = 2'-O-methyl ribonucleotide
  modified_base 48: mod_base = OTHER; note = 2'-O-methyl ribonucleotide
  modified_base 50: mod_base = OTHER; note = 2'-O-methyl ribonucleotide
  modified_base 52: mod_base = OTHER; note = 2'-O-methyl ribonucleotide
  modified_base 53: mod_base = OTHER; note = 2'-O-methyl ribonucleotide
  modified_base 54: mod_base = OTHER; note = 2'-O-methyl ribonucleotide
  modified_base 55: mod_base = OTHER; note = 2'-O-methyl ribonucleotide
  modified_base 56: mod_base = OTHER; note = 2'-O-methyl ribonucleotide
  modified_base 60: mod_base = OTHER; note = 2'-O-methyl ribonucleotide
  modified_base 61: mod_base = OTHER; note = 2'-O-methyl ribonucleotide
  modified_base 66: mod_base = OTHER; note = 2'-O-methyl ribonucleotide
  modified_base 67: mod_base = OTHER; note = 2'-O-methyl ribonucleotide
  modified_base 70: mod_base = OTHER; note = 2'-O-methyl ribonucleotide
  modified_base 71: mod_base = OTHER; note = 2'-O-methyl ribonucleotide
  modified_base 72: mod_base = OTHER; note = 2'-O-methyl ribonucleotide
  modified_base 73: mod_base = OTHER; note = 2'-O-methyl ribonucleotide
  modified_base 74: mod_base = OTHER; note = 2'-O-methyl ribonucleotide
  modified_base 75: mod_base = OTHER; note = 2'-O-methyl ribonucleotide
  modified_base 76: mod_base = OTHER; note = 2'-O-methyl ribonucleotide
  modified_base 77: mod_base = OTHER; note = 2'-O-methyl ribonucleotide
  modified_base 78: mod_base = OTHER; note = 2'-O-methyl ribonucleotide
  modified_base 79: mod_base = OTHER; note = 2'-O-methyl ribonucleotide
  modified_base 80: mod_base = OTHER; note = 2'-O-methyl ribonucleotide
  modified_base 81: mod_base = OTHER; note = 2'-O-methyl ribonucleotide
  modified_base 83: mod_base = OTHER; note = 2'-O-methyl ribonucleotide
  modified_base 84: mod_base = OTHER; note = 2'-O-methyl ribonucleotide
  modified_base 85: mod_base = OTHER; note = 2'-O-methyl ribonucleotide
  modified_base 86: mod_base = OTHER; note = 2'-O-methyl ribonucleotide
  modified_base 87: mod_base = OTHER; note = 2'-O-methyl ribonucleotide
  modified_base 88: mod_base = OTHER; note = 2'-O-methyl ribonucleotide
  modified_base 89: mod_base = OTHER; note = 2'-O-methyl ribonucleotide
  modified_base 90: mod_base = OTHER; note = 2'-O-methyl ribonucleotide
  modified_base 91: mod_base = OTHER; note = 2'-O-methyl ribonucleotide
  modified_base 92: mod_base = OTHER; note = 2'-O-methyl ribonucleotide
  modified_base 93: mod_base = OTHER; note = 2'-O-methyl ribonucleotide
  modified_base 94: mod_base = OTHER; note = 2'-O-methyl ribonucleotide
  modified_base 95: mod_base = OTHER; note = 2'-O-methyl ribonucleotide
  modified_base 96: mod_base = OTHER; note = 2'-O-methyl ribonucleotide
  modified_base 97: mod_base = OTHER; note = 2'-O-methyl ribonucleotide
  modified_base 98: mod_base = OTHER; note = 2'-O-methyl ribonucleotide
  modified_base 99: mod_base = OTHER; note = 2'-O-methyl ribonucleotide
  modified_base 100: mod_base = OTHER; note = 2'-O-methyl ribonucleotide
  modified_base 34: mod_base = OTHER; note = nebularine
  modified_base 57: mod_base = OTHER; note = nebularine
  modified_base 1..3: mod_base = OTHER; note = phosphorothioate linkage
  modified_base 97..100: mod_base = OTHER; note = phosphorothioate linkage

SEQ ID NO: 1955 - RNA, 100 nt, synthetic construct; identical to SEQ ID NO: 1901
  source 1..100: mol_type = other RNA
  modified_base 1: mod_base = OTHER; note = 2'-O-methyl ribonucleotide
  modified_base 2: mod_base = OTHER; note = 2'-O-methyl ribonucleotide
  modified_base 3: mod_base = OTHER; note = 2'-O-methyl ribonucleotide
  modified_base 21: mod_base = OTHER; note = 2'-O-methyl ribonucleotide
  modified_base 28: mod_base = OTHER; note = 2'-O-methyl ribonucleotide
  modified_base 29: mod_base = OTHER; note = 2'-O-methyl ribonucleotide
  modified_base 30: mod_base = OTHER; note = 2'-O-methyl ribonucleotide
  modified_base 31: mod_base = OTHER; note = 2'-O-methyl ribonucleotide
  modified_base 32: mod_base = OTHER; note = 2'-O-methyl ribonucleotide
  modified_base 33: mod_base = OTHER; note = 2'-O-methyl ribonucleotide
  modified_base 34: mod_base = OTHER; note = 2'-O-methyl ribonucleotide
  modified_base 35: mod_base = OTHER; note = 2'-O-methyl ribonucleotide
  modified_base 36: mod_base = OTHER; note = 2'-O-methyl ribonucleotide
  modified_base 37: mod_base = OTHER; note = 2'-O-methyl ribonucleotide
  modified_base 38: mod_base = OTHER; note = 2'-O-methyl ribonucleotide
  modified_base 39: mod_base = OTHER; note = 2'-O-methyl ribonucleotide
  modified_base 40: mod_base = OTHER; note = 2'-O-methyl ribonucleotide
  modified_base 41: mod_base = OTHER; note = 2'-O-methyl ribonucleotide
  modified_base 42: mod_base = OTHER; note = 2'-O-methyl ribonucleotide
  modified_base 46: mod_base = OTHER; note = 2'-O-methyl ribonucleotide
  modified_base 48: mod_base = OTHER; note = 2'-O-methyl ribonucleotide
  modified_base 50: mod_base = OTHER; note = 2'-O-methyl ribonucleotide
  modified_base 52: mod_base = OTHER; note = 2'-O-methyl ribonucleotide
  modified_base 53: mod_base = OTHER; note = 2'-O-methyl ribonucleotide
  modified_base 54: mod_base = OTHER; note = 2'-O-methyl ribonucleotide
  modified_base 55: mod_base = OTHER; note = 2'-O-methyl ribonucleotide
  modified_base 56: mod_base = OTHER; note = 2'-O-methyl ribonucleotide
  modified_base 60: mod_base = OTHER; note = 2'-O-methyl ribonucleotide
  modified_base 61: mod_base = OTHER; note = 2'-O-methyl ribonucleotide
  modified_base 66: mod_base = OTHER; note = 2'-O-methyl ribonucleotide
  modified_base 67: mod_base = OTHER; note = 2'-O-methyl ribonucleotide
  modified_base 70: mod_base = OTHER; note = 2'-O-methyl ribonucleotide
  modified_base 71: mod_base = OTHER; note = 2'-O-methyl ribonucleotide
  modified_base 72: mod_base = OTHER; note = 2'-O-methyl ribonucleotide
  modified_base 73: mod_base = OTHER; note = 2'-O-methyl ribonucleotide
  modified_base 74: mod_base = OTHER; note = 2'-O-methyl ribonucleotide
  modified_base 75: mod_base = OTHER; note = 2'-O-methyl ribonucleotide
  modified_base 76: mod_base = OTHER; note = 2'-O-methyl ribonucleotide
  modified_base 77: mod_base = OTHER; note = 2'-O-methyl ribonucleotide
  modified_base 78: mod_base = OTHER; note = 2'-O-methyl ribonucleotide
  modified_base 79: mod_base = OTHER; note = 2'-O-methyl ribonucleotide
  modified_base 80: mod_base = OTHER; note = 2'-O-methyl ribonucleotide
  modified_base 81: mod_base = OTHER; note = 2'-O-methyl ribonucleotide
  modified_base 83: mod_base = OTHER; note = 2'-O-methyl ribonucleotide
  modified_base 84: mod_base = OTHER; note = 2'-O-methyl ribonucleotide
  modified_base 85: mod_base = OTHER; note = 2'-O-methyl ribonucleotide
  modified_base 86: mod_base = OTHER; note = 2'-O-methyl ribonucleotide
  modified_base 87: mod_base = OTHER; note = 2'-O-methyl ribonucleotide
  modified_base 88: mod_base = OTHER; note = 2'-O-methyl ribonucleotide
  modified_base 89: mod_base = OTHER; note = 2'-O-methyl ribonucleotide
  modified_base 90: mod_base = OTHER; note = 2'-O-methyl ribonucleotide
  modified_base 91: mod_base = OTHER; note = 2'-O-methyl ribonucleotide
  modified_base 92: mod_base = OTHER; note = 2'-O-methyl ribonucleotide
  modified_base 93: mod_base = OTHER; note = 2'-O-methyl ribonucleotide
  modified_base 94: mod_base = OTHER; note = 2'-O-methyl ribonucleotide
  modified_base 95: mod_base = OTHER; note = 2'-O-methyl ribonucleotide
  modified_base 96: mod_base = OTHER; note = 2'-O-methyl ribonucleotide
  modified_base 97: mod_base = OTHER; note = 2'-O-methyl ribonucleotide
  modified_base 98: mod_base = OTHER; note = 2'-O-methyl ribonucleotide
  modified_base 99: mod_base = OTHER; note = 2'-O-methyl ribonucleotide
  modified_base 100: mod_base = OTHER; note = 2'-O-methyl ribonucleotide
  modified_base 57: mod_base = OTHER; note = nebularine
  modified_base 1..3: mod_base = OTHER; note = phosphorothioate linkage
  modified_base 97..100: mod_base = OTHER; note = phosphorothioate linkage

SEQ ID NO: 1956 - RNA, 100 nt, synthetic construct; identical to SEQ ID NO: 1902
  source 1..100: mol_type = other RNA
  modified_base 1: mod_base = OTHER; note = 2'-O-methyl ribonucleotide
  modified_base 2: mod_base = OTHER; note = 2'-O-methyl ribonucleotide
  modified_base 3: mod_base = OTHER; note = 2'-O-methyl ribonucleotide
  modified_base 21: mod_base = OTHER; note = 2'-O-methyl ribonucleotide
  modified_base 28: mod_base = OTHER; note = 2'-O-methyl ribonucleotide
  modified_base 29: mod_base = OTHER; note = 2'-O-methyl ribonucleotide
  modified_base 30: mod_base = OTHER; note = 2'-O-methyl ribonucleotide
  modified_base 31: mod_base = OTHER; note = 2'-O-methyl ribonucleotide
  modified_base 32: mod_base = OTHER; note = 2'-O-methyl ribonucleotide
  modified_base 33: mod_base = OTHER; note = 2'-O-methyl ribonucleotide
  modified_base 34: mod_base = OTHER; note = 2'-O-methyl ribonucleotide
  modified_base 35: mod_base = OTHER; note = 2'-O-methyl ribonucleotide
  modified_base 36: mod_base = OTHER; note = 2'-O-methyl ribonucleotide
  modified_base 37: mod_base = OTHER; note = 2'-O-methyl ribonucleotide
  modified_base 38: mod_base = OTHER; note = 2'-O-methyl ribonucleotide
  modified_base 39: mod_base = OTHER; note = 2'-O-methyl ribonucleotide
  modified_base 40: mod_base = OTHER; note = 2'-O-methyl ribonucleotide
  modified_base 41: mod_base = OTHER; note = 2'-O-methyl ribonucleotide
  modified_base 42: mod_base = OTHER; note = 2'-O-methyl ribonucleotide
  modified_base 46: mod_base = OTHER; note = 2'-O-methyl ribonucleotide
  modified_base 48: mod_base = OTHER; note = 2'-O-methyl ribonucleotide
  modified_base 50: mod_base = OTHER; note = 2'-O-methyl ribonucleotide
  modified_base 52: mod_base = OTHER; note = 2'-O-methyl ribonucleotide
  modified_base 53: mod_base = OTHER; note = 2'-O-methyl ribonucleotide
  modified_base 54: mod_base = OTHER; note = 2'-O-methyl ribonucleotide
  modified_base 55: mod_base = OTHER; note = 2'-O-methyl ribonucleotide
  modified_base 56: mod_base = OTHER; note = 2'-O-methyl ribonucleotide
  modified_base 57: mod_base = OTHER; note = 2'-O-methyl ribonucleotide
  modified_base 60: mod_base = OTHER; note = 2'-O-methyl ribonucleotide
  modified_base 61: mod_base = OTHER; note = 2'-O-methyl ribonucleotide
  modified_base 66: mod_base = OTHER; note = 2'-O-methyl ribonucleotide
  modified_base 67: mod_base = OTHER; note = 2'-O-methyl ribonucleotide
  modified_base 70: mod_base = OTHER; note = 2'-O-methyl ribonucleotide
  modified_base 71: mod_base = OTHER; note = 2'-O-methyl ribonucleotide
  modified_base 72: mod_base = OTHER; note = 2'-O-methyl ribonucleotide
  modified_base 73: mod_base = OTHER; note = 2'-O-methyl ribonucleotide
  modified_base 74: mod_base = OTHER; note = 2'-O-methyl ribonucleotide
  modified_base 75: mod_base = OTHER; note = 2'-O-methyl ribonucleotide
  modified_base 76: mod_base = OTHER; note = 2'-O-methyl ribonucleotide
  modified_base 77: mod_base = OTHER; note = 2'-O-methyl ribonucleotide
  modified_base 78: mod_base = OTHER; note = 2'-O-methyl ribonucleotide
  modified_base 79: mod_base = OTHER; note = 2'-O-methyl ribonucleotide
  modified_base 80: mod_base = OTHER; note = 2'-O-methyl ribonucleotide
  modified_base 81: mod_base = OTHER; note = 2'-O-methyl ribonucleotide
  modified_base 83: mod_base = OTHER; note = 2'-O-methyl ribonucleotide
  modified_base 84: mod_base = OTHER; note = 2'-O-methyl ribonucleotide
  modified_base 85: mod_base = OTHER; note = 2'-O-methyl ribonucleotide
  modified_base 86: mod_base = OTHER; note = 2'-O-methyl ribonucleotide
  modified_base 87: mod_base = OTHER; note = 2'-O-methyl ribonucleotide
  modified_base 88: mod_base = OTHER; note = 2'-O-methyl ribonucleotide
  modified_base 89: mod_base = OTHER; note = 2'-O-methyl ribonucleotide
  modified_base 90: mod_base = OTHER; note = 2'-O-methyl ribonucleotide
  modified_base 91: mod_base = OTHER; note = 2'-O-methyl ribonucleotide
  modified_base 92: mod_base = OTHER; note = 2'-O-methyl ribonucleotide
  modified_base 93: mod_base = OTHER; note = 2'-O-methyl ribonucleotide
  modified_base 94: mod_base = OTHER; note = 2'-O-methyl ribonucleotide
  modified_base 95: mod_base = OTHER; note = 2'-O-methyl ribonucleotide
  modified_base 96: mod_base = OTHER; note = 2'-O-methyl ribonucleotide
  modified_base 97: mod_base = OTHER; note = 2'-O-methyl ribonucleotide
  modified_base 98: mod_base = OTHER; note = 2'-O-methyl ribonucleotide
  modified_base 99: mod_base = OTHER; note = 2'-O-methyl ribonucleotide
  modified_base 100: mod_base = OTHER; note = 2'-O-methyl ribonucleotide
  modified_base 65: mod_base = OTHER; note = nebularine
  modified_base 1..3: mod_base = OTHER; note = phosphorothioate linkage
  modified_base 97..100: mod_base = OTHER; note = phosphorothioate linkage

SEQ ID NO: 1957 - RNA, 100 nt, synthetic construct; identical to SEQ ID NO: 1903
  source 1..100: mol_type = other RNA
  modified_base 1: mod_base = OTHER; note = 2'-O-methyl ribonucleotide
  modified_base 2: mod_base = OTHER; note = 2'-O-methyl ribonucleotide
  modified_base 3: mod_base = OTHER; note = 2'-O-methyl ribonucleotide
  modified_base 21: mod_base = OTHER; note = 2'-O-methyl ribonucleotide
  modified_base 28: mod_base = OTHER; note = 2'-O-methyl ribonucleotide
  modified_base 29: mod_base = OTHER; note = 2'-O-methyl ribonucleotide
  modified_base 30: mod_base = OTHER; note = 2'-O-methyl ribonucleotide
  modified_base 31: mod_base = OTHER; note = 2'-O-methyl ribonucleotide
  modified_base 32: mod_base = OTHER; note = 2'-O-methyl ribonucleotide
  modified_base 33: mod_base = OTHER; note = 2'-O-methyl ribonucleotide
  modified_base 35: mod_base = OTHER; note = 2'-O-methyl ribonucleotide
  modified_base 36: mod_base = OTHER; note = 2'-O-methyl ribonucleotide
  modified_base 37: mod_base = OTHER; note = 2'-O-methyl ribonucleotide
  modified_base 38: mod_base = OTHER; note = 2'-O-methyl ribonucleotide
  modified_base 39: mod_base = OTHER; note = 2'-O-methyl ribonucleotide
  modified_base 40: mod_base = OTHER; note = 2'-O-methyl ribonucleotide
  modified_base 41: mod_base = OTHER; note = 2'-O-methyl ribonucleotide
  modified_base 42: mod_base = OTHER; note = 2'-O-methyl ribonucleotide
  modified_base 46: mod_base = OTHER; note = 2'-O-methyl ribonucleotide
  modified_base 48: mod_base = OTHER; note = 2'-O-methyl ribonucleotide
  modified_base 50: mod_base = OTHER; note = 2'-O-methyl ribonucleotide
  modified_base 52: mod_base = OTHER; note = 2'-O-methyl ribonucleotide
  modified_base 53: mod_base = OTHER; note = 2'-O-methyl ribonucleotide
  modified_base 54: mod_base = OTHER; note = 2'-O-methyl ribonucleotide
  modified_base 55: mod_base = OTHER; note = 2'-O-methyl ribonucleotide
  modified_base 56: mod_base = OTHER; note = 2'-O-methyl ribonucleotide
  modified_base 60: mod_base = OTHER; note = 2'-O-methyl ribonucleotide
  modified_base 61: mod_base = OTHER; note = 2'-O-methyl ribonucleotide
  modified_base 66: mod_base = OTHER; note = 2'-O-methyl ribonucleotide
  modified_base 67: mod_base = OTHER; note = 2'-O-methyl ribonucleotide
  modified_base 70: mod_base = OTHER; note = 2'-O-methyl ribonucleotide
  modified_base 71: mod_base = OTHER; note = 2'-O-methyl ribonucleotide
  modified_base 72: mod_base = OTHER; note = 2'-O-methyl ribonucleotide
  modified_base 73: mod_base = OTHER; note = 2'-O-methyl ribonucleotide
  modified_base 74: mod_base = OTHER; note = 2'-O-methyl ribonucleotide
  modified_base 75: mod_base = OTHER; note = 2'-O-methyl ribonucleotide
  modified_base 76: mod_base = OTHER; note = 2'-O-methyl ribonucleotide
  modified_base 77: mod_base = OTHER; note = 2'-O-methyl ribonucleotide
  modified_base 78: mod_base = OTHER; note = 2'-O-methyl ribonucleotide
  modified_base 79: mod_base = OTHER; note = 2'-O-methyl ribonucleotide
  modified_base 80: mod_base = OTHER; note = 2'-O-methyl ribonucleotide
  modified_base 81: mod_base = OTHER; note = 2'-O-methyl ribonucleotide
  modified_base 83: mod_base = OTHER; note = 2'-O-methyl ribonucleotide
  modified_base 84: mod_base = OTHER; note = 2'-O-methyl ribonucleotide
  modified_base 85: mod_base = OTHER; note = 2'-O-methyl ribonucleotide
  modified_base 86: mod_base = OTHER; note = 2'-O-methyl ribonucleotide
  modified_base 87: mod_base = OTHER; note = 2'-O-methyl ribonucleotide
  modified_base 88: mod_base = OTHER; note = 2'-O-methyl ribonucleotide
  modified_base 89: mod_base = OTHER; note = 2'-O-methyl ribonucleotide
  modified_base 90: mod_base = OTHER; note = 2'-O-methyl ribonucleotide
  modified_base 91: mod_base = OTHER; note = 2'-O-methyl ribonucleotide
  modified_base 92: mod_base = OTHER; note = 2'-O-methyl ribonucleotide
  modified_base 93: mod_base = OTHER; note = 2'-O-methyl ribonucleotide
  modified_base 94: mod_base = OTHER; note = 2'-O-methyl ribonucleotide
  modified_base 95: mod_base = OTHER; note = 2'-O-methyl ribonucleotide
  modified_base 96: mod_base = OTHER; note = 2'-O-methyl ribonucleotide
  modified_base 97: mod_base = OTHER; note = 2'-O-methyl ribonucleotide
  modified_base 98: mod_base = OTHER; note = 2'-O-methyl ribonucleotide
  modified_base 99: mod_base = OTHER; note = 2'-O-methyl ribonucleotide
  modified_base 100: mod_base = OTHER; note = 2'-O-methyl ribonucleotide
  modified_base 34: mod_base = OTHER; note = nebularine
  modified_base 57: mod_base = OTHER; note = nebularine
  modified_base 65: mod_base = OTHER; note = nebularine
  modified_base 1..3: mod_base = OTHER; note = phosphorothioate linkage
  modified_base 97..100: mod_base = OTHER; note = phosphorothioate linkage

SEQ ID NO: 1958 - RNA, 100 nt, synthetic construct; identical to SEQ ID NO: 1904
  source 1..100: mol_type = other RNA
  modified_base 1: mod_base = OTHER; note = 2'-O-methyl ribonucleotide
  modified_base 2: mod_base = OTHER; note = 2'-O-methyl ribonucleotide
  modified_base 3: mod_base = OTHER; note = 2'-O-methyl ribonucleotide
  modified_base 21: mod_base = OTHER; note = 2'-O-methyl ribonucleotide
  modified_base 29: mod_base = OTHER; note = 2'-O-methyl ribonucleotide
  modified_base 30: mod_base = OTHER; note = 2'-O-methyl ribonucleotide
  modified_base 31: mod_base = OTHER; note = 2'-O-methyl ribonucleotide
  modified_base 32: mod_base = OTHER; note = 2'-O-methyl ribonucleotide
  modified_base 33: mod_base = OTHER; note = 2'-O-methyl ribonucleotide
  modified_base 35: mod_base = OTHER; note = 2'-O-methyl ribonucleotide
  modified_base 36: mod_base = OTHER; note = 2'-O-methyl ribonucleotide
  modified_base 37: mod_base = OTHER; note = 2'-O-methyl ribonucleotide
  modified_base 38: mod_base = OTHER; note = 2'-O-methyl ribonucleotide
  modified_base 39: mod_base = OTHER; note = 2'-O-methyl ribonucleotide
  modified_base 40: mod_base = OTHER; note = 2'-O-methyl ribonucleotide
  modified_base 41: mod_base = OTHER; note = 2'-O-methyl ribonucleotide
  modified_base 46: mod_base = OTHER; note = 2'-O-methyl ribonucleotide
  modified_base 48: mod_base = OTHER; note = 2'-O-methyl ribonucleotide
  modified_base 50: mod_base = OTHER; note = 2'-O-methyl ribonucleotide
  modified_base 52: mod_base = OTHER; note = 2'-O-methyl ribonucleotide
  modified_base 53: mod_base = OTHER; note = 2'-O-methyl ribonucleotide
  modified_base 54: mod_base = OTHER; note = 2'-O-methyl ribonucleotide
  modified_base 55: mod_base = OTHER; note = 2'-O-methyl ribonucleotide
  modified_base 56: mod_base = OTHER; note = 2'-O-methyl ribonucleotide
  modified_base 60: mod_base = OTHER; note = 2'-O-methyl ribonucleotide
  modified_base 61: mod_base = OTHER; note = 2'-O-methyl ribonucleotide
  modified_base 66: mod_base = OTHER; note = 2'-O-methyl ribonucleotide
  modified_base 67: mod_base = OTHER; note = 2'-O-methyl ribonucleotide
  modified_base 70: mod_base = OTHER; note = 2'-O-methyl ribonucleotide
  modified_base 71: mod_base = OTHER; note = 2'-O-methyl ribonucleotide
  modified_base 72: mod_base = OTHER; note = 2'-O-methyl ribonucleotide
  modified_base 73: mod_base = OTHER; note = 2'-O-methyl ribonucleotide
  modified_base 74: mod_base = OTHER; note = 2'-O-methyl ribonucleotide
  modified_base 75: mod_base = OTHER; note = 2'-O-methyl ribonucleotide
  modified_base 76: mod_base = OTHER; note = 2'-O-methyl ribonucleotide
  modified_base 77: mod_base = OTHER; note = 2'-O-methyl ribonucleotide
  modified_base 78: mod_base = OTHER; note = 2'-O-methyl ribonucleotide
  modified_base 79: mod_base = OTHER; note = 2'-O-methyl ribonucleotide
  modified_base 80: mod_base = OTHER; note = 2'-O-methyl ribonucleotide
  modified_base 81: mod_base = OTHER; note = 2'-O-methyl ribonucleotide
  modified_base 83: mod_base = OTHER; note = 2'-O-methyl ribonucleotide
  modified_base 84: mod_base = OTHER; note = 2'-O-methyl ribonucleotide
  modified_base 85: mod_base = OTHER; note = 2'-O-methyl ribonucleotide
  modified_base 86: mod_base = OTHER; note = 2'-O-methyl ribonucleotide
  modified_base 87: mod_base = OTHER; note = 2'-O-methyl ribonucleotide
  modified_base 88: mod_base = OTHER; note = 2'-O-methyl ribonucleotide
  modified_base 89: mod_base = OTHER; note = 2'-O-methyl ribonucleotide
  modified_base 90: mod_base = OTHER; note = 2'-O-methyl ribonucleotide
  modified_base 91: mod_base = OTHER; note = 2'-O-methyl ribonucleotide
  modified_base 92: mod_base = OTHER; note = 2'-O-methyl ribonucleotide
  modified_base 93: mod_base = OTHER; note = 2'-O-methyl ribonucleotide
  modified_base 94: mod_base = OTHER; note = 2'-O-methyl ribonucleotide
  modified_base 95: mod_base = OTHER; note = 2'-O-methyl ribonucleotide
  modified_base 96: mod_base = OTHER; note = 2'-O-methyl ribonucleotide
  modified_base 97: mod_base = OTHER; note = 2'-O-methyl ribonucleotide
  modified_base 98: mod_base = OTHER; note = 2'-O-methyl ribonucleotide
  modified_base 99: mod_base = OTHER; note = 2'-O-methyl ribonucleotide
  modified_base 100: mod_base = OTHER; note = 2'-O-methyl ribonucleotide
  modified_base 28: mod_base = OTHER; note = nebularine
  modified_base 34: mod_base = OTHER; note = nebularine
  modified_base 42: mod_base = OTHER; note = nebularine
  modified_base 57: mod_base = OTHER; note = nebularine
  modified_base 65: mod_base = OTHER; note = nebularine
  modified_base 1..3: mod_base = OTHER; note = phosphorothioate linkage
  modified_base 97..100: mod_base = OTHER; note = phosphorothioate linkage

SEQ ID NO: 1959 - RNA, 100 nt, synthetic construct; identical to SEQ ID NO: 1905
  source 1..100: mol_type = other RNA
  modified_base 1: mod_base = OTHER; note = 2'-O-methyl ribonucleotide
  modified_base 2: mod_base = OTHER; note = 2'-O-methyl ribonucleotide
  modified_base 3: mod_base = OTHER; note = 2'-O-methyl ribonucleotide
  modified_base 21: mod_base = OTHER; note = 2'-O-methyl ribonucleotide
  modified_base 28: mod_base = OTHER; note = 2'-O-methyl ribonucleotide
  modified_base 29: mod_base = OTHER; note = 2'-O-methyl ribonucleotide
  modified_base 30: mod_base = OTHER; note = 2'-O-methyl ribonucleotide
  modified_base 31: mod_base = OTHER; note = 2'-O-methyl ribonucleotide
  modified_base 32: mod_base = OTHER; note = 2'-O-methyl ribonucleotide
  modified_base 33: mod_base = OTHER; note = 2'-O-methyl ribonucleotide
  modified_base 35: mod_base = OTHER; note = 2'-O-methyl ribonucleotide
  modified_base 36: mod_base = OTHER; note = 2'-O-methyl ribonucleotide
  modified_base 37: mod_base = OTHER; note = 2'-O-methyl ribonucleotide
  modified_base 38: mod_base = OTHER; note = 2'-O-methyl ribonucleotide
  modified_base 39: mod_base = OTHER; note = 2'-O-methyl ribonucleotide
  modified_base 40: mod_base = OTHER; note = 2'-O-methyl ribonucleotide
  modified_base 41: mod_base = OTHER; note = 2'-O-methyl ribonucleotide
  modified_base 42: mod_base = OTHER; note = 2'-O-methyl ribonucleotide
  modified_base 46: mod_base = OTHER; note = 2'-O-methyl ribonucleotide
  modified_base 48: mod_base = OTHER; note = 2'-O-methyl ribonucleotide
  modified_base 50: mod_base = OTHER; note = 2'-O-methyl ribonucleotide
  modified_base 52: mod_base = OTHER; note = 2'-O-methyl ribonucleotide
  modified_base 53: mod_base = OTHER; note = 2'-O-methyl ribonucleotide
  modified_base 54: mod_base = OTHER; note = 2'-O-methyl ribonucleotide
  modified_base 55: mod_base = OTHER; note = 2'-O-methyl ribonucleotide
  modified_base 56: mod_base = OTHER; note = 2'-O-methyl ribonucleotide
  modified_base 57: mod_base = OTHER; note = 2'-O-methyl ribonucleotide
  modified_base 60: mod_base = OTHER; note = 2'-O-methyl ribonucleotide
  modified_base 61: mod_base = OTHER; note = 2'-O-methyl ribonucleotide
  modified_base 66: mod_base = OTHER; note = 2'-O-methyl ribonucleotide
  modified_base 67: mod_base = OTHER; note = 2'-O-methyl ribonucleotide
  modified_base 70: mod_base = OTHER; note = 2'-O-methyl ribonucleotide
  modified_base 71: mod_base = OTHER; note = 2'-O-methyl ribonucleotide
  modified_base 72: mod_base = OTHER; note = 2'-O-methyl ribonucleotide
  modified_base 73: mod_base = OTHER; note = 2'-O-methyl ribonucleotide
  modified_base 74: mod_base = OTHER; note = 2'-O-methyl ribonucleotide
  modified_base 75: mod_base = OTHER; note = 2'-O-methyl ribonucleotide
  modified_base 76: mod_base = OTHER; note = 2'-O-methyl ribonucleotide
  modified_base 77: mod_base = OTHER; note = 2'-O-methyl ribonucleotide
  modified_base 78: mod_base = OTHER; note = 2'-O-methyl ribonucleotide
  modified_base 79: mod_base = OTHER; note = 2'-O-methyl ribonucleotide
  modified_base 80: mod_base = OTHER; note = 2'-O-methyl ribonucleotide
  modified_base 81: mod_base = OTHER; note = 2'-O-methyl ribonucleotide
  modified_base 83: mod_base = OTHER; note = 2'-O-methyl ribonucleotide
  modified_base 84: mod_base = OTHER; note = 2'-O-methyl ribonucleotide
  modified_base 85: mod_base = OTHER; note = 2'-O-methyl ribonucleotide
  modified_base 86: mod_base = OTHER; note = 2'-O-methyl ribonucleotide
  modified_base 87: mod_base = OTHER; note = 2'-O-methyl ribonucleotide
  modified_base 88: mod_base = OTHER; note = 2'-O-methyl ribonucleotide
  modified_base 89: mod_base = OTHER; note = 2'-O-methyl ribonucleotide
  modified_base 90: mod_base = OTHER; note = 2'-O-methyl ribonucleotide
  modified_base 91: mod_base = OTHER; note = 2'-O-methyl ribonucleotide
  modified_base 92: mod_base = OTHER; note = 2'-O-methyl ribonucleotide
  modified_base 93: mod_base = OTHER; note = 2'-O-methyl ribonucleotide
  modified_base 94: mod_base = OTHER; note = 2'-O-methyl ribonucleotide
  modified_base 95: mod_base = OTHER; note = 2'-O-methyl ribonucleotide
  modified_base 96: mod_base = OTHER; note = 2'-O-methyl ribonucleotide
  modified_base 97: mod_base = OTHER; note = 2'-O-methyl ribonucleotide
  modified_base 98: mod_base = OTHER; note = 2'-O-methyl ribonucleotide
  modified_base 99: mod_base = OTHER; note = 2'-O-methyl ribonucleotide
  modified_base 100: mod_base = OTHER; note = 2'-O-methyl ribonucleotide
  modified_base 9: mod_base = OTHER; note = nebularine
  modified_base 14: mod_base = OTHER; note = nebularine
  modified_base 34: mod_base = OTHER; note = nebularine
  modified_base 1..3: mod_base = OTHER; note = phosphorothioate linkage
  modified_base 97..100: mod_base = OTHER; note = phosphorothioate linkage

SEQ ID NO: 1960 - RNA, 100 nt, synthetic construct; identical to SEQ ID NO: 1906
  source 1..100: mol_type = other RNA
  modified_base 1: mod_base = OTHER; note = 2'-O-methyl ribonucleotide
  modified_base 2: mod_base = OTHER; note = 2'-O-methyl ribonucleotide
  modified_base 3: mod_base = OTHER; note = 2'-O-methyl ribonucleotide
  modified_base 21: mod_base = OTHER; note = 2'-O-methyl ribonucleotide
  modified_base 28: mod_base = OTHER; note = 2'-O-methyl ribonucleotide
  modified_base 29: mod_base = OTHER; note = 2'-O-methyl ribonucleotide
  modified_base 30: mod_base = OTHER; note = 2'-O-methyl ribonucleotide
  modified_base 31: mod_base = OTHER; note = 2'-O-methyl ribonucleotide
  modified_base 32: mod_base = OTHER; note = 2'-O-methyl ribonucleotide
  modified_base 33: mod_base = OTHER; note = 2'-O-methyl ribonucleotide
  modified_base 35: mod_base = OTHER; note = 2'-O-methyl ribonucleotide
  modified_base 36: mod_base = OTHER; note = 2'-O-methyl ribonucleotide
  modified_base 37: mod_base = OTHER; note = 2'-O-methyl ribonucleotide
  modified_base 38: mod_base = OTHER; note = 2'-O-methyl ribonucleotide
  modified_base 39: mod_base = OTHER; note = 2'-O-methyl ribonucleotide
  modified_base 40: mod_base = OTHER; note = 2'-O-methyl ribonucleotide
  modified_base 41: mod_base = OTHER; note = 2'-O-methyl ribonucleotide
  modified_base 42: mod_base = OTHER; note = 2'-O-methyl ribonucleotide
  modified_base 46: mod_base = OTHER; note = 2'-O-methyl ribonucleotide
  modified_base 48: mod_base = OTHER; note = 2'-O-methyl ribonucleotide
  modified_base 50: mod_base = OTHER; note = 2'-O-methyl ribonucleotide
  modified_base 52: mod_base = OTHER; note = 2'-O-methyl ribonucleotide
  modified_base 53: mod_base = OTHER; note = 2'-O-methyl ribonucleotide
  modified_base 54: mod_base = OTHER; note = 2'-O-methyl ribonucleotide
  modified_base 55: mod_base = OTHER; note = 2'-O-methyl ribonucleotide
  modified_base 56: mod_base = OTHER; note = 2'-O-methyl ribonucleotide
  modified_base 60: mod_base = OTHER; note = 2'-O-methyl ribonucleotide
  modified_base 61: mod_base = OTHER; note = 2'-O-methyl ribonucleotide
  modified_base 66: mod_base = OTHER; note = 2'-O-methyl ribonucleotide
  modified_base 67: mod_base = OTHER; note = 2'-O-methyl ribonucleotide
  modified_base 70: mod_base = OTHER; note = 2'-O-methyl ribonucleotide
  modified_base 71: mod_base = OTHER; note = 2'-O-methyl ribonucleotide
  modified_base 72: mod_base = OTHER; note = 2'-O-methyl ribonucleotide
  modified_base 73: mod_base = OTHER; note = 2'-O-methyl ribonucleotide
  modified_base 74: mod_base = OTHER; note = 2'-O-methyl ribonucleotide
  modified_base 75: mod_base = OTHER; note = 2'-O-methyl ribonucleotide
  modified_base 76: mod_base = OTHER; note = 2'-O-methyl ribonucleotide
  modified_base 77: mod_base = OTHER; note = 2'-O-methyl ribonucleotide
  modified_base 78: mod_base = OTHER; note = 2'-O-methyl ribonucleotide
  modified_base 79: mod_base = OTHER; note = 2'-O-methyl ribonucleotide
  modified_base 80: mod_base = OTHER; note = 2'-O-methyl ribonucleotide
  modified_base 81: mod_base = OTHER; note = 2'-O-methyl ribonucleotide
  modified_base 83: mod_base = OTHER; note = 2'-O-methyl ribonucleotide
  modified_base 84: mod_base = OTHER; note = 2'-O-methyl ribonucleotide
  modified_base 85: mod_base = OTHER; note = 2'-O-methyl ribonucleotide
  modified_base 86: mod_base = OTHER; note = 2'-O-methyl ribonucleotide
  modified_base 87: mod_base = OTHER; note = 2'-O-methyl ribonucleotide
  modified_base 88: mod_base = OTHER; note = 2'-O-methyl ribonucleotide
  modified_base 89: mod_base = OTHER; note = 2'-O-methyl ribonucleotide
  modified_base 90: mod_base = OTHER; note = 2'-O-methyl ribonucleotide
  modified_base 91: mod_base = OTHER; note = 2'-O-methyl ribonucleotide
  modified_base 92: mod_base = OTHER; note = 2'-O-methyl ribonucleotide
  modified_base 93: mod_base = OTHER; note = 2'-O-methyl ribonucleotide
  modified_base 94: mod_base = OTHER; note = 2'-O-methyl ribonucleotide
  modified_base 95: mod_base = OTHER; note = 2'-O-methyl ribonucleotide
  modified_base 96: mod_base = OTHER; note = 2'-O-methyl ribonucleotide
  modified_base 97: mod_base = OTHER; note = 2'-O-methyl ribonucleotide
  modified_base 98: mod_base = OTHER; note = 2'-O-methyl ribonucleotide
  modified_base 99: mod_base = OTHER; note = 2'-O-methyl ribonucleotide
  modified_base 100: mod_base = OTHER; note = 2'-O-methyl ribonucleotide
  modified_base 9: mod_base = OTHER; note = nebularine
  modified_base 14: mod_base = OTHER; note = nebularine
  modified_base 34: mod_base = OTHER; note = nebularine
  modified_base 57: mod_base = OTHER; note = nebularine
  modified_base 1..3: mod_base = OTHER; note = phosphorothioate linkage
  modified_base 97..100: mod_base = OTHER; note = phosphorothioate linkage

SEQ ID NO: 1961 - RNA, 100 nt, synthetic construct; identical to SEQ ID NO: 1907
  source 1..100: mol_type = other RNA
  modified_base 1: mod_base = OTHER; note = 2'-O-methyl ribonucleotide
  modified_base 2: mod_base = OTHER; note = 2'-O-methyl ribonucleotide
  modified_base 3: mod_base = OTHER; note = 2'-O-methyl ribonucleotide
  modified_base 21: mod_base = OTHER; note = 2'-O-methyl ribonucleotide
  modified_base 28: mod_base = OTHER; note = 2'-O-methyl ribonucleotide
  modified_base 29: mod_base = OTHER; note = 2'-O-methyl ribonucleotide
  modified_base 30: mod_base = OTHER; note = 2'-O-methyl ribonucleotide
  modified_base 31: mod_base = OTHER; note = 2'-O-methyl ribonucleotide
  modified_base 32: mod_base = OTHER; note = 2'-O-methyl ribonucleotide
  modified_base 33: mod_base = OTHER; note = 2'-O-methyl ribonucleotide
  modified_base 34: mod_base = OTHER; note = 2'-O-methyl ribonucleotide
  modified_base 35: mod_base = OTHER; note = 2'-O-methyl ribonucleotide
  modified_base 36: mod_base = OTHER; note = 2'-O-methyl ribonucleotide
  modified_base 37: mod_base = OTHER; note = 2'-O-methyl ribonucleotide
  modified_base 38: mod_base = OTHER; note = 2'-O-methyl ribonucleotide
  modified_base 39: mod_base = OTHER; note = 2'-O-methyl ribonucleotide
  modified_base 40: mod_base = OTHER; note = 2'-O-methyl ribonucleotide
  modified_base 41: mod_base = OTHER; note = 2'-O-methyl ribonucleotide
  modified_base 42: mod_base = OTHER; note = 2'-O-methyl ribonucleotide
  modified_base 46: mod_base = OTHER; note = 2'-O-methyl ribonucleotide
  modified_base 48: mod_base = OTHER; note = 2'-O-methyl ribonucleotide
  modified_base 50: mod_base = OTHER; note = 2'-O-methyl ribonucleotide
  modified_base 52: mod_base = OTHER; note = 2'-O-methyl ribonucleotide
  modified_base 53: mod_base = OTHER; note = 2'-O-methyl ribonucleotide
  modified_base 54: mod_base = OTHER; note = 2'-O-methyl ribonucleotide
  modified_base 55: mod_base = OTHER; note = 2'-O-methyl ribonucleotide
  modified_base 56: mod_base = OTHER; note = 2'-O-methyl ribonucleotide
  modified_base 57: mod_base = OTHER; note = 2'-O-methyl ribonucleotide
  modified_base 60: mod_base = OTHER; note = 2'-O-methyl ribonucleotide
  modified_base 61: mod_base = OTHER; note = 2'-O-methyl ribonucleotide
  modified_base 66: mod_base = OTHER; note = 2'-O-methyl ribonucleotide
  modified_base 67: mod_base = OTHER; note = 2'-O-methyl ribonucleotide
  modified_base 70: mod_base = OTHER; note = 2'-O-methyl ribonucleotide
  modified_base 71: mod_base = OTHER; note = 2'-O-methyl ribonucleotide
  modified_base 72: mod_base = OTHER; note = 2'-O-methyl ribonucleotide
  modified_base 73: mod_base = OTHER; note = 2'-O-methyl ribonucleotide
  modified_base 74: mod_base = OTHER; note = 2'-O-methyl ribonucleotide
  modified_base 75: mod_base = OTHER; note = 2'-O-methyl ribonucleotide
  modified_base 76: mod_base = OTHER; note = 2'-O-methyl ribonucleotide
  modified_base 77: mod_base = OTHER; note = 2'-O-methyl ribonucleotide
  modified_base 78: mod_base = OTHER; note = 2'-O-methyl ribonucleotide
  modified_base 79: mod_base = OTHER; note = 2'-O-methyl ribonucleotide
  modified_base 80: mod_base = OTHER; note = 2'-O-methyl ribonucleotide
  modified_base 81: mod_base = OTHER; note = 2'-O-methyl ribonucleotide
  modified_base 83: mod_base = OTHER; note = 2'-O-methyl ribonucleotide
  modified_base 84: mod_base = OTHER; note = 2'-O-methyl ribonucleotide
  modified_base 85: mod_base = OTHER; note = 2'-O-methyl ribonucleotide
  modified_base 86: mod_base = OTHER; note = 2'-O-methyl ribonucleotide
  modified_base 87: mod_base = OTHER; note = 2'-O-methyl ribonucleotide
  modified_base 88: mod_base = OTHER; note = 2'-O-methyl ribonucleotide
  modified_base 89: mod_base = OTHER; note = 2'-O-methyl ribonucleotide
  modified_base 90: mod_base = OTHER; note = 2'-O-methyl ribonucleotide
  modified_base 91: mod_base = OTHER; note = 2'-O-methyl ribonucleotide
  modified_base 92: mod_base = OTHER; note = 2'-O-methyl ribonucleotide
  modified_base 93: mod_base = OTHER; note = 2'-O-methyl ribonucleotide
  modified_base 94: mod_base = OTHER; note = 2'-O-methyl ribonucleotide
  modified_base 95: mod_base = OTHER; note = 2'-O-methyl ribonucleotide
  modified_base 96: mod_base = OTHER; note = 2'-O-methyl ribonucleotide
  modified_base 97: mod_base = OTHER; note = 2'-O-methyl ribonucleotide
  modified_base 98: mod_base = OTHER; note = 2'-O-methyl ribonucleotide
  modified_base 99: mod_base = OTHER; note = 2'-O-methyl ribonucleotide
  modified_base 100: mod_base = OTHER; note = 2'-O-methyl ribonucleotide
  modified_base 9: mod_base = OTHER; note = nebularine
  modified_base 14: mod_base = OTHER; note = nebularine
  modified_base 65: mod_base = OTHER; note = nebularine
  modified_base 1..3: mod_base = OTHER; note = phosphorothioate linkage
  modified_base 97..100: mod_base = OTHER; note = phosphorothioate linkage

SEQ ID NO: 1962 - RNA, 100 nt, synthetic construct; identical to SEQ ID NO: 1908
  source 1..100: mol_type = other RNA
  modified_base 1: mod_base = OTHER; note = 2'-O-methyl ribonucleotide
  modified_base 2: mod_base = OTHER; note = 2'-O-methyl ribonucleotide
  modified_base 3: mod_base = OTHER; note = 2'-O-methyl ribonucleotide
  modified_base 21: mod_base = OTHER; note = 2'-O-methyl ribonucleotide
  modified_base 28: mod_base = OTHER; note = 2'-O-methyl ribonucleotide
  modified_base 29: mod_base = OTHER; note = 2'-O-methyl ribonucleotide
  modified_base 30: mod_base = OTHER; note = 2'-O-methyl ribonucleotide
  modified_base 31: mod_base = OTHER; note = 2'-O-methyl ribonucleotide
  modified_base 32: mod_base = OTHER; note = 2'-O-methyl ribonucleotide
  modified_base 33: mod_base = OTHER; note = 2'-O-methyl ribonucleotide
  modified_base 35: mod_base = OTHER; note = 2'-O-methyl ribonucleotide
  modified_base 36: mod_base = OTHER; note = 2'-O-methyl ribonucleotide
  modified_base 37: mod_base = OTHER; note = 2'-O-methyl ribonucleotide
  modified_base 38: mod_base = OTHER; note = 2'-O-methyl ribonucleotide
  modified_base 39: mod_base = OTHER; note = 2'-O-methyl ribonucleotide
  modified_base 40: mod_base = OTHER; note = 2'-O-methyl ribonucleotide
  modified_base 41: mod_base = OTHER; note = 2'-O-methyl ribonucleotide
  modified_base 42: mod_base = OTHER; note = 2'-O-methyl ribonucleotide
  modified_base 46: mod_base = OTHER; note = 2'-O-methyl ribonucleotide
  modified_base 48: mod_base = OTHER; note = 2'-O-methyl ribonucleotide
  modified_base 50: mod_base = OTHER; note = 2'-O-methyl ribonucleotide
  modified_base 52: mod_base = OTHER; note = 2'-O-methyl ribonucleotide
  modified_base 53: mod_base = OTHER; note = 2'-O-methyl ribonucleotide
  modified_base 54: mod_base = OTHER; note = 2'-O-methyl ribonucleotide
  modified_base 55: mod_base = OTHER; note = 2'-O-methyl ribonucleotide
  modified_base 56: mod_base = OTHER; note = 2'-O-methyl ribonucleotide
  modified_base 60: mod_base = OTHER; note = 2'-O-methyl ribonucleotide
  modified_base 61: mod_base = OTHER; note = 2'-O-methyl ribonucleotide
  modified_base 66: mod_base = OTHER; note = 2'-O-methyl ribonucleotide
  modified_base 67: mod_base = OTHER; note = 2'-O-methyl ribonucleotide
  modified_base 70: mod_base = OTHER; note = 2'-O-methyl ribonucleotide
  modified_base 71: mod_base = OTHER; note = 2'-O-methyl ribonucleotide
  modified_base 72: mod_base = OTHER; note = 2'-O-methyl ribonucleotide
  modified_base 73: mod_base = OTHER; note = 2'-O-methyl ribonucleotide
  modified_base 74: mod_base = OTHER; note = 2'-O-methyl ribonucleotide
  modified_base 75: mod_base = OTHER; note = 2'-O-methyl ribonucleotide
  modified_base 76: mod_base = OTHER; note = 2'-O-methyl ribonucleotide
  modified_base 77: mod_base = OTHER; note = 2'-O-methyl ribonucleotide
  modified_base 78: mod_base = OTHER; note = 2'-O-methyl ribonucleotide
  modified_base 79: mod_base = OTHER; note = 2'-O-methyl ribonucleotide
  modified_base 80: mod_base = OTHER; note = 2'-O-methyl ribonucleotide
  modified_base 81: mod_base = OTHER; note = 2'-O-methyl ribonucleotide
  modified_base 83: mod_base = OTHER; note = 2'-O-methyl ribonucleotide
  modified_base 84: mod_base = OTHER; note = 2'-O-methyl ribonucleotide
  modified_base 85: mod_base = OTHER; note = 2'-O-methyl ribonucleotide
  modified_base 86: mod_base = OTHER; note = 2'-O-methyl ribonucleotide
  modified_base 87: mod_base = OTHER; note = 2'-O-methyl ribonucleotide
  modified_base 88: mod_base = OTHER; note = 2'-O-methyl ribonucleotide
  modified_base 89: mod_base = OTHER; note = 2'-O-methyl ribonucleotide
  modified_base 90: mod_base = OTHER; note = 2'-O-methyl ribonucleotide
  modified_base 91: mod_base = OTHER; note = 2'-O-methyl ribonucleotide
  modified_base 92: mod_base = OTHER; note = 2'-O-methyl ribonucleotide
  modified_base 93: mod_base = OTHER; note = 2'-O-methyl ribonucleotide
  modified_base 94: mod_base = OTHER; note = 2'-O-methyl ribonucleotide
  modified_base 95: mod_base = OTHER; note = 2'-O-methyl ribonucleotide
  modified_base 96: mod_base = OTHER; note = 2'-O-methyl ribonucleotide
  modified_base 97: mod_base = OTHER; note = 2'-O-methyl ribonucleotide
  modified_base 98: mod_base = OTHER; note = 2'-O-methyl ribonucleotide
  modified_base 99: mod_base = OTHER; note = 2'-O-methyl ribonucleotide
  modified_base 100: mod_base = OTHER; note = 2'-O-methyl ribonucleotide
  modified_base 9: mod_base = OTHER; note = nebularine
  modified_base 14: mod_base = OTHER; note = nebularine
  modified_base 34: mod_base = OTHER; note = nebularine
  modified_base 57: mod_base = OTHER; note = nebularine
  modified_base 65: mod_base = OTHER; note = nebularine
  modified_base 1..3: mod_base = OTHER; note = phosphorothioate linkage
  modified_base 97..100: mod_base = OTHER; note = phosphorothioate linkage

SEQ ID NO: 1963 - RNA, 100 nt, synthetic construct; identical to SEQ ID NO: 1909
  source 1..100: mol_type = other RNA
  modified_base 1: mod_base = OTHER; note = 2'-O-methyl ribonucleotide
  modified_base 2: mod_base = OTHER; note = 2'-O-methyl ribonucleotide
  modified_base 3: mod_base = OTHER; note = 2'-O-methyl ribonucleotide
  modified_base 21: mod_base = OTHER; note = 2'-O-methyl ribonucleotide
  modified_base 29: mod_base = OTHER; note = 2'-O-methyl ribonucleotide
  modified_base 30: mod_base = OTHER; note = 2'-O-methyl ribonucleotide
  modified_base 31: mod_base = OTHER; note = 2'-O-methyl ribonucleotide
  modified_base 32: mod_base = OTHER; note = 2'-O-methyl ribonucleotide
  modified_base 33: mod_base = OTHER; note = 2'-O-methyl ribonucleotide
  modified_base 35: mod_base = OTHER; note = 2'-O-methyl ribonucleotide
  modified_base 36: mod_base = OTHER; note = 2'-O-methyl ribonucleotide
  modified_base 37: mod_base = OTHER; note = 2'-O-methyl ribonucleotide
  modified_base 38: mod_base = OTHER; note = 2'-O-methyl ribonucleotide
  modified_base 39: mod_base = OTHER; note = 2'-O-methyl ribonucleotide
  modified_base 40: mod_base = OTHER; note = 2'-O-methyl ribonucleotide
  modified_base 41: mod_base = OTHER; note = 2'-O-methyl ribonucleotide
  modified_base 46: mod_base = OTHER; note = 2'-O-methyl ribonucleotide
  modified_base 48: mod_base = OTHER; note = 2'-O-methyl ribonucleotide
  modified_base 50: mod_base = OTHER; note = 2'-O-methyl ribonucleotide
  modified_base 52: mod_base = OTHER; note = 2'-O-methyl ribonucleotide
  modified_base 53: mod_base = OTHER; note = 2'-O-methyl ribonucleotide
  modified_base 54: mod_base = OTHER; note = 2'-O-methyl ribonucleotide
  modified_base 55: mod_base = OTHER; note = 2'-O-methyl ribonucleotide
  modified_base 56: mod_base = OTHER; note = 2'-O-methyl ribonucleotide
  modified_base 60: mod_base = OTHER; note = 2'-O-methyl ribonucleotide
  modified_base 61: mod_base = OTHER; note = 2'-O-methyl ribonucleotide
  modified_base 66: mod_base = OTHER; note = 2'-O-methyl ribonucleotide
  modified_base 67: mod_base = OTHER; note = 2'-O-methyl ribonucleotide
  modified_base 70: mod_base = OTHER; note = 2'-O-methyl ribonucleotide
  modified_base 71: mod_base = OTHER; note = 2'-O-methyl ribonucleotide
  modified_base 72: mod_base = OTHER; note = 2'-O-methyl ribonucleotide
  modified_base 73: mod_base = OTHER; note = 2'-O-methyl ribonucleotide
  modified_base 74: mod_base = OTHER; note = 2'-O-methyl ribonucleotide
  modified_base 75: mod_base = OTHER; note = 2'-O-methyl ribonucleotide
  modified_base 76: mod_base = OTHER; note = 2'-O-methyl ribonucleotide
  modified_base 77: mod_base = OTHER; note = 2'-O-methyl ribonucleotide
  modified_base 78: mod_base = OTHER; note = 2'-O-methyl ribonucleotide
  modified_base 79: mod_base = OTHER; note = 2'-O-methyl ribonucleotide
  modified_base 80: mod_base = OTHER; note = 2'-O-methyl ribonucleotide
  modified_base 81: mod_base = OTHER; note = 2'-O-methyl ribonucleotide
  modified_base 83: mod_base = OTHER; note = 2'-O-methyl ribonucleotide
  modified_base 84: mod_base = OTHER; note = 2'-O-methyl ribonucleotide
  modified_base 85: mod_base = OTHER; note = 2'-O-methyl ribonucleotide
  modified_base 86: mod_base = OTHER; note = 2'-O-methyl ribonucleotide
  modified_base 87: mod_base = OTHER; note = 2'-O-methyl ribonucleotide
  modified_base 88: mod_base = OTHER; note = 2'-O-methyl ribonucleotide
  modified_base 89: mod_base = OTHER; note = 2'-O-methyl ribonucleotide
  modified_base 90: mod_base = OTHER; note = 2'-O-methyl ribonucleotide
  modified_base 91: mod_base = OTHER; note = 2'-O-methyl ribonucleotide
  modified_base 92: mod_base = OTHER; note = 2'-O-methyl ribonucleotide
  modified_base 93: mod_base = OTHER; note = 2'-O-methyl ribonucleotide
  modified_base 94: mod_base = OTHER; note = 2'-O-methyl ribonucleotide
  modified_base 95: mod_base = OTHER; note = 2'-O-methyl ribonucleotide
  modified_base 96: mod_base = OTHER; note = 2'-O-methyl ribonucleotide
  modified_base 97: mod_base = OTHER; note = 2'-O-methyl ribonucleotide
  modified_base 98: mod_base = OTHER; note = 2'-O-methyl ribonucleotide
  modified_base 99: mod_base = OTHER; note = 2'-O-methyl ribonucleotide
  modified_base 100: mod_base = OTHER; note = 2'-O-methyl ribonucleotide
  modified_base 9: mod_base = OTHER; note = nebularine
  modified_base 14: mod_base = OTHER; note = nebularine
  modified_base 28: mod_base = OTHER; note = nebularine
  modified_base 34: mod_base = OTHER; note = nebularine
  modified_base 42: mod_base = OTHER; note = nebularine
  modified_base 57: mod_base = OTHER; note = nebularine
  modified_base 65: mod_base = OTHER; note = nebularine
  modified_base 1..3: mod_base = OTHER; note = phosphorothioate linkage
  modified_base 97..100: mod_base = OTHER; note = phosphorothioate linkage

SEQ ID NO: 1964 - RNA, 100 nt, synthetic construct; identical to SEQ ID NO: 1910
  source 1..100: mol_type = other RNA
  modified_base 1: mod_base = OTHER; note = 2'-O-methyl ribonucleotide
  modified_base 2: mod_base = OTHER; note = 2'-O-methyl ribonucleotide
  modified_base 3: mod_base = OTHER; note = 2'-O-methyl ribonucleotide
  modified_base 21: mod_base = OTHER; note = 2'-O-methyl ribonucleotide
  modified_base 28: mod_base = OTHER; note = 2'-O-methyl ribonucleotide
  modified_base 29: mod_base = OTHER; note = 2'-O-methyl ribonucleotide
  modified_base 30: mod_base = OTHER; note = 2'-O-methyl ribonucleotide
  modified_base 31: mod_base = OTHER; note = 2'-O-methyl ribonucleotide
  modified_base 32: mod_base = OTHER; note = 2'-O-methyl ribonucleotide
  modified_base 33: mod_base = OTHER; note = 2'-O-methyl ribonucleotide
  modified_base 35: mod_base = OTHER; note = 2'-O-methyl ribonucleotide
  modified_base 36: mod_base = OTHER; note = 2'-O-methyl ribonucleotide
  modified_base 37: mod_base = OTHER; note = 2'-O-methyl ribonucleotide
  modified_base 38: mod_base = OTHER; note = 2'-O-methyl ribonucleotide
  modified_base 39: mod_base = OTHER; note = 2'-O-methyl ribonucleotide
  modified_base 40: mod_base = OTHER; note = 2'-O-methyl ribonucleotide
  modified_base 41: mod_base = OTHER; note = 2'-O-methyl ribonucleotide
  modified_base 42: mod_base = OTHER; note = 2'-O-methyl ribonucleotide
  modified_base 46: mod_base = OTHER; note = 2'-O-methyl ribonucleotide
  modified_base 48: mod_base = OTHER; note = 2'-O-methyl ribonucleotide
  modified_base 50: mod_base = OTHER; note = 2'-O-methyl ribonucleotide
  modified_base 52: mod_base = OTHER; note = 2'-O-methyl ribonucleotide
  modified_base 53: mod_base = OTHER; note = 2'-O-methyl ribonucleotide
  modified_base 54: mod_base = OTHER; note = 2'-O-methyl ribonucleotide
  modified_base 55: mod_base = OTHER; note = 2'-O-methyl ribonucleotide
  modified_base 56: mod_base = OTHER; note = 2'-O-methyl ribonucleotide
  modified_base 60: mod_base = OTHER; note = 2'-O-methyl ribonucleotide
  modified_base 61: mod_base = OTHER; note = 2'-O-methyl ribonucleotide
  modified_base 66: mod_base = OTHER; note = 2'-O-methyl ribonucleotide
  modified_base 67: mod_base = OTHER; note = 2'-O-methyl ribonucleotide
  modified_base 70: mod_base = OTHER; note = 2'-O-methyl ribonucleotide
  modified_base 71: mod_base = OTHER; note = 2'-O-methyl ribonucleotide
  modified_base 72: mod_base = OTHER; note = 2'-O-methyl ribonucleotide
  modified_base 73: mod_base = OTHER; note = 2'-O-methyl ribonucleotide
  modified_base 74: mod_base = OTHER; note = 2'-O-methyl ribonucleotide
  modified_base 75: mod_base = OTHER; note = 2'-O-methyl ribonucleotide
  modified_base 76: mod_base = OTHER; note = 2'-O-methyl ribonucleotide
  modified_base 77: mod_base = OTHER; note = 2'-O-methyl ribonucleotide
  modified_base 78: mod_base = OTHER; note = 2'-O-methyl ribonucleotide
  modified_base 79: mod_base = OTHER; note = 2'-O-methyl ribonucleotide
  modified_base 80: mod_base = OTHER; note = 2'-O-methyl ribonucleotide
  modified_base 81: mod_base = OTHER; note = 2'-O-methyl ribonucleotide
  modified_base 83: mod_base = OTHER; note = 2'-O-methyl ribonucleotide
  modified_base 84: mod_base = OTHER; note = 2'-O-methyl ribonucleotide
  modified_base 85: mod_base = OTHER; note = 2'-O-methyl ribonucleotide
  modified_base 86: mod_base = OTHER; note = 2'-O-methyl ribonucleotide
  modified_base 87: mod_base = OTHER; note = 2'-O-methyl ribonucleotide
  modified_base 88: mod_base = OTHER; note = 2'-O-methyl ribonucleotide
  modified_base 89: mod_base = OTHER; note = 2'-O-methyl ribonucleotide
  modified_base 90: mod_base = OTHER; note = 2'-O-methyl ribonucleotide
  modified_base 91: mod_base = OTHER; note = 2'-O-methyl ribonucleotide
  modified_base 92: mod_base = OTHER; note = 2'-O-methyl ribonucleotide
  modified_base 93: mod_base = OTHER; note = 2'-O-methyl ribonucleotide
  modified_base 94: mod_base = OTHER; note = 2'-O-methyl ribonucleotide
  modified_base 95: mod_base = OTHER; note = 2'-O-methyl ribonucleotide
  modified_base 96: mod_base = OTHER; note = 2'-O-methyl ribonucleotide
  modified_base 97: mod_base = OTHER; note = 2'-O-methyl ribonucleotide
  modified_base 98: mod_base = OTHER; note = 2'-O-methyl ribonucleotide
  modified_base 99: mod_base = OTHER; note = 2'-O-methyl ribonucleotide
  modified_base 100: mod_base = OTHER; note = 2'-O-methyl ribonucleotide
  modified_base 9: mod_base = OTHER; note = nebularine
  modified_base 34: mod_base = OTHER; note = nebularine
  modified_base 57: mod_base = OTHER; note = nebularine
  modified_base 1..3: mod_base = OTHER; note = phosphorothioate linkage
  modified_base 97..100: mod_base = OTHER; note = phosphorothioate linkage

SEQ ID NO: 1965 - RNA, 100 nt, synthetic construct; identical to SEQ ID NO: 1911
  source 1..100: mol_type = other RNA
  modified_base 1: mod_base = OTHER; note = 2'-O-methyl ribonucleotide
  modified_base 2: mod_base = OTHER; note = 2'-O-methyl ribonucleotide
  modified_base 3: mod_base = OTHER; note = 2'-O-methyl ribonucleotide
  modified_base 21: mod_base = OTHER; note = 2'-O-methyl ribonucleotide
  modified_base 28: mod_base = OTHER; note = 2'-O-methyl ribonucleotide
  modified_base 29: mod_base = OTHER; note = 2'-O-methyl ribonucleotide
  modified_base 30: mod_base = OTHER; note = 2'-O-methyl ribonucleotide
  modified_base 31: mod_base = OTHER; note = 2'-O-methyl ribonucleotide
  modified_base 32: mod_base = OTHER; note = 2'-O-methyl ribonucleotide
  modified_base 33: mod_base = OTHER; note = 2'-O-methyl ribonucleotide
  modified_base 34: mod_base = OTHER; note = 2'-O-methyl ribonucleotide
  modified_base 35: mod_base = OTHER; note = 2'-O-methyl ribonucleotide
  modified_base 36: mod_base = OTHER; note = 2'-O-methyl ribonucleotide
  modified_base 37: mod_base = OTHER; note = 2'-O-methyl ribonucleotide
  modified_base 38: mod_base = OTHER; note = 2'-O-methyl ribonucleotide
  modified_base 39: mod_base = OTHER; note = 2'-O-methyl ribonucleotide
  modified_base 40: mod_base = OTHER; note = 2'-O-methyl ribonucleotide
  modified_base 41: mod_base = OTHER; note = 2'-O-methyl ribonucleotide
  modified_base 42: mod_base = OTHER; note = 2'-O-methyl ribonucleotide
  modified_base 46: mod_base = OTHER; note = 2'-O-methyl ribonucleotide
  modified_base 48: mod_base = OTHER; note = 2'-O-methyl ribonucleotide
  modified_base 50: mod_base = OTHER; note = 2'-O-methyl ribonucleotide
  modified_base 52: mod_base = OTHER; note = 2'-O-methyl ribonucleotide
  modified_base 53: mod_base = OTHER; note = 2'-O-methyl ribonucleotide
  modified_base 54: mod_base = OTHER; note = 2'-O-methyl ribonucleotide
  modified_base 55: mod_base = OTHER; note = 2'-O-methyl ribonucleotide
  modified_base 56: mod_base = OTHER; note = 2'-O-methyl ribonucleotide
  modified_base 60: mod_base = OTHER; note = 2'-O-methyl ribonucleotide
  modified_base 61: mod_base = OTHER; note = 2'-O-methyl ribonucleotide
  modified_base 66: mod_base = OTHER; note = 2'-O-methyl ribonucleotide
  modified_base 67: mod_base = OTHER; note = 2'-O-methyl ribonucleotide
  modified_base 70: mod_base = OTHER; note = 2'-O-methyl ribonucleotide
  modified_base 71: mod_base = OTHER; note = 2'-O-methyl ribonucleotide
  modified_base 72: mod_base = OTHER; note = 2'-O-methyl ribonucleotide
  modified_base 73: mod_base = OTHER; note = 2'-O-methyl ribonucleotide
  modified_base 74: mod_base = OTHER; note = 2'-O-methyl ribonucleotide
  modified_base 75: mod_base = OTHER; note = 2'-O-methyl ribonucleotide
  modified_base 76: mod_base = OTHER; note = 2'-O-methyl ribonucleotide
  modified_base 77: mod_base = OTHER; note = 2'-O-methyl ribonucleotide
  modified_base 78: mod_base = OTHER; note = 2'-O-methyl ribonucleotide
  modified_base 79: mod_base = OTHER; note = 2'-O-methyl ribonucleotide
  modified_base 80: mod_base = OTHER; note = 2'-O-methyl ribonucleotide
  modified_base 81: mod_base = OTHER; note = 2'-O-methyl ribonucleotide
  modified_base 83: mod_base = OTHER; note = 2'-O-methyl ribonucleotide
  modified_base 84: mod_base = OTHER; note = 2'-O-methyl ribonucleotide
  modified_base 85: mod_base = OTHER; note = 2'-O-methyl ribonucleotide
  modified_base 86: mod_base = OTHER; note = 2'-O-methyl ribonucleotide
  modified_base 87: mod_base = OTHER; note = 2'-O-methyl ribonucleotide
  modified_base 88: mod_base = OTHER; note = 2'-O-methyl ribonucleotide
  modified_base 89: mod_base = OTHER; note = 2'-O-methyl ribonucleotide
  modified_base 90: mod_base = OTHER; note = 2'-O-methyl ribonucleotide
  modified_base 91: mod_base = OTHER; note = 2'-O-methyl ribonucleotide
  modified_base 92: mod_base = OTHER; note = 2'-O-methyl ribonucleotide
  modified_base 93: mod_base = OTHER; note = 2'-O-methyl ribonucleotide
  modified_base 94: mod_base = OTHER; note = 2'-O-methyl ribonucleotide
  modified_base 95: mod_base = OTHER; note = 2'-O-methyl ribonucleotide
  modified_base 96: mod_base = OTHER; note = 2'-O-methyl ribonucleotide
  modified_base 97: mod_base = OTHER; note = 2'-O-methyl ribonucleotide
  modified_base 98: mod_base = OTHER; note = 2'-O-methyl ribonucleotide
  modified_base 99: mod_base = OTHER; note = 2'-O-methyl ribonucleotide
  modified_base 100: mod_base = OTHER; note = 2'-O-methyl ribonucleotide
  modified_base 9: mod_base = OTHER; note = nebularine
  modified_base 57: mod_base = OTHER; note = nebularine
  modified_base 1..3: mod_base = OTHER; note = phosphorothioate linkage
  modified_base 97..100: mod_base = OTHER; note = phosphorothioate linkage

SEQ ID NO: 1966 - RNA, 100 nt, synthetic construct; identical to SEQ ID NO: 1912
  source 1..100: mol_type = other RNA
  modified_base 1: mod_base = OTHER; note = 2'-O-methyl ribonucleotide
  modified_base 2: mod_base = OTHER; note = 2'-O-methyl ribonucleotide
  modified_base 3: mod_base = OTHER; note = 2'-O-methyl ribonucleotide
  modified_base 21: mod_base = OTHER; note = 2'-O-methyl ribonucleotide
  modified_base 28: mod_base = OTHER; note = 2'-O-methyl ribonucleotide
  modified_base 29: mod_base = OTHER; note = 2'-O-methyl ribonucleotide
  modified_base 30: mod_base = OTHER; note = 2'-O-methyl ribonucleotide
  modified_base 31: mod_base = OTHER; note = 2'-O-methyl ribonucleotide
  modified_base 32: mod_base = OTHER; note = 2'-O-methyl ribonucleotide
  modified_base 33: mod_base = OTHER; note = 2'-O-methyl ribonucleotide
  modified_base 34: mod_base = OTHER; note = 2'-O-methyl ribonucleotide
  modified_base 35: mod_base = OTHER; note = 2'-O-methyl ribonucleotide
  modified_base 36: mod_base = OTHER; note = 2'-O-methyl ribonucleotide
  modified_base 37: mod_base = OTHER; note = 2'-O-methyl ribonucleotide
  modified_base 38: mod_base = OTHER; note = 2'-O-methyl ribonucleotide
  modified_base 39: mod_base = OTHER; note = 2'-O-methyl ribonucleotide
  modified_base 40: mod_base = OTHER; note = 2'-O-methyl ribonucleotide
  modified_base 41: mod_base = OTHER; note = 2'-O-methyl ribonucleotide
  modified_base 42: mod_base = OTHER; note = 2'-O-methyl ribonucleotide
  modified_base 46: mod_base = OTHER; note = 2'-O-methyl ribonucleotide
  modified_base 48: mod_base = OTHER; note = 2'-O-methyl ribonucleotide
  modified_base 50: mod_base = OTHER; note = 2'-O-methyl ribonucleotide
  modified_base 52: mod_base = OTHER; note = 2'-O-methyl ribonucleotide
  modified_base 53: mod_base = OTHER; note = 2'-O-methyl ribonucleotide
  modified_base 54: mod_base = OTHER; note = 2'-O-methyl ribonucleotide
  modified_base 55: mod_base = OTHER; note = 2'-O-methyl ribonucleotide
  modified_base 56: mod_base = OTHER; note = 2'-O-methyl ribonucleotide
  modified_base 57: mod_base = OTHER; note = 2'-O-methyl ribonucleotide
  modified_base 60: mod_base = OTHER; note = 2'-O-methyl ribonucleotide
  modified_base 61: mod_base = OTHER; note = 2'-O-methyl ribonucleotide
  modified_base 66: mod_base = OTHER; note = 2'-O-methyl ribonucleotide
  modified_base 67: mod_base = OTHER; note = 2'-O-methyl ribonucleotide
  modified_base 70: mod_base = OTHER; note = 2'-O-methyl ribonucleotide
  modified_base 71: mod_base = OTHER; note = 2'-O-methyl ribonucleotide
  modified_base 72: mod_base = OTHER; note = 2'-O-methyl ribonucleotide
  modified_base 73: mod_base = OTHER; note = 2'-O-methyl ribonucleotide
  modified_base 74: mod_base = OTHER; note = 2'-O-methyl ribonucleotide
  modified_base 75: mod_base = OTHER; note = 2'-O-methyl ribonucleotide
  modified_base 76: mod_base = OTHER; note = 2'-O-methyl ribonucleotide
  modified_base 77: mod_base = OTHER; note = 2'-O-methyl ribonucleotide
  modified_base 78: mod_base = OTHER; note = 2'-O-methyl ribonucleotide
  modified_base 79: mod_base = OTHER; note = 2'-O-methyl ribonucleotide
  modified_base 80: mod_base = OTHER; note = 2'-O-methyl ribonucleotide
  modified_base 81: mod_base = OTHER; note = 2'-O-methyl ribonucleotide
  modified_base 83: mod_base = OTHER; note = 2'-O-methyl ribonucleotide
  modified_base 84: mod_base = OTHER; note = 2'-O-methyl ribonucleotide
  modified_base 85: mod_base = OTHER; note = 2'-O-methyl ribonucleotide
  modified_base 86: mod_base = OTHER; note = 2'-O-methyl ribonucleotide
  modified_base 87: mod_base = OTHER; note = 2'-O-methyl ribonucleotide
  modified_base 88: mod_base = OTHER; note = 2'-O-methyl ribonucleotide
  modified_base 89: mod_base = OTHER; note = 2'-O-methyl ribonucleotide
  modified_base 90: mod_base = OTHER; note = 2'-O-methyl ribonucleotide
  modified_base 91: mod_base = OTHER; note = 2'-O-methyl ribonucleotide
  modified_base 92: mod_base = OTHER; note = 2'-O-methyl ribonucleotide
  modified_base 93: mod_base = OTHER; note = 2'-O-methyl ribonucleotide
  modified_base 94: mod_base = OTHER; note = 2'-O-methyl ribonucleotide
  modified_base 95: mod_base = OTHER; note = 2'-O-methyl ribonucleotide
  modified_base 96: mod_base = OTHER; note = 2'-O-methyl ribonucleotide
  modified_base 97: mod_base = OTHER; note = 2'-O-methyl ribonucleotide
  modified_base 98: mod_base = OTHER; note = 2'-O-methyl ribonucleotide
  modified_base 99: mod_base = OTHER; note = 2'-O-methyl ribonucleotide
  modified_base 100: mod_base = OTHER; note = 2'-O-methyl ribonucleotide
  modified_base 9: mod_base = OTHER; note = nebularine
  modified_base 65: mod_base = OTHER; note = nebularine
  modified_base 1..3: mod_base = OTHER; note = phosphorothioate linkage
  modified_base 97..100: mod_base = OTHER; note = phosphorothioate linkage

SEQ ID NO: 1967 - RNA, 100 nt, synthetic construct; identical to SEQ ID NO: 1913
  source 1..100: mol_type = other RNA
  modified_base 1: mod_base = OTHER; note = 2'-O-methyl ribonucleotide
  modified_base 2: mod_base = OTHER; note = 2'-O-methyl ribonucleotide
  modified_base 3: mod_base = OTHER; note = 2'-O-methyl ribonucleotide
  modified_base 21: mod_base = OTHER; note = 2'-O-methyl ribonucleotide
  modified_base 28: mod_base = OTHER; note = 2'-O-methyl ribonucleotide
  modified_base 29: mod_base = OTHER; note = 2'-O-methyl ribonucleotide
  modified_base 30: mod_base = OTHER; note = 2'-O-methyl ribonucleotide
  modified_base 31: mod_base = OTHER; note = 2'-O-methyl ribonucleotide
  modified_base 32: mod_base = OTHER; note = 2'-O-methyl ribonucleotide
  modified_base 33: mod_base = OTHER; note = 2'-O-methyl ribonucleotide
  modified_base 35: mod_base = OTHER; note = 2'-O-methyl ribonucleotide
  modified_base 36: mod_base = OTHER; note = 2'-O-methyl ribonucleotide
  modified_base 37: mod_base = OTHER; note = 2'-O-methyl ribonucleotide
  modified_base 38: mod_base = OTHER; note = 2'-O-methyl ribonucleotide
  modified_base 39: mod_base = OTHER; note = 2'-O-methyl ribonucleotide
  modified_base 40: mod_base = OTHER; note = 2'-O-methyl ribonucleotide
  modified_base 41: mod_base = OTHER; note = 2'-O-methyl ribonucleotide
  modified_base 42: mod_base = OTHER; note = 2'-O-methyl ribonucleotide
  modified_base 46: mod_base = OTHER; note = 2'-O-methyl ribonucleotide
  modified_base 48: mod_base = OTHER; note = 2'-O-methyl ribonucleotide
  modified_base 50: mod_base = OTHER; note = 2'-O-methyl ribonucleotide
  modified_base 52: mod_base = OTHER; note = 2'-O-methyl ribonucleotide
  modified_base 53: mod_base = OTHER; note = 2'-O-methyl ribonucleotide
  modified_base 54: mod_base = OTHER; note = 2'-O-methyl ribonucleotide
  modified_base 55: mod_base = OTHER; note = 2'-O-methyl ribonucleotide
  modified_base 56: mod_base = OTHER; note = 2'-O-methyl ribonucleotide
  modified_base 60: mod_base = OTHER; note = 2'-O-methyl ribonucleotide
  modified_base 61: mod_base = OTHER; note = 2'-O-methyl ribonucleotide
  modified_base 66: mod_base = OTHER; note = 2'-O-methyl ribonucleotide
  modified_base 67: mod_base = OTHER; note = 2'-O-methyl ribonucleotide
  modified_base 70: mod_base = OTHER; note = 2'-O-methyl ribonucleotide
  modified_base 71: mod_base = OTHER; note = 2'-O-methyl ribonucleotide
  modified_base 72: mod_base = OTHER; note = 2'-O-methyl ribonucleotide
  modified_base 73: mod_base = OTHER; note = 2'-O-methyl ribonucleotide
  modified_base 74: mod_base = OTHER; note = 2'-O-methyl ribonucleotide
  modified_base 75: mod_base = OTHER; note = 2'-O-methyl ribonucleotide
  modified_base 76: mod_base = OTHER; note = 2'-O-methyl ribonucleotide
  modified_base 77: mod_base = OTHER; note = 2'-O-methyl ribonucleotide
  modified_base 78: mod_base = OTHER; note = 2'-O-methyl ribonucleotide
  modified_base 79: mod_base = OTHER; note = 2'-O-methyl ribonucleotide
  modified_base 80: mod_base = OTHER; note = 2'-O-methyl ribonucleotide
  modified_base 81: mod_base = OTHER; note = 2'-O-methyl ribonucleotide
  modified_base 83: mod_base = OTHER; note = 2'-O-methyl ribonucleotide
  modified_base 84: mod_base = OTHER; note = 2'-O-methyl ribonucleotide
  modified_base 85: mod_base = OTHER; note = 2'-O-methyl ribonucleotide
  modified_base 86: mod_base = OTHER; note = 2'-O-methyl ribonucleotide
  modified_base 87: mod_base = OTHER; note = 2'-O-methyl ribonucleotide
  modified_base 88: mod_base = OTHER; note = 2'-O-methyl ribonucleotide
  modified_base 89: mod_base = OTHER; note = 2'-O-methyl ribonucleotide
  modified_base 90: mod_base = OTHER; note = 2'-O-methyl ribonucleotide
  modified_base 91: mod_base = OTHER; note = 2'-O-methyl ribonucleotide
  modified_base 92: mod_base = OTHER; note = 2'-O-methyl ribonucleotide
  modified_base 93: mod_base = OTHER; note = 2'-O-methyl ribonucleotide
  modified_base 94: mod_base = OTHER; note = 2'-O-methyl ribonucleotide
  modified_base 95: mod_base = OTHER; note = 2'-O-methyl ribonucleotide
  modified_base 96: mod_base = OTHER; note = 2'-O-methyl ribonucleotide
  modified_base 97: mod_base = OTHER; note = 2'-O-methyl ribonucleotide
  modified_base 98: mod_base = OTHER; note = 2'-O-methyl ribonucleotide
  modified_base 99: mod_base = OTHER; note = 2'-O-methyl ribonucleotide
  modified_base 100: mod_base = OTHER; note = 2'-O-methyl ribonucleotide
  modified_base 9: mod_base = OTHER; note = nebularine
  modified_base 34: mod_base = OTHER; note = nebularine
  modified_base 57: mod_base = OTHER; note = nebularine
  modified_base 65: mod_base = OTHER; note = nebularine
  modified_base 1..3: mod_base = OTHER; note = phosphorothioate linkage
  modified_base 97..100: mod_base = OTHER; note = phosphorothioate linkage

SEQ ID NO: 1968 - RNA, 100 nt, synthetic construct; identical to SEQ ID NO: 1914
  source 1..100: mol_type = other RNA
  modified_base 1: mod_base = OTHER; note = 2'-O-methyl ribonucleotide
  modified_base 2: mod_base = OTHER; note = 2'-O-methyl ribonucleotide
  modified_base 3: mod_base = OTHER; note = 2'-O-methyl ribonucleotide
  modified_base 21: mod_base = OTHER; note = 2'-O-methyl ribonucleotide
  modified_base 29: mod_base = OTHER; note = 2'-O-methyl ribonucleotide
  modified_base 30: mod_base = OTHER; note = 2'-O-methyl ribonucleotide
  modified_base 31: mod_base = OTHER; note = 2'-O-methyl ribonucleotide
  modified_base 32: mod_base = OTHER; note = 2'-O-methyl ribonucleotide
  modified_base 33: mod_base = OTHER; note = 2'-O-methyl ribonucleotide
  modified_base 35: mod_base = OTHER; note = 2'-O-methyl ribonucleotide
  modified_base 36: mod_base = OTHER; note = 2'-O-methyl ribonucleotide
  modified_base 37: mod_base = OTHER; note = 2'-O-methyl ribonucleotide
  modified_base 38: mod_base = OTHER; note = 2'-O-methyl ribonucleotide
  modified_base 39: mod_base = OTHER; note = 2'-O-methyl ribonucleotide
  modified_base 40: mod_base = OTHER; note = 2'-O-methyl ribonucleotide
  modified_base 41: mod_base = OTHER; note = 2'-O-methyl ribonucleotide
  modified_base 46: mod_base = OTHER; note = 2'-O-methyl ribonucleotide
  modified_base 48: mod_base = OTHER; note = 2'-O-methyl ribonucleotide
  modified_base 50: mod_base = OTHER; note = 2'-O-methyl ribonucleotide
  modified_base 52: mod_base = OTHER; note = 2'-O-methyl ribonucleotide
  modified_base 53: mod_base = OTHER; note = 2'-O-methyl ribonucleotide
  modified_base 54: mod_base = OTHER; note = 2'-O-methyl ribonucleotide
  modified_base 55: mod_base = OTHER; note = 2'-O-methyl ribonucleotide
  modified_base 56: mod_base = OTHER; note = 2'-O-methyl ribonucleotide
  modified_base 60: mod_base = OTHER; note = 2'-O-methyl ribonucleotide
  modified_base 61: mod_base = OTHER; note = 2'-O-methyl ribonucleotide
  modified_base 66: mod_base = OTHER; note = 2'-O-methyl ribonucleotide
  modified_base 67: mod_base = OTHER; note = 2'-O-methyl ribonucleotide
  modified_base 70: mod_base = OTHER; note = 2'-O-methyl ribonucleotide
  modified_base 71: mod_base = OTHER; note = 2'-O-methyl ribonucleotide
  modified_base 72: mod_base = OTHER; note = 2'-O-methyl ribonucleotide
  modified_base 73: mod_base = OTHER; note = 2'-O-methyl ribonucleotide
  modified_base 74: mod_base = OTHER; note = 2'-O-methyl ribonucleotide
  modified_base 75: mod_base = OTHER; note = 2'-O-methyl ribonucleotide
  modified_base 76: mod_base = OTHER; note = 2'-O-methyl ribonucleotide
  modified_base 77: mod_base = OTHER; note = 2'-O-methyl ribonucleotide
  modified_base 78: mod_base = OTHER; note = 2'-O-methyl ribonucleotide
  modified_base 79: mod_base = OTHER; note = 2'-O-methyl ribonucleotide
  modified_base 80: mod_base = OTHER; note = 2'-O-methyl ribonucleotide
  modified_base 81: mod_base = OTHER; note = 2'-O-methyl ribonucleotide
  modified_base 83: mod_base = OTHER; note = 2'-O-methyl ribonucleotide
  modified_base 84: mod_base = OTHER; note = 2'-O-methyl ribonucleotide
  modified_base 85: mod_base = OTHER; note = 2'-O-methyl ribonucleotide
  modified_base 86: mod_base = OTHER; note = 2'-O-methyl ribonucleotide
  modified_base 87: mod_base = OTHER; note = 2'-O-methyl ribonucleotide
  modified_base 88: mod_base = OTHER; note = 2'-O-methyl ribonucleotide
  modified_base 89: mod_base = OTHER; note = 2'-O-methyl ribonucleotide
  modified_base 90: mod_base = OTHER; note = 2'-O-methyl ribonucleotide
  modified_base 91: mod_base = OTHER; note = 2'-O-methyl ribonucleotide
  modified_base 92: mod_base = OTHER; note = 2'-O-methyl ribonucleotide
  modified_base 93: mod_base = OTHER; note = 2'-O-methyl ribonucleotide
  modified_base 94: mod_base = OTHER; note = 2'-O-methyl ribonucleotide
  modified_base 95: mod_base = OTHER; note = 2'-O-methyl ribonucleotide
  modified_base 96: mod_base = OTHER; note = 2'-O-methyl ribonucleotide
  modified_base 97: mod_base = OTHER; note = 2'-O-methyl ribonucleotide
  modified_base 98: mod_base = OTHER; note = 2'-O-methyl ribonucleotide
  modified_base 99: mod_base = OTHER; note = 2'-O-methyl ribonucleotide
  modified_base 100: mod_base = OTHER; note = 2'-O-methyl ribonucleotide
  modified_base 9: mod_base = OTHER; note = nebularine
  modified_base 28: mod_base = OTHER; note = nebularine
  modified_base 34: mod_base = OTHER; note = nebularine
  modified_base 42: mod_base = OTHER; note = nebularine
  modified_base 57: mod_base = OTHER; note = nebularine
  modified_base 65: mod_base = OTHER; note = nebularine
  modified_base 1..3: mod_base = OTHER; note = phosphorothioate linkage
  modified_base 97..100: mod_base = OTHER; note = phosphorothioate linkage

SEQ ID NO: 1969 - RNA, 100 nt, synthetic construct; identical to SEQ ID NO: 1915
  source 1..100: mol_type = other RNA
  modified_base 1: mod_base = OTHER; note = 2'-O-methyl ribonucleotide
  modified_base 2: mod_base = OTHER; note = 2'-O-methyl ribonucleotide
  modified_base 3: mod_base = OTHER; note = 2'-O-methyl ribonucleotide
  modified_base 21: mod_base = OTHER; note = 2'-O-methyl ribonucleotide
  modified_base 28: mod_base = OTHER; note = 2'-O-methyl ribonucleotide
  modified_base 29: mod_base = OTHER; note = 2'-O-methyl ribonucleotide
  modified_base 30: mod_base = OTHER; note = 2'-O-methyl ribonucleotide
  modified_base 31: mod_base = OTHER; note = 2'-O-methyl ribonucleotide
  modified_base 32: mod_base = OTHER; note = 2'-O-methyl ribonucleotide
  modified_base 33: mod_base = OTHER; note = 2'-O-methyl ribonucleotide
  modified_base 35: mod_base = OTHER; note = 2'-O-methyl ribonucleotide
  modified_base 36: mod_base = OTHER; note = 2'-O-methyl ribonucleotide
  modified_base 37: mod_base = OTHER; note = 2'-O-methyl ribonucleotide
  modified_base 38: mod_base = OTHER; note = 2'-O-methyl ribonucleotide
  modified_base 39: mod_base = OTHER; note = 2'-O-methyl ribonucleotide
  modified_base 40: mod_base = OTHER; note = 2'-O-methyl ribonucleotide
  modified_base 41: mod_base = OTHER; note = 2'-O-methyl ribonucleotide
  modified_base 42: mod_base = OTHER; note = 2'-O-methyl ribonucleotide
  modified_base 46: mod_base = OTHER; note = 2'-O-methyl ribonucleotide
  modified_base 48: mod_base = OTHER; note = 2'-O-methyl ribonucleotide
  modified_base 50: mod_base = OTHER; note = 2'-O-methyl ribonucleotide
  modified_base 52: mod_base = OTHER; note = 2'-O-methyl ribonucleotide
  modified_base 53: mod_base = OTHER; note = 2'-O-methyl ribonucleotide
  modified_base 54: mod_base = OTHER; note = 2'-O-methyl ribonucleotide
  modified_base 55: mod_base = OTHER; note = 2'-O-methyl ribonucleotide
  modified_base 56: mod_base = OTHER; note = 2'-O-methyl ribonucleotide
  modified_base 57: mod_base = OTHER; note = 2'-O-methyl ribonucleotide
  modified_base 60: mod_base = OTHER; note = 2'-O-methyl ribonucleotide
  modified_base 61: mod_base = OTHER; note = 2'-O-methyl ribonucleotide
  modified_base 66: mod_base = OTHER; note = 2'-O-methyl ribonucleotide
  modified_base 67: mod_base = OTHER; note = 2'-O-methyl ribonucleotide
  modified_base 70: mod_base = OTHER; note = 2'-O-methyl ribonucleotide
  modified_base 71: mod_base = OTHER; note = 2'-O-methyl ribonucleotide
  modified_base 72: mod_base = OTHER; note = 2'-O-methyl ribonucleotide
  modified_base 73: mod_base = OTHER; note = 2'-O-methyl ribonucleotide
  modified_base 74: mod_base = OTHER; note = 2'-O-methyl ribonucleotide
  modified_base 75: mod_base = OTHER; note = 2'-O-methyl ribonucleotide
  modified_base 76: mod_base = OTHER; note = 2'-O-methyl ribonucleotide
  modified_base 77: mod_base = OTHER; note = 2'-O-methyl ribonucleotide
  modified_base 78: mod_base = OTHER; note = 2'-O-methyl ribonucleotide
  modified_base 79: mod_base = OTHER; note = 2'-O-methyl ribonucleotide
  modified_base 80: mod_base = OTHER; note = 2'-O-methyl ribonucleotide
  modified_base 81: mod_base = OTHER; note = 2'-O-methyl ribonucleotide
  modified_base 83: mod_base = OTHER; note = 2'-O-methyl ribonucleotide
  modified_base 84: mod_base = OTHER; note = 2'-O-methyl ribonucleotide
  modified_base 85: mod_base = OTHER; note = 2'-O-methyl ribonucleotide
  modified_base 86: mod_base = OTHER; note = 2'-O-methyl ribonucleotide
  modified_base 87: mod_base = OTHER; note = 2'-O-methyl ribonucleotide
  modified_base 88: mod_base = OTHER; note = 2'-O-methyl ribonucleotide
  modified_base 89: mod_base = OTHER; note = 2'-O-methyl ribonucleotide
  modified_base 90: mod_base = OTHER; note = 2'-O-methyl ribonucleotide
  modified_base 91: mod_base = OTHER; note = 2'-O-methyl ribonucleotide
  modified_base 92: mod_base = OTHER; note = 2'-O-methyl ribonucleotide
  modified_base 93: mod_base = OTHER; note = 2'-O-methyl ribonucleotide
  modified_base 94: mod_base = OTHER; note = 2'-O-methyl ribonucleotide
  modified_base 95: mod_base = OTHER; note = 2'-O-methyl ribonucleotide
  modified_base 96: mod_base = OTHER; note = 2'-O-methyl ribonucleotide
  modified_base 97: mod_base = OTHER; note = 2'-O-methyl ribonucleotide
  modified_base 98: mod_base = OTHER; note = 2'-O-methyl ribonucleotide
  modified_base 99: mod_base = OTHER; note = 2'-O-methyl ribonucleotide
  modified_base 100: mod_base = OTHER; note = 2'-O-methyl ribonucleotide
  modified_base 14: mod_base = OTHER; note = nebularine
  modified_base 34: mod_base = OTHER; note = nebularine
  modified_base 1..3: mod_base = OTHER; note = phosphorothioate linkage
  modified_base 97..100: mod_base = OTHER; note = phosphorothioate linkage

SEQ ID NO: 1970 - RNA, 100 nt, synthetic construct; identical to SEQ ID NO: 1916
  source 1..100: mol_type = other RNA
  modified_base 1: mod_base = OTHER; note = 2'-O-methyl ribonucleotide
  modified_base 2: mod_base = OTHER; note = 2'-O-methyl ribonucleotide
  modified_base 3: mod_base = OTHER; note = 2'-O-methyl ribonucleotide
  modified_base 21: mod_base = OTHER; note = 2'-O-methyl ribonucleotide
  modified_base 28: mod_base = OTHER; note = 2'-O-methyl ribonucleotide
  modified_base 29: mod_base = OTHER; note = 2'-O-methyl ribonucleotide
  modified_base 30: mod_base = OTHER; note = 2'-O-methyl ribonucleotide
  modified_base 31: mod_base = OTHER; note = 2'-O-methyl ribonucleotide
  modified_base 32: mod_base = OTHER; note = 2'-O-methyl ribonucleotide
  modified_base 33: mod_base = OTHER; note = 2'-O-methyl ribonucleotide
  modified_base 35: mod_base = OTHER; note = 2'-O-methyl ribonucleotide
  modified_base 36: mod_base = OTHER; note = 2'-O-methyl ribonucleotide
  modified_base 37: mod_base = OTHER; note = 2'-O-methyl ribonucleotide
  modified_base 38: mod_base = OTHER; note = 2'-O-methyl ribonucleotide
  modified_base 39: mod_base = OTHER; note = 2'-O-methyl ribonucleotide
  modified_base 40: mod_base = OTHER; note = 2'-O-methyl ribonucleotide
  modified_base 41: mod_base = OTHER; note = 2'-O-methyl ribonucleotide
  modified_base 42: mod_base = OTHER; note = 2'-O-methyl ribonucleotide
  modified_base 46: mod_base = OTHER; note = 2'-O-methyl ribonucleotide
  modified_base 48: mod_base = OTHER; note = 2'-O-methyl ribonucleotide
  modified_base 50: mod_base = OTHER; note = 2'-O-methyl ribonucleotide
  modified_base 52: mod_base = OTHER; note = 2'-O-methyl ribonucleotide
  modified_base 53: mod_base = OTHER; note = 2'-O-methyl ribonucleotide
  modified_base 54: mod_base = OTHER; note = 2'-O-methyl ribonucleotide
  modified_base 55: mod_base = OTHER; note = 2'-O-methyl ribonucleotide
  modified_base 56: mod_base = OTHER; note = 2'-O-methyl ribonucleotide
  modified_base 60: mod_base = OTHER; note = 2'-O-methyl ribonucleotide
  modified_base 61: mod_base = OTHER; note = 2'-O-methyl ribonucleotide
  modified_base 66: mod_base = OTHER; note = 2'-O-methyl ribonucleotide
  modified_base 67: mod_base = OTHER; note = 2'-O-methyl ribonucleotide
  modified_base 70: mod_base = OTHER; note = 2'-O-methyl ribonucleotide
  modified_base 71: mod_base = OTHER; note = 2'-O-methyl ribonucleotide
  modified_base 72: mod_base = OTHER; note = 2'-O-methyl ribonucleotide
  modified_base 73: mod_base = OTHER; note = 2'-O-methyl ribonucleotide
  modified_base 74: mod_base = OTHER; note = 2'-O-methyl ribonucleotide
  modified_base 75: mod_base = OTHER; note = 2'-O-methyl ribonucleotide
  modified_base 76: mod_base = OTHER; note = 2'-O-methyl ribonucleotide
  modified_base 77: mod_base = OTHER; note = 2'-O-methyl ribonucleotide
  modified_base 78: mod_base = OTHER; note = 2'-O-methyl ribonucleotide
  modified_base 79: mod_base = OTHER; note = 2'-O-methyl ribonucleotide
  modified_base 80: mod_base = OTHER; note = 2'-O-methyl ribonucleotide
  modified_base 81: mod_base = OTHER; note = 2'-O-methyl ribonucleotide
  modified_base 83: mod_base = OTHER; note = 2'-O-methyl ribonucleotide
  modified_base 84: mod_base = OTHER; note = 2'-O-methyl ribonucleotide
  modified_base 85: mod_base = OTHER; note = 2'-O-methyl ribonucleotide
  modified_base 86: mod_base = OTHER; note = 2'-O-methyl ribonucleotide
  modified_base 87: mod_base = OTHER; note = 2'-O-methyl ribonucleotide
  modified_base 88: mod_base = OTHER; note = 2'-O-methyl ribonucleotide
  modified_base 89: mod_base = OTHER; note = 2'-O-methyl ribonucleotide
  modified_base 90: mod_base = OTHER; note = 2'-O-methyl ribonucleotide
  modified_base 91: mod_base = OTHER; note = 2'-O-methyl ribonucleotide
  modified_base 92: mod_base = OTHER; note = 2'-O-methyl ribonucleotide
  modified_base 93: mod_base = OTHER; note = 2'-O-methyl ribonucleotide
  modified_base 94: mod_base = OTHER; note = 2'-O-methyl ribonucleotide
  modified_base 95: mod_base = OTHER; note = 2'-O-methyl ribonucleotide
  modified_base 96: mod_base = OTHER; note = 2'-O-methyl ribonucleotide
  modified_base 97: mod_base = OTHER; note = 2'-O-methyl ribonucleotide
  modified_base 98: mod_base = OTHER; note = 2'-O-methyl ribonucleotide
  modified_base 99: mod_base = OTHER; note = 2'-O-methyl ribonucleotide
  modified_base 100: mod_base = OTHER; note = 2'-O-methyl ribonucleotide
  modified_base 14: mod_base = OTHER; note = nebularine
  modified_base 34: mod_base = OTHER; note = nebularine
  modified_base 57: mod_base = OTHER; note = nebularine
  modified_base 1..3: mod_base = OTHER; note = phosphorothioate linkage
  modified_base 97..100: mod_base = OTHER; note = phosphorothioate linkage

SEQ ID NO: 1971 - RNA, 100 nt, synthetic construct; identical to SEQ ID NO: 1917
  source 1..100: mol_type = other RNA
  modified_base 1: mod_base = OTHER; note = 2'-O-methyl ribonucleotide
  modified_base 2: mod_base = OTHER; note = 2'-O-methyl ribonucleotide
  modified_base 3: mod_base = OTHER; note = 2'-O-methyl ribonucleotide
  modified_base 21: mod_base = OTHER; note = 2'-O-methyl ribonucleotide
  modified_base 28: mod_base = OTHER; note = 2'-O-methyl ribonucleotide
  modified_base 29: mod_base = OTHER; note = 2'-O-methyl ribonucleotide
  modified_base 30: mod_base = OTHER; note = 2'-O-methyl ribonucleotide
  modified_base 31: mod_base = OTHER; note = 2'-O-methyl ribonucleotide
  modified_base 32: mod_base = OTHER; note = 2'-O-methyl ribonucleotide
  modified_base 33: mod_base = OTHER; note = 2'-O-methyl ribonucleotide
  modified_base 34: mod_base = OTHER; note = 2'-O-methyl ribonucleotide
  modified_base 35: mod_base = OTHER; note = 2'-O-methyl ribonucleotide
  modified_base 36: mod_base = OTHER; note = 2'-O-methyl ribonucleotide
  modified_base 37: mod_base = OTHER; note = 2'-O-methyl ribonucleotide
  modified_base 38: mod_base = OTHER; note = 2'-O-methyl ribonucleotide
  modified_base 39: mod_base = OTHER; note = 2'-O-methyl ribonucleotide
  modified_base 40: mod_base = OTHER; note = 2'-O-methyl ribonucleotide
  modified_base 41: mod_base = OTHER; note = 2'-O-methyl ribonucleotide
  modified_base 42: mod_base = OTHER; note = 2'-O-methyl ribonucleotide
  modified_base 46: mod_base = OTHER; note = 2'-O-methyl ribonucleotide
  modified_base 48: mod_base = OTHER; note = 2'-O-methyl ribonucleotide
  modified_base 50: mod_base = OTHER; note = 2'-O-methyl ribonucleotide
  modified_base 52: mod_base = OTHER; note = 2'-O-methyl ribonucleotide
  modified_base 53: mod_base = OTHER; note = 2'-O-methyl ribonucleotide
  modified_base 54: mod_base = OTHER; note = 2'-O-methyl ribonucleotide
  modified_base 55: mod_base = OTHER; note = 2'-O-methyl ribonucleotide
  modified_base 56: mod_base = OTHER; note = 2'-O-methyl ribonucleotide
  modified_base 60: mod_base = OTHER; note = 2'-O-methyl ribonucleotide
  modified_base 61: mod_base = OTHER; note = 2'-O-methyl ribonucleotide
  modified_base 66: mod_base = OTHER; note = 2'-O-methyl ribonucleotide
  modified_base 67: mod_base = OTHER; note = 2'-O-methyl ribonucleotide
  modified_base 70: mod_base = OTHER; note = 2'-O-methyl ribonucleotide
  modified_base 71: mod_base = OTHER; note = 2'-O-methyl ribonucleotide
  modified_base 72: mod_base = OTHER; note = 2'-O-methyl ribonucleotide
  modified_base 73: mod_base = OTHER; note = 2'-O-methyl ribonucleotide
  modified_base 74: mod_base = OTHER; note = 2'-O-methyl ribonucleotide
  modified_base 75: mod_base = OTHER; note = 2'-O-methyl ribonucleotide
  modified_base 76: mod_base = OTHER; note = 2'-O-methyl ribonucleotide
  modified_base 77: mod_base = OTHER; note = 2'-O-methyl ribonucleotide
  modified_base 78: mod_base = OTHER; note = 2'-O-methyl ribonucleotide
  modified_base 79: mod_base = OTHER; note = 2'-O-methyl ribonucleotide
  modified_base 80: mod_base = OTHER; note = 2'-O-methyl ribonucleotide
  modified_base 81: mod_base = OTHER; note = 2'-O-methyl ribonucleotide
  modified_base 83: mod_base = OTHER; note = 2'-O-methyl ribonucleotide
  modified_base 84: mod_base = OTHER; note = 2'-O-methyl ribonucleotide
  modified_base 85: mod_base = OTHER; note = 2'-O-methyl ribonucleotide
  modified_base 86: mod_base = OTHER; note = 2'-O-methyl ribonucleotide
  modified_base 87: mod_base = OTHER; note = 2'-O-methyl ribonucleotide
  modified_base 88: mod_base = OTHER; note = 2'-O-methyl ribonucleotide
  modified_base 89: mod_base = OTHER; note = 2'-O-methyl ribonucleotide
  modified_base 90: mod_base = OTHER; note = 2'-O-methyl ribonucleotide
  modified_base 91: mod_base = OTHER; note = 2'-O-methyl ribonucleotide
  modified_base 92: mod_base = OTHER; note = 2'-O-methyl ribonucleotide
  modified_base 93: mod_base = OTHER; note = 2'-O-methyl ribonucleotide
  modified_base 94: mod_base = OTHER; note = 2'-O-methyl ribonucleotide
  modified_base 95: mod_base = OTHER; note = 2'-O-methyl ribonucleotide
  modified_base 96: mod_base = OTHER; note = 2'-O-methyl ribonucleotide
  modified_base 97: mod_base = OTHER; note = 2'-O-methyl ribonucleotide
  modified_base 98: mod_base = OTHER; note = 2'-O-methyl ribonucleotide
  modified_base 99: mod_base = OTHER; note = 2'-O-methyl ribonucleotide
  modified_base 100: mod_base = OTHER; note = 2'-O-methyl ribonucleotide
  modified_base 14: mod_base = OTHER; note = nebularine
  modified_base 57: mod_base = OTHER; note = nebularine
  modified_base 1..3: mod_base = OTHER; note = phosphorothioate linkage
  modified_base 97..100: mod_base = OTHER; note = phosphorothioate linkage

SEQ ID NO: 1972 - RNA, 100 nt, synthetic construct; identical to SEQ ID NO: 1918
  source 1..100: mol_type = other RNA
  modified_base 1: mod_base = OTHER; note = 2'-O-methyl ribonucleotide
  modified_base 2: mod_base = OTHER; note = 2'-O-methyl ribonucleotide
  modified_base 3: mod_base = OTHER; note = 2'-O-methyl ribonucleotide
  modified_base 21: mod_base = OTHER; note = 2'-O-methyl ribonucleotide
  modified_base 28: mod_base = OTHER; note = 2'-O-methyl ribonucleotide
  modified_base 29: mod_base = OTHER; note = 2'-O-methyl ribonucleotide
  modified_base 30: mod_base = OTHER; note = 2'-O-methyl ribonucleotide
  modified_base 31: mod_base = OTHER; note = 2'-O-methyl ribonucleotide
  modified_base 32: mod_base = OTHER; note = 2'-O-methyl ribonucleotide
  modified_base 33: mod_base = OTHER; note = 2'-O-methyl ribonucleotide
  modified_base 34: mod_base = OTHER; note = 2'-O-methyl ribonucleotide
  modified_base 35: mod_base = OTHER; note = 2'-O-methyl ribonucleotide
  modified_base 36: mod_base = OTHER; note = 2'-O-methyl ribonucleotide
  modified_base 37: mod_base = OTHER; note = 2'-O-methyl ribonucleotide
  modified_base 38: mod_base = OTHER; note = 2'-O-methyl ribonucleotide
  modified_base 39: mod_base = OTHER; note = 2'-O-methyl ribonucleotide
  modified_base 40: mod_base = OTHER; note = 2'-O-methyl ribonucleotide
  modified_base 41: mod_base = OTHER; note = 2'-O-methyl ribonucleotide
  modified_base 42: mod_base = OTHER; note = 2'-O-methyl ribonucleotide
  modified_base 46: mod_base = OTHER; note = 2'-O-methyl ribonucleotide
  modified_base 48: mod_base = OTHER; note = 2'-O-methyl ribonucleotide
  modified_base 50: mod_base = OTHER; note = 2'-O-methyl ribonucleotide
  modified_base 52: mod_base = OTHER; note = 2'-O-methyl ribonucleotide
  modified_base 53: mod_base = OTHER; note = 2'-O-methyl ribonucleotide
  modified_base 54: mod_base = OTHER; note = 2'-O-methyl ribonucleotide
  modified_base 55: mod_base = OTHER; note = 2'-O-methyl ribonucleotide
  modified_base 56: mod_base = OTHER; note = 2'-O-methyl ribonucleotide
  modified_base 57: mod_base = OTHER; note = 2'-O-methyl ribonucleotide
  modified_base 60: mod_base = OTHER; note = 2'-O-methyl ribonucleotide
  modified_base 61: mod_base = OTHER; note = 2'-O-methyl ribonucleotide
  modified_base 66: mod_base = OTHER; note = 2'-O-methyl ribonucleotide
  modified_base 67: mod_base = OTHER; note = 2'-O-methyl ribonucleotide
  modified_base 70: mod_base = OTHER; note = 2'-O-methyl ribonucleotide
  modified_base 71: mod_base = OTHER; note = 2'-O-methyl ribonucleotide
  modified_base 72: mod_base = OTHER; note = 2'-O-methyl ribonucleotide
  modified_base 73: mod_base = OTHER; note = 2'-O-methyl ribonucleotide
  modified_base 74: mod_base = OTHER; note = 2'-O-methyl ribonucleotide
  modified_base 75: mod_base = OTHER; note = 2'-O-methyl ribonucleotide
  modified_base 76: mod_base = OTHER; note = 2'-O-methyl ribonucleotide
  modified_base 77: mod_base = OTHER; note = 2'-O-methyl ribonucleotide
  modified_base 78: mod_base = OTHER; note = 2'-O-methyl ribonucleotide
  modified_base 79: mod_base = OTHER; note = 2'-O-methyl ribonucleotide
  modified_base 80: mod_base = OTHER; note = 2'-O-methyl ribonucleotide
  modified_base 81: mod_base = OTHER; note = 2'-O-methyl ribonucleotide
  modified_base 83: mod_base = OTHER; note = 2'-O-methyl ribonucleotide
  modified_base 84: mod_base = OTHER; note = 2'-O-methyl ribonucleotide
  modified_base 85: mod_base = OTHER; note = 2'-O-methyl ribonucleotide
  modified_base 86: mod_base = OTHER; note = 2'-O-methyl ribonucleotide
  modified_base 87: mod_base = OTHER; note = 2'-O-methyl ribonucleotide
  modified_base 88: mod_base = OTHER; note = 2'-O-methyl ribonucleotide
  modified_base 89: mod_base = OTHER; note = 2'-O-methyl ribonucleotide
  modified_base 90: mod_base = OTHER; note = 2'-O-methyl ribonucleotide
  modified_base 91: mod_base = OTHER; note = 2'-O-methyl ribonucleotide
  modified_base 92: mod_base = OTHER; note = 2'-O-methyl ribonucleotide
  modified_base 93: mod_base = OTHER; note = 2'-O-methyl ribonucleotide
  modified_base 94: mod_base = OTHER; note = 2'-O-methyl ribonucleotide
  modified_base 95: mod_base = OTHER; note = 2'-O-methyl ribonucleotide
  modified_base 96: mod_base = OTHER; note = 2'-O-methyl ribonucleotide
  modified_base 97: mod_base = OTHER; note = 2'-O-methyl ribonucleotide
  modified_base 98: mod_base = OTHER; note = 2'-O-methyl ribonucleotide
  modified_base 99: mod_base = OTHER; note = 2'-O-methyl ribonucleotide
  modified_base 100: mod_base = OTHER; note = 2'-O-methyl ribonucleotide
  modified_base 14: mod_base = OTHER; note = nebularine
  modified_base 65: mod_base = OTHER; note = nebularine
  modified_base 1..3: mod_base = OTHER; note = phosphorothioate linkage
  modified_base 97..100: mod_base = OTHER; note = phosphorothioate linkage

SEQ ID NO: 1973 - RNA, 100 nt, synthetic construct; identical to SEQ ID NO: 1919
  source 1..100: mol_type = other RNA
  modified_base 1: mod_base = OTHER; note = 2'-O-methyl ribonucleotide
  modified_base 2: mod_base = OTHER; note = 2'-O-methyl ribonucleotide
  modified_base 3: mod_base = OTHER; note = 2'-O-methyl ribonucleotide
  modified_base 21: mod_base = OTHER; note = 2'-O-methyl ribonucleotide
  modified_base 28: mod_base = OTHER; note = 2'-O-methyl ribonucleotide
  modified_base 29: mod_base = OTHER; note = 2'-O-methyl ribonucleotide
  modified_base 30: mod_base = OTHER; note = 2'-O-methyl ribonucleotide
  modified_base 31: mod_base = OTHER; note = 2'-O-methyl ribonucleotide
  modified_base 32: mod_base = OTHER; note = 2'-O-methyl ribonucleotide
  modified_base 33: mod_base = OTHER; note = 2'-O-methyl ribonucleotide
  modified_base 35: mod_base = OTHER; note = 2'-O-methyl ribonucleotide
  modified_base 36: mod_base = OTHER; note = 2'-O-methyl ribonucleotide
  modified_base 37: mod_base = OTHER; note = 2'-O-methyl ribonucleotide
  modified_base 38: mod_base = OTHER; note = 2'-O-methyl ribonucleotide
  modified_base 39: mod_base = OTHER; note = 2'-O-methyl ribonucleotide
  modified_base 40: mod_base = OTHER; note = 2'-O-methyl ribonucleotide
  modified_base 41: mod_base = OTHER; note = 2'-O-methyl ribonucleotide
  modified_base 42: mod_base = OTHER; note = 2'-O-methyl ribonucleotide
  modified_base 46: mod_base = OTHER; note = 2'-O-methyl ribonucleotide
  modified_base 48: mod_base = OTHER; note = 2'-O-methyl ribonucleotide
  modified_base 50: mod_base = OTHER; note = 2'-O-methyl ribonucleotide
  modified_base 52: mod_base = OTHER; note = 2'-O-methyl ribonucleotide
  modified_base 53: mod_base = OTHER; note = 2'-O-methyl ribonucleotide
  modified_base 54: mod_base = OTHER; note = 2'-O-methyl ribonucleotide
  modified_base 55: mod_base = OTHER; note = 2'-O-methyl ribonucleotide
  modified_base 56: mod_base = OTHER; note = 2'-O-methyl ribonucleotide
  modified_base 60: mod_base = OTHER; note = 2'-O-methyl ribonucleotide
  modified_base 61: mod_base = OTHER; note = 2'-O-methyl ribonucleotide
  modified_base 66: mod_base = OTHER; note = 2'-O-methyl ribonucleotide
  modified_base 67: mod_base = OTHER; note = 2'-O-methyl ribonucleotide
  modified_base 70: mod_base = OTHER; note = 2'-O-methyl ribonucleotide
  modified_base 71: mod_base = OTHER; note = 2'-O-methyl ribonucleotide
  modified_base 72: mod_base = OTHER; note = 2'-O-methyl ribonucleotide
  modified_base 73: mod_base = OTHER; note = 2'-O-methyl ribonucleotide
  modified_base 74: mod_base = OTHER; note = 2'-O-methyl ribonucleotide
  modified_base 75: mod_base = OTHER; note = 2'-O-methyl ribonucleotide
  modified_base 76: mod_base = OTHER; note = 2'-O-methyl ribonucleotide
  modified_base 77: mod_base = OTHER; note = 2'-O-methyl ribonucleotide
  modified_base 78: mod_base = OTHER; note = 2'-O-methyl ribonucleotide
  modified_base 79: mod_base = OTHER; note = 2'-O-methyl ribonucleotide
  modified_base 80: mod_base = OTHER; note = 2'-O-methyl ribonucleotide
  modified_base 81: mod_base = OTHER; note = 2'-O-methyl ribonucleotide
  modified_base 83: mod_base = OTHER; note = 2'-O-methyl ribonucleotide
  modified_base 84: mod_base = OTHER; note = 2'-O-methyl ribonucleotide
  modified_base 85: mod_base = OTHER; note = 2'-O-methyl ribonucleotide
  modified_base 86: mod_base = OTHER; note = 2'-O-methyl ribonucleotide
  modified_base 87: mod_base = OTHER; note = 2'-O-methyl ribonucleotide
  modified_base 88: mod_base = OTHER; note = 2'-O-methyl ribonucleotide
  modified_base 89: mod_base = OTHER; note = 2'-O-methyl ribonucleotide
  modified_base 90: mod_base = OTHER; note = 2'-O-methyl ribonucleotide
  modified_base 91: mod_base = OTHER; note = 2'-O-methyl ribonucleotide
  modified_base 92: mod_base = OTHER; note = 2'-O-methyl ribonucleotide
  modified_base 93: mod_base = OTHER; note = 2'-O-methyl ribonucleotide
  modified_base 94: mod_base = OTHER; note = 2'-O-methyl ribonucleotide
  modified_base 95: mod_base = OTHER; note = 2'-O-methyl ribonucleotide
  modified_base 96: mod_base = OTHER; note = 2'-O-methyl ribonucleotide
  modified_base 97: mod_base = OTHER; note = 2'-O-methyl ribonucleotide
  modified_base 98: mod_base = OTHER; note = 2'-O-methyl ribonucleotide
  modified_base 99: mod_base = OTHER; note = 2'-O-methyl ribonucleotide
  modified_base 100: mod_base = OTHER; note = 2'-O-methyl ribonucleotide
  modified_base 14: mod_base = OTHER; note = nebularine
  modified_base 34: mod_base = OTHER; note = nebularine
  modified_base 57: mod_base = OTHER; note = nebularine
  modified_base 65: mod_base = OTHER; note = nebularine
  modified_base 1..3: mod_base = OTHER; note = phosphorothioate linkage
  modified_base 97..100: mod_base = OTHER; note = phosphorothioate linkage

SEQ ID NO: 1974 - RNA, 100 nt, synthetic construct; identical to SEQ ID NO: 1920
  source 1..100: mol_type = other RNA
  modified_base 1: mod_base = OTHER; note = 2'-O-methyl ribonucleotide
  modified_base 2: mod_base = OTHER; note = 2'-O-methyl ribonucleotide
  modified_base 3: mod_base = OTHER; note = 2'-O-methyl ribonucleotide
  modified_base 21: mod_base = OTHER; note = 2'-O-methyl ribonucleotide
  modified_base 29: mod_base = OTHER; note = 2'-O-methyl ribonucleotide
  modified_base 30: mod_base = OTHER; note = 2'-O-methyl ribonucleotide
  modified_base 31: mod_base = OTHER; note = 2'-O-methyl ribonucleotide
  modified_base 32: mod_base = OTHER; note = 2'-O-methyl ribonucleotide
  modified_base 33: mod_base = OTHER; note = 2'-O-methyl ribonucleotide
  modified_base 35: mod_base = OTHER; note = 2'-O-methyl ribonucleotide
  modified_base 36: mod_base = OTHER; note = 2'-O-methyl ribonucleotide
  modified_base 37: mod_base = OTHER; note = 2'-O-methyl ribonucleotide
  modified_base 38: mod_base = OTHER; note = 2'-O-methyl ribonucleotide
  modified_base 39: mod_base = OTHER; note = 2'-O-methyl ribonucleotide
  modified_base 40: mod_base = OTHER; note = 2'-O-methyl ribonucleotide
  modified_base 41: mod_base = OTHER; note = 2'-O-methyl ribonucleotide
  modified_base 46: mod_base = OTHER; note = 2'-O-methyl ribonucleotide
  modified_base 48: mod_base = OTHER; note = 2'-O-methyl ribonucleotide
  modified_base 50: mod_base = OTHER; note = 2'-O-methyl ribonucleotide
  modified_base 52: mod_base = OTHER; note = 2'-O-methyl ribonucleotide
  modified_base 53: mod_base = OTHER; note = 2'-O-methyl ribonucleotide
  modified_base 54: mod_base = OTHER; note = 2'-O-methyl ribonucleotide
  modified_base 55: mod_base = OTHER; note = 2'-O-methyl ribonucleotide
  modified_base 56: mod_base = OTHER; note = 2'-O-methyl ribonucleotide
  modified_base 60: mod_base = OTHER; note = 2'-O-methyl ribonucleotide
  modified_base 61: mod_base = OTHER; note = 2'-O-methyl ribonucleotide
  modified_base 66: mod_base = OTHER; note = 2'-O-methyl ribonucleotide
  modified_base 67: mod_base = OTHER; note = 2'-O-methyl ribonucleotide
  modified_base 70: mod_base = OTHER; note = 2'-O-methyl ribonucleotide
  modified_base 71: mod_base = OTHER; note = 2'-O-methyl ribonucleotide
  modified_base 72: mod_base = OTHER; note = 2'-O-methyl ribonucleotide
  modified_base 73: mod_base = OTHER; note = 2'-O-methyl ribonucleotide
  modified_base 74: mod_base = OTHER; note = 2'-O-methyl ribonucleotide
  modified_base 75: mod_base = OTHER; note = 2'-O-methyl ribonucleotide
  modified_base 76: mod_base = OTHER; note = 2'-O-methyl ribonucleotide
  modified_base 77: mod_base = OTHER; note = 2'-O-methyl ribonucleotide
  modified_base 78: mod_base = OTHER; note = 2'-O-methyl ribonucleotide
  modified_base 79: mod_base = OTHER; note = 2'-O-methyl ribonucleotide
  modified_base 80: mod_base = OTHER; note = 2'-O-methyl ribonucleotide
  modified_base 81: mod_base = OTHER; note = 2'-O-methyl ribonucleotide
  modified_base 83: mod_base = OTHER; note = 2'-O-methyl ribonucleotide
  modified_base 84: mod_base = OTHER; note = 2'-O-methyl ribonucleotide
  modified_base 85: mod_base = OTHER; note = 2'-O-methyl ribonucleotide
  modified_base 86: mod_base = OTHER; note = 2'-O-methyl ribonucleotide
  modified_base 87: mod_base = OTHER; note = 2'-O-methyl ribonucleotide
  modified_base 88: mod_base = OTHER; note = 2'-O-methyl ribonucleotide
  modified_base 89: mod_base = OTHER; note = 2'-O-methyl ribonucleotide
  modified_base 90: mod_base = OTHER; note = 2'-O-methyl ribonucleotide
  modified_base 91: mod_base = OTHER; note = 2'-O-methyl ribonucleotide
  modified_base 92: mod_base = OTHER; note = 2'-O-methyl ribonucleotide
  modified_base 93: mod_base = OTHER; note = 2'-O-methyl ribonucleotide
  modified_base 94: mod_base = OTHER; note = 2'-O-methyl ribonucleotide
  modified_base 95: mod_base = OTHER; note = 2'-O-methyl ribonucleotide
  modified_base 96: mod_base = OTHER; note = 2'-O-methyl ribonucleotide
  modified_base 97: mod_base = OTHER; note = 2'-O-methyl ribonucleotide
  modified_base 98: mod_base = OTHER; note = 2'-O-methyl ribonucleotide
  modified_base 99: mod_base = OTHER; note = 2'-O-methyl ribonucleotide
  modified_base 100: mod_base = OTHER; note = 2'-O-methyl ribonucleotide
  modified_base 14: mod_base = OTHER; note = nebularine
  modified_base 28: mod_base = OTHER; note = nebularine
  modified_base 34: mod_base = OTHER; note = nebularine
  modified_base 42: mod_base = OTHER; note = nebularine
  modified_base 57: mod_base = OTHER; note = nebularine
  modified_base 65: mod_base = OTHER; note = nebularine
  modified_base 1..3: mod_base = OTHER; note = phosphorothioate linkage
  modified_base 97..100: mod_base = OTHER; note = phosphorothioate linkage

SEQ ID NO: 1975 - RNA, 100 nt, synthetic construct; identical to SEQ ID NO: 1921
  source 1..100: mol_type = other RNA
  modified_base 1: mod_base = OTHER; note = 2'-O-methyl ribonucleotide
  modified_base 2: mod_base = OTHER; note = 2'-O-methyl ribonucleotide
  modified_base 3: mod_base = OTHER; note = 2'-O-methyl ribonucleotide
  modified_base 21: mod_base = OTHER; note = 2'-O-methyl ribonucleotide
  modified_base 28: mod_base = OTHER; note = 2'-O-methyl ribonucleotide
  modified_base 29: mod_base = OTHER; note = 2'-O-methyl ribonucleotide
  modified_base 30: mod_base = OTHER; note = 2'-O-methyl ribonucleotide
  modified_base 31: mod_base = OTHER; note = 2'-O-methyl ribonucleotide
  modified_base 32: mod_base = OTHER; note = 2'-O-methyl ribonucleotide
  modified_base 33: mod_base = OTHER; note = 2'-O-methyl ribonucleotide
  modified_base 34: mod_base = OTHER; note = 2'-O-methyl ribonucleotide
  modified_base 35: mod_base = OTHER; note = 2'-O-methyl ribonucleotide
  modified_base 36: mod_base = OTHER; note = 2'-O-methyl ribonucleotide
  modified_base 37: mod_base = OTHER; note = 2'-O-methyl ribonucleotide
  modified_base 38: mod_base = OTHER; note = 2'-O-methyl ribonucleotide
  modified_base 39: mod_base = OTHER; note = 2'-O-methyl ribonucleotide
  modified_base 40: mod_base = OTHER; note = 2'-O-methyl ribonucleotide
  modified_base 41: mod_base = OTHER; note = 2'-O-methyl ribonucleotide
  modified_base 42: mod_base = OTHER; note = 2'-O-methyl ribonucleotide
  modified_base 46: mod_base = OTHER; note = 2'-O-methyl ribonucleotide
  modified_base 48: mod_base = OTHER; note = 2'-O-methyl ribonucleotide
  modified_base 50: mod_base = OTHER; note = 2'-O-methyl ribonucleotide
  modified_base 52: mod_base = OTHER; note = 2'-O-methyl ribonucleotide
  modified_base 53: mod_base = OTHER; note = 2'-O-methyl ribonucleotide
  modified_base 54: mod_base = OTHER; note = 2'-O-methyl ribonucleotide
  modified_base 55: mod_base = OTHER; note = 2'-O-methyl ribonucleotide
  modified_base 56: mod_base = OTHER; note = 2'-O-methyl ribonucleotide
  modified_base 57: mod_base = OTHER; note = 2'-O-methyl ribonucleotide
  modified_base 60: mod_base = OTHER; note = 2'-O-methyl ribonucleotide
  modified_base 61: mod_base = OTHER; note = 2'-O-methyl ribonucleotide
  modified_base 66: mod_base = OTHER; note = 2'-O-methyl ribonucleotide
  modified_base 67: mod_base = OTHER; note = 2'-O-methyl ribonucleotide
  modified_base 70: mod_base = OTHER; note = 2'-O-methyl ribonucleotide
  modified_base 71: mod_base = OTHER; note = 2'-O-methyl ribonucleotide
  modified_base 72: mod_base = OTHER; note = 2'-O-methyl ribonucleotide
  modified_base 73: mod_base = OTHER; note = 2'-O-methyl ribonucleotide
  modified_base 74: mod_base = OTHER; note = 2'-O-methyl ribonucleotide
  modified_base 75: mod_base = OTHER; note = 2'-O-methyl ribonucleotide
  modified_base 76: mod_base = OTHER; note = 2'-O-methyl ribonucleotide
  modified_base 77: mod_base = OTHER; note = 2'-O-methyl ribonucleotide
  modified_base 78: mod_base = OTHER; note = 2'-O-methyl ribonucleotide
  modified_base 79: mod_base = OTHER; note = 2'-O-methyl ribonucleotide
  modified_base 80: mod_base = OTHER; note = 2'-O-methyl ribonucleotide
  modified_base 81: mod_base = OTHER; note = 2'-O-methyl ribonucleotide
  modified_base 83: mod_base = OTHER; note = 2'-O-methyl ribonucleotide
  modified_base 84: mod_base = OTHER; note = 2'-O-methyl ribonucleotide
  modified_base 85: mod_base = OTHER; note = 2'-O-methyl ribonucleotide
  modified_base 86: mod_base = OTHER; note = 2'-O-methyl ribonucleotide
  modified_base 87: mod_base = OTHER; note = 2'-O-methyl ribonucleotide
  modified_base 88: mod_base = OTHER; note = 2'-O-methyl ribonucleotide
  modified_base 89: mod_base = OTHER; note = 2'-O-methyl ribonucleotide
  modified_base 90: mod_base = OTHER; note = 2'-O-methyl ribonucleotide
  modified_base 91: mod_base = OTHER; note = 2'-O-methyl ribonucleotide
  modified_base 92: mod_base = OTHER; note = 2'-O-methyl ribonucleotide
  modified_base 93: mod_base = OTHER; note = 2'-O-methyl ribonucleotide
  modified_base 94: mod_base = OTHER; note = 2'-O-methyl ribonucleotide
  modified_base 95: mod_base = OTHER; note = 2'-O-methyl ribonucleotide
  modified_base 96: mod_base = OTHER; note = 2'-O-methyl ribonucleotide
  modified_base 97: mod_base = OTHER; note = 2'-O-methyl ribonucleotide
  modified_base 98: mod_base = OTHER; note = 2'-O-methyl ribonucleotide
  modified_base 99: mod_base = OTHER; note = 2'-O-methyl ribonucleotide
  modified_base 100: mod_base = OTHER; note = 2'-O-methyl ribonucleotide
  modified_base 9: mod_base = OTHER; note = nebularine
  modified_base 14: mod_base = OTHER; note = nebularine
  modified_base 28: mod_base = OTHER; note = nebularine
  modified_base 34: mod_base = OTHER; note = nebularine
  modified_base 42: mod_base = OTHER; note = nebularine
  modified_base 57: mod_base = OTHER; note = nebularine
  modified_base 1..3: mod_base = OTHER; note = phosphorothioate linkage
  modified_base 97..100: mod_base = OTHER; note = phosphorothioate linkage

SEQ ID NO: 1976 - RNA, 100 nt, synthetic construct; identical to SEQ ID NO: 1922
  source 1..100: mol_type = other RNA
  modified_base 1: mod_base = OTHER; note = 2'-O-methyl ribonucleotide
  modified_base 2: mod_base = OTHER; note = 2'-O-methyl ribonucleotide
  modified_base 3: mod_base = OTHER; note = 2'-O-methyl ribonucleotide
  modified_base 21: mod_base = OTHER; note = 2'-O-methyl ribonucleotide
  modified_base 28: mod_base = OTHER; note = 2'-O-methyl ribonucleotide
  modified_base 29: mod_base = OTHER; note = 2'-O-methyl ribonucleotide
  modified_base 30: mod_base = OTHER; note = 2'-O-methyl ribonucleotide
  modified_base 31: mod_base = OTHER; note = 2'-O-methyl ribonucleotide
  modified_base 32: mod_base = OTHER; note = 2'-O-methyl ribonucleotide
  modified_base 33: mod_base = OTHER; note = 2'-O-methyl ribonucleotide
  modified_base 34: mod_base = OTHER; note = 2'-O-methyl ribonucleotide
  modified_base 35: mod_base = OTHER; note = 2'-O-methyl ribonucleotide
  modified_base 36: mod_base = OTHER; note = 2'-O-methyl ribonucleotide
  modified_base 37: mod_base = OTHER; note = 2'-O-methyl ribonucleotide
  modified_base 38: mod_base = OTHER; note = 2'-O-methyl ribonucleotide
  modified_base 39: mod_base = OTHER; note = 2'-O-methyl ribonucleotide
  modified_base 40: mod_base = OTHER; note = 2'-O-methyl ribonucleotide
  modified_base 41: mod_base = OTHER; note = 2'-O-methyl ribonucleotide
  modified_base 42: mod_base = OTHER; note = 2'-O-methyl ribonucleotide
  modified_base 46: mod_base = OTHER; note = 2'-O-methyl ribonucleotide
  modified_base 48: mod_base = OTHER; note = 2'-O-methyl ribonucleotide
  modified_base 50: mod_base = OTHER; note = 2'-O-methyl ribonucleotide
  modified_base 52: mod_base = OTHER; note = 2'-O-methyl ribonucleotide
  modified_base 53: mod_base = OTHER; note = 2'-O-methyl ribonucleotide
  modified_base 54: mod_base = OTHER; note = 2'-O-methyl ribonucleotide
  modified_base 55: mod_base = OTHER; note = 2'-O-methyl ribonucleotide
  modified_base 56: mod_base = OTHER; note = 2'-O-methyl ribonucleotide
  modified_base 57: mod_base = OTHER; note = 2'-O-methyl ribonucleotide
  modified_base 60: mod_base = OTHER; note = 2'-O-methyl ribonucleotide
  modified_base 61: mod_base = OTHER; note = 2'-O-methyl ribonucleotide
  modified_base 66: mod_base = OTHER; note = 2'-O-methyl ribonucleotide
  modified_base 67: mod_base = OTHER; note = 2'-O-methyl ribonucleotide
  modified_base 70: mod_base = OTHER; note = 2'-O-methyl ribonucleotide
  modified_base 71: mod_base = OTHER; note = 2'-O-methyl ribonucleotide
  modified_base 72: mod_base = OTHER; note = 2'-O-methyl ribonucleotide
  modified_base 73: mod_base = OTHER; note = 2'-O-methyl ribonucleotide
  modified_base 74: mod_base = OTHER; note = 2'-O-methyl ribonucleotide
  modified_base 75: mod_base = OTHER; note = 2'-O-methyl ribonucleotide
  modified_base 76: mod_base = OTHER; note = 2'-O-methyl ribonucleotide
  modified_base 77: mod_base = OTHER; note = 2'-O-methyl ribonucleotide
  modified_base 78: mod_base = OTHER; note = 2'-O-methyl ribonucleotide
  modified_base 79: mod_base = OTHER; note = 2'-O-methyl ribonucleotide
  modified_base 80: mod_base = OTHER; note = 2'-O-methyl ribonucleotide
  modified_base 81: mod_base = OTHER; note = 2'-O-methyl ribonucleotide
  modified_base 83: mod_base = OTHER; note = 2'-O-methyl ribonucleotide
  modified_base 84: mod_base = OTHER; note = 2'-O-methyl ribonucleotide
  modified_base 85: mod_base = OTHER; note = 2'-O-methyl ribonucleotide
  modified_base 86: mod_base = OTHER; note = 2'-O-methyl ribonucleotide
  modified_base 87: mod_base = OTHER; note = 2'-O-methyl ribonucleotide
  modified_base 88: mod_base = OTHER; note = 2'-O-methyl ribonucleotide
  modified_base 89: mod_base = OTHER; note = 2'-O-methyl ribonucleotide
  modified_base 90: mod_base = OTHER; note = 2'-O-methyl ribonucleotide
  modified_base 91: mod_base = OTHER; note = 2'-O-methyl ribonucleotide
  modified_base 92: mod_base = OTHER; note = 2'-O-methyl ribonucleotide
  modified_base 93: mod_base = OTHER; note = 2'-O-methyl ribonucleotide
  modified_base 94: mod_base = OTHER; note = 2'-O-methyl ribonucleotide
  modified_base 95: mod_base = OTHER; note = 2'-O-methyl ribonucleotide
  modified_base 96: mod_base = OTHER; note = 2'-O-methyl ribonucleotide
  modified_base 97: mod_base = OTHER; note = 2'-O-methyl ribonucleotide
  modified_base 98: mod_base = OTHER; note = 2'-O-methyl ribonucleotide
  modified_base 99: mod_base = OTHER; note = 2'-O-methyl ribonucleotide
  modified_base 100: mod_base = OTHER; note = 2'-O-methyl ribonucleotide
  modified_base 9: mod_base = OTHER; note = nebularine
  modified_base 14: mod_base = OTHER; note = nebularine
  modified_base 34: mod_base = OTHER; note = nebularine
  modified_base 42: mod_base = OTHER; note = nebularine
  modified_base 57: mod_base = OTHER; note = nebularine
  modified_base 1..3: mod_base = OTHER; note = phosphorothioate linkage
  modified_base 97..100: mod_base = OTHER; note = phosphorothioate linkage

SEQ ID NO: 1977 - RNA, 100 nt, synthetic construct; identical to SEQ ID NO: 1923
  source 1..100: mol_type = other RNA
  modified_base 1: mod_base = OTHER; note = 2'-O-methyl ribonucleotide
  modified_base 2: mod_base = OTHER; note = 2'-O-methyl ribonucleotide
  modified_base 3: mod_base = OTHER; note = 2'-O-methyl ribonucleotide
  modified_base 21: mod_base = OTHER; note = 2'-O-methyl ribonucleotide
  modified_base 28: mod_base = OTHER; note = 2'-O-methyl ribonucleotide
  modified_base 29: mod_base = OTHER; note = 2'-O-methyl ribonucleotide
  modified_base 30: mod_base = OTHER; note = 2'-O-methyl ribonucleotide
  modified_base 31: mod_base = OTHER; note = 2'-O-methyl ribonucleotide
  modified_base 32: mod_base = OTHER; note = 2'-O-methyl ribonucleotide
  modified_base 33: mod_base = OTHER; note = 2'-O-methyl ribonucleotide
  modified_base 34: mod_base = OTHER; note = 2'-O-methyl ribonucleotide
  modified_base 35: mod_base = OTHER; note = 2'-O-methyl ribonucleotide
  modified_base 36: mod_base = OTHER; note = 2'-O-methyl ribonucleotide
  modified_base 37: mod_base = OTHER; note = 2'-O-methyl ribonucleotide
  modified_base 38: mod_base = OTHER; note = 2'-O-methyl ribonucleotide
  modified_base 39: mod_base = OTHER; note = 2'-O-methyl ribonucleotide
  modified_base 40: mod_base = OTHER; note = 2'-O-methyl ribonucleotide
  modified_base 41: mod_base = OTHER; note = 2'-O-methyl ribonucleotide
  modified_base 42: mod_base = OTHER; note = 2'-O-methyl ribonucleotide
  modified_base 46: mod_base = OTHER; note = 2'-O-methyl ribonucleotide
  modified_base 48: mod_base = OTHER; note = 2'-O-methyl ribonucleotide
  modified_base 50: mod_base = OTHER; note = 2'-O-methyl ribonucleotide
  modified_base 52: mod_base = OTHER; note = 2'-O-methyl ribonucleotide
  modified_base 53: mod_base = OTHER; note = 2'-O-methyl ribonucleotide
  modified_base 54: mod_base = OTHER; note = 2'-O-methyl ribonucleotide
  modified_base 55: mod_base = OTHER; note = 2'-O-methyl ribonucleotide
  modified_base 56: mod_base = OTHER; note = 2'-O-methyl ribonucleotide
  modified_base 57: mod_base = OTHER; note = 2'-O-methyl ribonucleotide
  modified_base 60: mod_base = OTHER; note = 2'-O-methyl ribonucleotide
  modified_base 61: mod_base = OTHER; note = 2'-O-methyl ribonucleotide
  modified_base 66: mod_base = OTHER; note = 2'-O-methyl ribonucleotide
  modified_base 67: mod_base = OTHER; note = 2'-O-methyl ribonucleotide
  modified_base 70: mod_base = OTHER; note = 2'-O-methyl ribonucleotide
  modified_base 71: mod_base = OTHER; note = 2'-O-methyl ribonucleotide
  modified_base 72: mod_base = OTHER; note = 2'-O-methyl ribonucleotide
  modified_base 73: mod_base = OTHER; note = 2'-O-methyl ribonucleotide
  modified_base 74: mod_base = OTHER; note = 2'-O-methyl ribonucleotide
  modified_base 75: mod_base = OTHER; note = 2'-O-methyl ribonucleotide
  modified_base 76: mod_base = OTHER; note = 2'-O-methyl ribonucleotide
  modified_base 77: mod_base = OTHER; note = 2'-O-methyl ribonucleotide
  modified_base 78: mod_base = OTHER; note = 2'-O-methyl ribonucleotide
  modified_base 79: mod_base = OTHER; note = 2'-O-methyl ribonucleotide
  modified_base 80: mod_base = OTHER; note = 2'-O-methyl ribonucleotide
  modified_base 81: mod_base = OTHER; note = 2'-O-methyl ribonucleotide
  modified_base 83: mod_base = OTHER; note = 2'-O-methyl ribonucleotide
  modified_base 84: mod_base = OTHER; note = 2'-O-methyl ribonucleotide
  modified_base 85: mod_base = OTHER; note = 2'-O-methyl ribonucleotide
  modified_base 86: mod_base = OTHER; note = 2'-O-methyl ribonucleotide
  modified_base 87: mod_base = OTHER; note = 2'-O-methyl ribonucleotide
  modified_base 88: mod_base = OTHER; note = 2'-O-methyl ribonucleotide
  modified_base 89: mod_base = OTHER; note = 2'-O-methyl ribonucleotide
  modified_base 90: mod_base = OTHER; note = 2'-O-methyl ribonucleotide
  modified_base 91: mod_base = OTHER; note = 2'-O-methyl ribonucleotide
  modified_base 92: mod_base = OTHER; note = 2'-O-methyl ribonucleotide
  modified_base 93: mod_base = OTHER; note = 2'-O-methyl ribonucleotide
  modified_base 94: mod_base = OTHER; note = 2'-O-methyl ribonucleotide
  modified_base 95: mod_base = OTHER; note = 2'-O-methyl ribonucleotide
  modified_base 96: mod_base = OTHER; note = 2'-O-methyl ribonucleotide
  modified_base 97: mod_base = OTHER; note = 2'-O-methyl ribonucleotide
  modified_base 98: mod_base = OTHER; note = 2'-O-methyl ribonucleotide
  modified_base 99: mod_base = OTHER; note = 2'-O-methyl ribonucleotide
  modified_base 100: mod_base = OTHER; note = 2'-O-methyl ribonucleotide
  modified_base 9: mod_base = OTHER; note = nebularine
  modified_base 14: mod_base = OTHER; note = nebularine
  modified_base 42: mod_base = OTHER; note = nebularine
  modified_base 57: mod_base = OTHER; note = nebularine
  modified_base 1..3: mod_base = OTHER; note = phosphorothioate linkage
  modified_base 97..100: mod_base = OTHER; note = phosphorothioate linkage

SEQ ID NO: 1978 - RNA, 100 nt, synthetic construct; identical to SEQ ID NO: 1924
  source 1..100: mol_type = other RNA
  modified_base 1: mod_base = OTHER; note = 2'-O-methyl ribonucleotide
  modified_base 2: mod_base = OTHER; note = 2'-O-methyl ribonucleotide
  modified_base 3: mod_base = OTHER; note = 2'-O-methyl ribonucleotide
  modified_base 21: mod_base = OTHER; note = 2'-O-methyl ribonucleotide
  modified_base 28: mod_base = OTHER; note = 2'-O-methyl ribonucleotide
  modified_base 29: mod_base = OTHER; note = 2'-O-methyl ribonucleotide
  modified_base 30: mod_base = OTHER; note = 2'-O-methyl ribonucleotide
  modified_base 31: mod_base = OTHER; note = 2'-O-methyl ribonucleotide
  modified_base 32: mod_base = OTHER; note = 2'-O-methyl ribonucleotide
  modified_base 33: mod_base = OTHER; note = 2'-O-methyl ribonucleotide
  modified_base 34: mod_base = OTHER; note = 2'-O-methyl ribonucleotide
  modified_base 35: mod_base = OTHER; note = 2'-O-methyl ribonucleotide
  modified_base 36: mod_base = OTHER; note = 2'-O-methyl ribonucleotide
  modified_base 37: mod_base = OTHER; note = 2'-O-methyl ribonucleotide
  modified_base 38: mod_base = OTHER; note = 2'-O-methyl ribonucleotide
  modified_base 39: mod_base = OTHER; note = 2'-O-methyl ribonucleotide
  modified_base 40: mod_base = OTHER; note = 2'-O-methyl ribonucleotide
  modified_base 41: mod_base = OTHER; note = 2'-O-methyl ribonucleotide
  modified_base 42: mod_base = OTHER; note = 2'-O-methyl ribonucleotide
  modified_base 46: mod_base = OTHER; note = 2'-O-methyl ribonucleotide
  modified_base 48: mod_base = OTHER; note = 2'-O-methyl ribonucleotide
  modified_base 50: mod_base = OTHER; note = 2'-O-methyl ribonucleotide
  modified_base 52: mod_base = OTHER; note = 2'-O-methyl ribonucleotide
  modified_base 53: mod_base = OTHER; note = 2'-O-methyl ribonucleotide
  modified_base 54: mod_base = OTHER; note = 2'-O-methyl ribonucleotide
  modified_base 55: mod_base = OTHER; note = 2'-O-methyl ribonucleotide
  modified_base 56: mod_base = OTHER; note = 2'-O-methyl ribonucleotide
  modified_base 57: mod_base = OTHER; note = 2'-O-methyl ribonucleotide
  modified_base 60: mod_base = OTHER; note = 2'-O-methyl ribonucleotide
  modified_base 61: mod_base = OTHER; note = 2'-O-methyl ribonucleotide
  modified_base 66: mod_base = OTHER; note = 2'-O-methyl ribonucleotide
  modified_base 67: mod_base = OTHER; note = 2'-O-methyl ribonucleotide
  modified_base 70: mod_base = OTHER; note = 2'-O-methyl ribonucleotide
  modified_base 71: mod_base = OTHER; note = 2'-O-methyl ribonucleotide
  modified_base 72: mod_base = OTHER; note = 2'-O-methyl ribonucleotide
  modified_base 73: mod_base = OTHER; note = 2'-O-methyl ribonucleotide
  modified_base 74: mod_base = OTHER; note = 2'-O-methyl ribonucleotide
  modified_base 75: mod_base = OTHER; note = 2'-O-methyl ribonucleotide
  modified_base 76: mod_base = OTHER; note = 2'-O-methyl ribonucleotide
  modified_base 77: mod_base = OTHER; note = 2'-O-methyl ribonucleotide
  modified_base 78: mod_base = OTHER; note = 2'-O-methyl ribonucleotide
  modified_base 79: mod_base = OTHER; note = 2'-O-methyl ribonucleotide
  modified_base 80: mod_base = OTHER; note = 2'-O-methyl ribonucleotide
  modified_base 81: mod_base = OTHER; note = 2'-O-methyl ribonucleotide
  modified_base 83: mod_base = OTHER; note = 2'-O-methyl ribonucleotide
  modified_base 84: mod_base = OTHER; note = 2'-O-methyl ribonucleotide
  modified_base 85: mod_base = OTHER; note = 2'-O-methyl ribonucleotide
  modified_base 86: mod_base = OTHER; note = 2'-O-methyl ribonucleotide
  modified_base 87: mod_base = OTHER; note = 2'-O-methyl ribonucleotide
  modified_base 88: mod_base = OTHER; note = 2'-O-methyl ribonucleotide
  modified_base 89: mod_base = OTHER; note = 2'-O-methyl ribonucleotide
  modified_base 90: mod_base = OTHER; note = 2'-O-methyl ribonucleotide
  modified_base 91: mod_base = OTHER; note = 2'-O-methyl ribonucleotide
  modified_base 92: mod_base = OTHER; note = 2'-O-methyl ribonucleotide
  modified_base 93: mod_base = OTHER; note = 2'-O-methyl ribonucleotide
  modified_base 94: mod_base = OTHER; note = 2'-O-methyl ribonucleotide
  modified_base 95: mod_base = OTHER; note = 2'-O-methyl ribonucleotide
  modified_base 96: mod_base = OTHER; note = 2'-O-methyl ribonucleotide
  modified_base 97: mod_base = OTHER; note = 2'-O-methyl ribonucleotide
  modified_base 98: mod_base = OTHER; note = 2'-O-methyl ribonucleotide
  modified_base 99: mod_base = OTHER; note = 2'-O-methyl ribonucleotide
  modified_base 100: mod_base = OTHER; note = 2'-O-methyl ribonucleotide
  modified_base 9: mod_base = OTHER; note = nebularine
  modified_base 14: mod_base = OTHER; note = nebularine
  modified_base 57: mod_base = OTHER; note = nebularine
  modified_base 1..3: mod_base = OTHER; note = phosphorothioate linkage
  modified_base 97..100: mod_base = OTHER; note = phosphorothioate linkage

SEQ ID NO: 1979 - RNA, 100 nt, synthetic construct; identical to SEQ ID NO: 1925
  source 1..100: mol_type = other RNA
  modified_base 1: mod_base = OTHER; note = 2'-O-methyl ribonucleotide
  modified_base 2: mod_base = OTHER; note = 2'-O-methyl ribonucleotide
  modified_base 3: mod_base = OTHER; note = 2'-O-methyl ribonucleotide
  modified_base 21: mod_base = OTHER; note = 2'-O-methyl ribonucleotide
  modified_base 28: mod_base = OTHER; note = 2'-O-methyl ribonucleotide
  modified_base 29: mod_base = OTHER; note = 2'-O-methyl ribonucleotide
  modified_base 30: mod_base = OTHER; note = 2'-O-methyl ribonucleotide
  modified_base 31: mod_base = OTHER; note = 2'-O-methyl ribonucleotide
  modified_base 32: mod_base = OTHER; note = 2'-O-methyl ribonucleotide
  modified_base 33: mod_base = OTHER; note = 2'-O-methyl ribonucleotide
  modified_base 34: mod_base = OTHER; note = 2'-O-methyl ribonucleotide
  modified_base 35: mod_base = OTHER; note = 2'-O-methyl ribonucleotide
  modified_base 36: mod_base = OTHER; note = 2'-O-methyl ribonucleotide
  modified_base 37: mod_base = OTHER; note = 2'-O-methyl ribonucleotide
  modified_base 38: mod_base = OTHER; note = 2'-O-methyl ribonucleotide
  modified_base 39: mod_base = OTHER; note = 2'-O-methyl ribonucleotide
  modified_base 40: mod_base = OTHER; note = 2'-O-methyl ribonucleotide
  modified_base 41: mod_base = OTHER; note = 2'-O-methyl ribonucleotide
  modified_base 42: mod_base = OTHER; note = 2'-O-methyl ribonucleotide
  modified_base 46: mod_base = OTHER; note = 2'-O-methyl ribonucleotide
  modified_base 48: mod_base = OTHER; note = 2'-O-methyl ribonucleotide
  modified_base 50: mod_base = OTHER; note = 2'-O-methyl ribonucleotide
  modified_base 52: mod_base = OTHER; note = 2'-O-methyl ribonucleotide
  modified_base 53: mod_base = OTHER; note = 2'-O-methyl ribonucleotide
  modified_base 54: mod_base = OTHER; note = 2'-O-methyl ribonucleotide
  modified_base 55: mod_base = OTHER; note = 2'-O-methyl ribonucleotide
  modified_base 56: mod_base = OTHER; note = 2'-O-methyl ribonucleotide
  modified_base 57: mod_base = OTHER; note = 2'-O-methyl ribonucleotide
  modified_base 60: mod_base = OTHER; note = 2'-O-methyl ribonucleotide
  modified_base 61: mod_base = OTHER; note = 2'-O-methyl ribonucleotide
  modified_base 66: mod_base = OTHER; note = 2'-O-methyl ribonucleotide
  modified_base 67: mod_base = OTHER; note = 2'-O-methyl ribonucleotide
  modified_base 70: mod_base = OTHER; note = 2'-O-methyl ribonucleotide
  modified_base 71: mod_base = OTHER; note = 2'-O-methyl ribonucleotide
  modified_base 72: mod_base = OTHER; note = 2'-O-methyl ribonucleotide
  modified_base 73: mod_base = OTHER; note = 2'-O-methyl ribonucleotide
  modified_base 74: mod_base = OTHER; note = 2'-O-methyl ribonucleotide
  modified_base 75: mod_base = OTHER; note = 2'-O-methyl ribonucleotide
  modified_base 76: mod_base = OTHER; note = 2'-O-methyl ribonucleotide
  modified_base 77: mod_base = OTHER; note = 2'-O-methyl ribonucleotide
  modified_base 78: mod_base = OTHER; note = 2'-O-methyl ribonucleotide
  modified_base 79: mod_base = OTHER; note = 2'-O-methyl ribonucleotide
  modified_base 80: mod_base = OTHER; note = 2'-O-methyl ribonucleotide
  modified_base 81: mod_base = OTHER; note = 2'-O-methyl ribonucleotide
  modified_base 83: mod_base = OTHER; note = 2'-O-methyl ribonucleotide
  modified_base 84: mod_base = OTHER; note = 2'-O-methyl ribonucleotide
  modified_base 85: mod_base = OTHER; note = 2'-O-methyl ribonucleotide
  modified_base 86: mod_base = OTHER; note = 2'-O-methyl ribonucleotide
  modified_base 87: mod_base = OTHER; note = 2'-O-methyl ribonucleotide
  modified_base 88: mod_base = OTHER; note = 2'-O-methyl ribonucleotide
  modified_base 89: mod_base = OTHER; note = 2'-O-methyl ribonucleotide
  modified_base 90: mod_base = OTHER; note = 2'-O-methyl ribonucleotide
  modified_base 91: mod_base = OTHER; note = 2'-O-methyl ribonucleotide
  modified_base 92: mod_base = OTHER; note = 2'-O-methyl ribonucleotide
  modified_base 93: mod_base = OTHER; note = 2'-O-methyl ribonucleotide
  modified_base 94: mod_base = OTHER; note = 2'-O-methyl ribonucleotide
  modified_base 95: mod_base = OTHER; note = 2'-O-methyl ribonucleotide
  modified_base 96: mod_base = OTHER; note = 2'-O-methyl ribonucleotide
  modified_base 97: mod_base = OTHER; note = 2'-O-methyl ribonucleotide
  modified_base 98: mod_base = OTHER; note = 2'-O-methyl ribonucleotide
  modified_base 99: mod_base = OTHER; note = 2'-O-methyl ribonucleotide
  modified_base 100: mod_base = OTHER; note = 2'-O-methyl ribonucleotide
  modified_base 9: mod_base = OTHER; note = nebularine
  modified_base 14: mod_base = OTHER; note = nebularine
  modified_base 28: mod_base = OTHER; note = nebularine
  modified_base 1..3: mod_base = OTHER; note = phosphorothioate linkage
  modified_base 97..100: mod_base = OTHER; note = phosphorothioate linkage

SEQ ID NO: 1980 - RNA, 100 nt, synthetic construct; identical to SEQ ID NO: 1926
  source 1..100: mol_type = other RNA
  modified_base 1: mod_base = OTHER; note = 2'-O-methyl ribonucleotide
  modified_base 2: mod_base = OTHER; note = 2'-O-methyl ribonucleotide
  modified_base 3: mod_base = OTHER; note = 2'-O-methyl ribonucleotide
  modified_base 21: mod_base = OTHER; note = 2'-O-methyl ribonucleotide
  modified_base 28: mod_base = OTHER; note = 2'-O-methyl ribonucleotide
  modified_base 29: mod_base = OTHER; note = 2'-O-methyl ribonucleotide
  modified_base 30: mod_base = OTHER; note = 2'-O-methyl ribonucleotide
  modified_base 31: mod_base = OTHER; note = 2'-O-methyl ribonucleotide
  modified_base 32: mod_base = OTHER; note = 2'-O-methyl ribonucleotide
  modified_base 33: mod_base = OTHER; note = 2'-O-methyl ribonucleotide
  modified_base 34: mod_base = OTHER; note = 2'-O-methyl ribonucleotide
  modified_base 35: mod_base = OTHER; note = 2'-O-methyl ribonucleotide
  modified_base 36: mod_base = OTHER; note = 2'-O-methyl ribonucleotide
  modified_base 37: mod_base = OTHER; note = 2'-O-methyl ribonucleotide
  modified_base 38: mod_base = OTHER; note = 2'-O-methyl ribonucleotide
  modified_base 39: mod_base = OTHER; note = 2'-O-methyl ribonucleotide
  modified_base 40: mod_base = OTHER; note = 2'-O-methyl ribonucleotide
  modified_base 41: mod_base = OTHER; note = 2'-O-methyl ribonucleotide
  modified_base 42: mod_base = OTHER; note = 2'-O-methyl ribonucleotide
  modified_base 46: mod_base = OTHER; note = 2'-O-methyl ribonucleotide
  modified_base 48: mod_base = OTHER; note = 2'-O-methyl ribonucleotide
  modified_base 50: mod_base = OTHER; note = 2'-O-methyl ribonucleotide
  modified_base 52: mod_base = OTHER; note = 2'-O-methyl ribonucleotide
  modified_base 53: mod_base = OTHER; note = 2'-O-methyl ribonucleotide
  modified_base 54: mod_base = OTHER; note = 2'-O-methyl ribonucleotide
  modified_base 55: mod_base = OTHER; note = 2'-O-methyl ribonucleotide
  modified_base 56: mod_base = OTHER; note = 2'-O-methyl ribonucleotide
  modified_base 57: mod_base = OTHER; note = 2'-O-methyl ribonucleotide
  modified_base 60: mod_base = OTHER; note = 2'-O-methyl ribonucleotide
  modified_base 61: mod_base = OTHER; note = 2'-O-methyl ribonucleotide
  modified_base 66: mod_base = OTHER; note = 2'-O-methyl ribonucleotide
  modified_base 67: mod_base = OTHER; note = 2'-O-methyl ribonucleotide
  modified_base 70: mod_base = OTHER; note = 2'-O-methyl ribonucleotide
  modified_base 71: mod_base = OTHER; note = 2'-O-methyl ribonucleotide
  modified_base 72: mod_base = OTHER; note = 2'-O-methyl ribonucleotide
  modified_base 73: mod_base = OTHER; note = 2'-O-methyl ribonucleotide
  modified_base 74: mod_base = OTHER; note = 2'-O-methyl ribonucleotide
  modified_base 75: mod_base = OTHER; note = 2'-O-methyl ribonucleotide
  modified_base 76: mod_base = OTHER; note = 2'-O-methyl ribonucleotide
  modified_base 77: mod_base = OTHER; note = 2'-O-methyl ribonucleotide
  modified_base 78: mod_base = OTHER; note = 2'-O-methyl ribonucleotide
  modified_base 79: mod_base = OTHER; note = 2'-O-methyl ribonucleotide
  modified_base 80: mod_base = OTHER; note = 2'-O-methyl ribonucleotide
  modified_base 81: mod_base = OTHER; note = 2'-O-methyl ribonucleotide
  modified_base 83: mod_base = OTHER; note = 2'-O-methyl ribonucleotide
  modified_base 84: mod_base = OTHER; note = 2'-O-methyl ribonucleotide
  modified_base 85: mod_base = OTHER; note = 2'-O-methyl ribonucleotide
  modified_base 86: mod_base = OTHER; note = 2'-O-methyl ribonucleotide
  modified_base 87: mod_base = OTHER; note = 2'-O-methyl ribonucleotide
  modified_base 88: mod_base = OTHER; note = 2'-O-methyl ribonucleotide
  modified_base 89: mod_base = OTHER; note = 2'-O-methyl ribonucleotide
  modified_base 90: mod_base = OTHER; note = 2'-O-methyl ribonucleotide
  modified_base 91: mod_base = OTHER; note = 2'-O-methyl ribonucleotide
  modified_base 92: mod_base = OTHER; note = 2'-O-methyl ribonucleotide
  modified_base 93: mod_base = OTHER; note = 2'-O-methyl ribonucleotide
  modified_base 94: mod_base = OTHER; note = 2'-O-methyl ribonucleotide
  modified_base 95: mod_base = OTHER; note = 2'-O-methyl ribonucleotide
  modified_base 96: mod_base = OTHER; note = 2'-O-methyl ribonucleotide
  modified_base 97: mod_base = OTHER; note = 2'-O-methyl ribonucleotide
  modified_base 98: mod_base = OTHER; note = 2'-O-methyl ribonucleotide
  modified_base 99: mod_base = OTHER; note = 2'-O-methyl ribonucleotide
  modified_base 100: mod_base = OTHER; note = 2'-O-methyl ribonucleotide
  modified_base 9: mod_base = OTHER; note = nebularine
  modified_base 14: mod_base = OTHER; note = nebularine
  modified_base 42: mod_base = OTHER; note = nebularine
  modified_base 1..3: mod_base = OTHER; note = phosphorothioate linkage
  modified_base 97..100: mod_base = OTHER; note = phosphorothioate linkage

SEQ ID NO: 1981 - RNA, 100 nt, synthetic construct; identical to SEQ ID NO: 1927
  source 1..100: mol_type = other RNA
  modified_base 1: mod_base = OTHER; note = 2'-O-methyl ribonucleotide
  modified_base 2: mod_base = OTHER; note = 2'-O-methyl ribonucleotide
  modified_base 3: mod_base = OTHER; note = 2'-O-methyl ribonucleotide
  modified_base 21: mod_base = OTHER; note = 2'-O-methyl ribonucleotide
  modified_base 28: mod_base = OTHER; note = 2'-O-methyl ribonucleotide
  modified_base 29: mod_base = OTHER; note = 2'-O-methyl ribonucleotide
  modified_base 30: mod_base = OTHER; note = 2'-O-methyl ribonucleotide
  modified_base 31: mod_base = OTHER; note = 2'-O-methyl ribonucleotide
  modified_base 32: mod_base = OTHER; note = 2'-O-methyl ribonucleotide
  modified_base 33: mod_base = OTHER; note = 2'-O-methyl ribonucleotide
  modified_base 34: mod_base = OTHER; note = 2'-O-methyl ribonucleotide
  modified_base 35: mod_base = OTHER; note = 2'-O-methyl ribonucleotide
  modified_base 36: mod_base = OTHER; note = 2'-O-methyl ribonucleotide
  modified_base 37: mod_base = OTHER; note = 2'-O-methyl ribonucleotide
  modified_base 38: mod_base = OTHER; note = 2'-O-methyl ribonucleotide
  modified_base 39: mod_base = OTHER; note = 2'-O-methyl ribonucleotide
  modified_base 40: mod_base = OTHER; note = 2'-O-methyl ribonucleotide
  modified_base 41: mod_base = OTHER; note = 2'-O-methyl ribonucleotide
  modified_base 42: mod_base = OTHER; note = 2'-O-methyl ribonucleotide
  modified_base 46: mod_base = OTHER; note = 2'-O-methyl ribonucleotide
  modified_base 48: mod_base = OTHER; note = 2'-O-methyl ribonucleotide
  modified_base 50: mod_base = OTHER; note = 2'-O-methyl ribonucleotide
  modified_base 52: mod_base = OTHER; note = 2'-O-methyl ribonucleotide
  modified_base 53: mod_base = OTHER; note = 2'-O-methyl ribonucleotide
  modified_base 54: mod_base = OTHER; note = 2'-O-methyl ribonucleotide
  modified_base 55: mod_base = OTHER; note = 2'-O-methyl ribonucleotide
  modified_base 56: mod_base = OTHER; note = 2'-O-methyl ribonucleotide
  modified_base 57: mod_base = OTHER; note = 2'-O-methyl ribonucleotide
  modified_base 60: mod_base = OTHER; note = 2'-O-methyl ribonucleotide
  modified_base 61: mod_base = OTHER; note = 2'-O-methyl ribonucleotide
  modified_base 66: mod_base = OTHER; note = 2'-O-methyl ribonucleotide
  modified_base 67: mod_base = OTHER; note = 2'-O-methyl ribonucleotide
  modified_base 70: mod_base = OTHER; note = 2'-O-methyl ribonucleotide
  modified_base 71: mod_base = OTHER; note = 2'-O-methyl ribonucleotide
  modified_base 72: mod_base = OTHER; note = 2'-O-methyl ribonucleotide
  modified_base 73: mod_base = OTHER; note = 2'-O-methyl ribonucleotide
  modified_base 74: mod_base = OTHER; note = 2'-O-methyl ribonucleotide
  modified_base 75: mod_base = OTHER; note = 2'-O-methyl ribonucleotide
  modified_base 76: mod_base = OTHER; note = 2'-O-methyl ribonucleotide
  modified_base 77: mod_base = OTHER; note = 2'-O-methyl ribonucleotide
  modified_base 78: mod_base = OTHER; note = 2'-O-methyl ribonucleotide
  modified_base 79: mod_base = OTHER; note = 2'-O-methyl ribonucleotide
  modified_base 80: mod_base = OTHER; note = 2'-O-methyl ribonucleotide
  modified_base 81: mod_base = OTHER; note = 2'-O-methyl ribonucleotide
  modified_base 83: mod_base = OTHER; note = 2'-O-methyl ribonucleotide
  modified_base 84: mod_base = OTHER; note = 2'-O-methyl ribonucleotide
  modified_base 85: mod_base = OTHER; note = 2'-O-methyl ribonucleotide
  modified_base 86: mod_base = OTHER; note = 2'-O-methyl ribonucleotide
  modified_base 87: mod_base = OTHER; note = 2'-O-methyl ribonucleotide
  modified_base 88: mod_base = OTHER; note = 2'-O-methyl ribonucleotide
  modified_base 89: mod_base = OTHER; note = 2'-O-methyl ribonucleotide
  modified_base 90: mod_base = OTHER; note = 2'-O-methyl ribonucleotide
  modified_base 91: mod_base = OTHER; note = 2'-O-methyl ribonucleotide
  modified_base 92: mod_base = OTHER; note = 2'-O-methyl ribonucleotide
  modified_base 93: mod_base = OTHER; note = 2'-O-methyl ribonucleotide
  modified_base 94: mod_base = OTHER; note = 2'-O-methyl ribonucleotide
  modified_base 95: mod_base = OTHER; note = 2'-O-methyl ribonucleotide
  modified_base 96: mod_base = OTHER; note = 2'-O-methyl ribonucleotide
  modified_base 97: mod_base = OTHER; note = 2'-O-methyl ribonucleotide
  modified_base 98: mod_base = OTHER; note = 2'-O-methyl ribonucleotide
  modified_base 99: mod_base = OTHER; note = 2'-O-methyl ribonucleotide
  modified_base 100: mod_base = OTHER; note = 2'-O-methyl ribonucleotide
  modified_base 9: mod_base = OTHER; note = nebularine
  modified_base 14: mod_base = OTHER; note = nebularine
  modified_base 34: mod_base = OTHER; note = nebularine
  modified_base 42: mod_base = OTHER; note = nebularine
  modified_base 1..3: mod_base = OTHER; note = phosphorothioate linkage
  modified_base 97..100: mod_base = OTHER; note = phosphorothioate linkage

SEQ ID NO: 1982 - RNA, 100 nt, synthetic construct; identical to SEQ ID NO: 1928
  source 1..100: mol_type = other RNA
  modified_base 1: mod_base = OTHER; note = 2'-O-methyl ribonucleotide
  modified_base 2: mod_base = OTHER; note = 2'-O-methyl ribonucleotide
  modified_base 3: mod_base = OTHER; note = 2'-O-methyl ribonucleotide
  modified_base 21: mod_base = OTHER; note = 2'-O-methyl ribonucleotide
  modified_base 28: mod_base = OTHER; note = 2'-O-methyl ribonucleotide
  modified_base 29: mod_base = OTHER; note = 2'-O-methyl ribonucleotide
  modified_base 30: mod_base = OTHER; note = 2'-O-methyl ribonucleotide
  modified_base 31: mod_base = OTHER; note = 2'-O-methyl ribonucleotide
  modified_base 32: mod_base = OTHER; note = 2'-O-methyl ribonucleotide
  modified_base 33: mod_base = OTHER; note = 2'-O-methyl ribonucleotide
  modified_base 34: mod_base = OTHER; note = 2'-O-methyl ribonucleotide
  modified_base 35: mod_base = OTHER; note = 2'-O-methyl ribonucleotide
  modified_base 36: mod_base = OTHER; note = 2'-O-methyl ribonucleotide
  modified_base 37: mod_base = OTHER; note = 2'-O-methyl ribonucleotide
  modified_base 38: mod_base = OTHER; note = 2'-O-methyl ribonucleotide
  modified_base 39: mod_base = OTHER; note = 2'-O-methyl ribonucleotide
  modified_base 40: mod_base = OTHER; note = 2'-O-methyl ribonucleotide
  modified_base 41: mod_base = OTHER; note = 2'-O-methyl ribonucleotide
  modified_base 42: mod_base = OTHER; note = 2'-O-methyl ribonucleotide
  modified_base 46: mod_base = OTHER; note = 2'-O-methyl ribonucleotide
  modified_base 48: mod_base = OTHER; note = 2'-O-methyl ribonucleotide
  modified_base 50: mod_base = OTHER; note = 2'-O-methyl ribonucleotide
  modified_base 52: mod_base = OTHER; note = 2'-O-methyl ribonucleotide
  modified_base 53: mod_base = OTHER; note = 2'-O-methyl ribonucleotide
  modified_base 54: mod_base = OTHER; note = 2'-O-methyl ribonucleotide
  modified_base 55: mod_base = OTHER; note = 2'-O-methyl ribonucleotide
  modified_base 56: mod_base = OTHER; note = 2'-O-methyl ribonucleotide
  modified_base 57: mod_base = OTHER; note = 2'-O-methyl ribonucleotide
  modified_base 60: mod_base = OTHER; note = 2'-O-methyl ribonucleotide
  modified_base 61: mod_base = OTHER; note = 2'-O-methyl ribonucleotide
  modified_base 66: mod_base = OTHER; note = 2'-O-methyl ribonucleotide
  modified_base 67: mod_base = OTHER; note = 2'-O-methyl ribonucleotide
  modified_base 70: mod_base = OTHER; note = 2'-O-methyl ribonucleotide
  modified_base 71: mod_base = OTHER; note = 2'-O-methyl ribonucleotide
  modified_base 72: mod_base = OTHER; note = 2'-O-methyl ribonucleotide
  modified_base 73: mod_base = OTHER; note = 2'-O-methyl ribonucleotide
  modified_base 74: mod_base = OTHER; note = 2'-O-methyl ribonucleotide
  modified_base 75: mod_base = OTHER; note = 2'-O-methyl ribonucleotide
  modified_base 76: mod_base = OTHER; note = 2'-O-methyl ribonucleotide
  modified_base 77: mod_base = OTHER; note = 2'-O-methyl ribonucleotide
  modified_base 78: mod_base = OTHER; note = 2'-O-methyl ribonucleotide
  modified_base 79: mod_base = OTHER; note = 2'-O-methyl ribonucleotide
  modified_base 80: mod_base = OTHER; note = 2'-O-methyl ribonucleotide
  modified_base 81: mod_base = OTHER; note = 2'-O-methyl ribonucleotide
  modified_base 83: mod_base = OTHER; note = 2'-O-methyl ribonucleotide
  modified_base 84: mod_base = OTHER; note = 2'-O-methyl ribonucleotide
  modified_base 85: mod_base = OTHER; note = 2'-O-methyl ribonucleotide
  modified_base 86: mod_base = OTHER; note = 2'-O-methyl ribonucleotide
  modified_base 87: mod_base = OTHER; note = 2'-O-methyl ribonucleotide
  modified_base 88: mod_base = OTHER; note = 2'-O-methyl ribonucleotide
  modified_base 89: mod_base = OTHER; note = 2'-O-methyl ribonucleotide
  modified_base 90: mod_base = OTHER; note = 2'-O-methyl ribonucleotide
  modified_base 91: mod_base = OTHER; note = 2'-O-methyl ribonucleotide
  modified_base 92: mod_base = OTHER; note = 2'-O-methyl ribonucleotide
  modified_base 93: mod_base = OTHER; note = 2'-O-methyl ribonucleotide
  modified_base 94: mod_base = OTHER; note = 2'-O-methyl ribonucleotide
  modified_base 95: mod_base = OTHER; note = 2'-O-methyl ribonucleotide
  modified_base 96: mod_base = OTHER; note = 2'-O-methyl ribonucleotide
  modified_base 97: mod_base = OTHER; note = 2'-O-methyl ribonucleotide
  modified_base 98: mod_base = OTHER; note = 2'-O-methyl ribonucleotide
  modified_base 99: mod_base = OTHER; note = 2'-O-methyl ribonucleotide
  modified_base 100: mod_base = OTHER; note = 2'-O-methyl ribonucleotide
  modified_base 14: mod_base = OTHER; note = nebularine
  modified_base 28: mod_base = OTHER; note = nebularine
  modified_base 34: mod_base = OTHER; note = nebularine
  modified_base 42: mod_base = OTHER; note = nebularine
  modified_base 57: mod_base = OTHER; note = nebularine
  modified_base 1..3: mod_base = OTHER; note = phosphorothioate linkage
  modified_base 97..100: mod_base = OTHER; note = phosphorothioate linkage

SEQ ID NO: 1983 - RNA, 100 nt, synthetic construct; identical to SEQ ID NO: 1930
  source 1..100: mol_type = other RNA
  modified_base 1: mod_base = OTHER; note = 2'-O-methyl ribonucleotide
  modified_base 2: mod_base = OTHER; note = 2'-O-methyl ribonucleotide
  modified_base 3: mod_base = OTHER; note = 2'-O-methyl ribonucleotide
  modified_base 21: mod_base = OTHER; note = 2'-O-methyl ribonucleotide
  modified_base 28: mod_base = OTHER; note = 2'-O-methyl ribonucleotide
  modified_base 29: mod_base = OTHER; note = 2'-O-methyl ribonucleotide
  modified_base 30: mod_base = OTHER; note = 2'-O-methyl ribonucleotide
  modified_base 31: mod_base = OTHER; note = 2'-O-methyl ribonucleotide
  modified_base 32: mod_base = OTHER; note = 2'-O-methyl ribonucleotide
  modified_base 33: mod_base = OTHER; note = 2'-O-methyl ribonucleotide
  modified_base 34: mod_base = OTHER; note = 2'-O-methyl ribonucleotide
  modified_base 35: mod_base = OTHER; note = 2'-O-methyl ribonucleotide
  modified_base 36: mod_base = OTHER; note = 2'-O-methyl ribonucleotide
  modified_base 37: mod_base = OTHER; note = 2'-O-methyl ribonucleotide
  modified_base 38: mod_base = OTHER; note = 2'-O-methyl ribonucleotide
  modified_base 39: mod_base = OTHER; note = 2'-O-methyl ribonucleotide
  modified_base 40: mod_base = OTHER; note = 2'-O-methyl ribonucleotide
  modified_base 41: mod_base = OTHER; note = 2'-O-methyl ribonucleotide
  modified_base 42: mod_base = OTHER; note = 2'-O-methyl ribonucleotide
  modified_base 46: mod_base = OTHER; note = 2'-O-methyl ribonucleotide
  modified_base 48: mod_base = OTHER; note = 2'-O-methyl ribonucleotide
  modified_base 50: mod_base = OTHER; note = 2'-O-methyl ribonucleotide
  modified_base 52: mod_base = OTHER; note = 2'-O-methyl ribonucleotide
  modified_base 53: mod_base = OTHER; note = 2'-O-methyl ribonucleotide
  modified_base 54: mod_base = OTHER; note = 2'-O-methyl ribonucleotide
  modified_base 55: mod_base = OTHER; note = 2'-O-methyl ribonucleotide
  modified_base 56: mod_base = OTHER; note = 2'-O-methyl ribonucleotide
  modified_base 57: mod_base = OTHER; note = 2'-O-methyl ribonucleotide
  modified_base 60: mod_base = OTHER; note = 2'-O-methyl ribonucleotide
  modified_base 61: mod_base = OTHER; note = 2'-O-methyl ribonucleotide
  modified_base 66: mod_base = OTHER; note = 2'-O-methyl ribonucleotide
  modified_base 67: mod_base = OTHER; note = 2'-O-methyl ribonucleotide
  modified_base 70: mod_base = OTHER; note = 2'-O-methyl ribonucleotide
  modified_base 71: mod_base = OTHER; note = 2'-O-methyl ribonucleotide
  modified_base 72: mod_base = OTHER; note = 2'-O-methyl ribonucleotide
  modified_base 73: mod_base = OTHER; note = 2'-O-methyl ribonucleotide
  modified_base 74: mod_base = OTHER; note = 2'-O-methyl ribonucleotide
  modified_base 75: mod_base = OTHER; note = 2'-O-methyl ribonucleotide
  modified_base 76: mod_base = OTHER; note = 2'-O-methyl ribonucleotide
  modified_base 77: mod_base = OTHER; note = 2'-O-methyl ribonucleotide
  modified_base 78: mod_base = OTHER; note = 2'-O-methyl ribonucleotide
  modified_base 79: mod_base = OTHER; note = 2'-O-methyl ribonucleotide
  modified_base 80: mod_base = OTHER; note = 2'-O-methyl ribonucleotide
  modified_base 81: mod_base = OTHER; note = 2'-O-methyl ribonucleotide
  modified_base 83: mod_base = OTHER; note = 2'-O-methyl ribonucleotide
  modified_base 84: mod_base = OTHER; note = 2'-O-methyl ribonucleotide
  modified_base 85: mod_base = OTHER; note = 2'-O-methyl ribonucleotide
  modified_base 86: mod_base = OTHER; note = 2'-O-methyl ribonucleotide
  modified_base 87: mod_base = OTHER; note = 2'-O-methyl ribonucleotide
  modified_base 88: mod_base = OTHER; note = 2'-O-methyl ribonucleotide
  modified_base 89: mod_base = OTHER; note = 2'-O-methyl ribonucleotide
  modified_base 90: mod_base = OTHER; note = 2'-O-methyl ribonucleotide
  modified_base 91: mod_base = OTHER; note = 2'-O-methyl ribonucleotide
  modified_base 92: mod_base = OTHER; note = 2'-O-methyl ribonucleotide
  modified_base 93: mod_base = OTHER; note = 2'-O-methyl ribonucleotide
  modified_base 94: mod_base = OTHER; note = 2'-O-methyl ribonucleotide
  modified_base 95: mod_base = OTHER; note = 2'-O-methyl ribonucleotide
  modified_base 96: mod_base = OTHER; note = 2'-O-methyl ribonucleotide
  modified_base 97: mod_base = OTHER; note = 2'-O-methyl ribonucleotide
  modified_base 98: mod_base = OTHER; note = 2'-O-methyl ribonucleotide
  modified_base 99: mod_base = OTHER; note = 2'-O-methyl ribonucleotide
  modified_base 100: mod_base = OTHER; note = 2'-O-methyl ribonucleotide
  modified_base 14: mod_base = OTHER; note = nebularine
  modified_base 42: mod_base = OTHER; note = nebularine
  modified_base 57: mod_base = OTHER; note = nebularine
  modified_base 1..3: mod_base = OTHER; note = phosphorothioate linkage
  modified_base 97..100: mod_base = OTHER; note = phosphorothioate linkage

SEQ ID NO: 1984 - RNA, 100 nt, synthetic construct; identical to SEQ ID NO: 1931
  source 1..100: mol_type = other RNA
  modified_base 1: mod_base = OTHER; note = 2'-O-methyl ribonucleotide
  modified_base 2: mod_base = OTHER; note = 2'-O-methyl ribonucleotide
  modified_base 3: mod_base = OTHER; note = 2'-O-methyl ribonucleotide
  modified_base 21: mod_base = OTHER; note = 2'-O-methyl ribonucleotide
  modified_base 28: mod_base = OTHER; note = 2'-O-methyl ribonucleotide
  modified_base 29: mod_base = OTHER; note = 2'-O-methyl ribonucleotide
  modified_base 30: mod_base = OTHER; note = 2'-O-methyl ribonucleotide
  modified_base 31: mod_base = OTHER; note = 2'-O-methyl ribonucleotide
  modified_base 32: mod_base = OTHER; note = 2'-O-methyl ribonucleotide
  modified_base 33: mod_base = OTHER; note = 2'-O-methyl ribonucleotide
  modified_base 34: mod_base = OTHER; note = 2'-O-methyl ribonucleotide
  modified_base 35: mod_base = OTHER; note = 2'-O-methyl ribonucleotide
  modified_base 36: mod_base = OTHER; note = 2'-O-methyl ribonucleotide
  modified_base 37: mod_base = OTHER; note = 2'-O-methyl ribonucleotide
  modified_base 38: mod_base = OTHER; note = 2'-O-methyl ribonucleotide
  modified_base 39: mod_base = OTHER; note = 2'-O-methyl ribonucleotide
  modified_base 40: mod_base = OTHER; note = 2'-O-methyl ribonucleotide
  modified_base 41: mod_base = OTHER; note = 2'-O-methyl ribonucleotide
  modified_base 42: mod_base = OTHER; note = 2'-O-methyl ribonucleotide
  modified_base 46: mod_base = OTHER; note = 2'-O-methyl ribonucleotide
  modified_base 48: mod_base = OTHER; note = 2'-O-methyl ribonucleotide
  modified_base 50: mod_base = OTHER; note = 2'-O-methyl ribonucleotide
  modified_base 52: mod_base = OTHER; note = 2'-O-methyl ribonucleotide
  modified_base 53: mod_base = OTHER; note = 2'-O-methyl ribonucleotide
  modified_base 54: mod_base = OTHER; note = 2'-O-methyl ribonucleotide
  modified_base 55: mod_base = OTHER; note = 2'-O-methyl ribonucleotide
  modified_base 56: mod_base = OTHER; note = 2'-O-methyl ribonucleotide
  modified_base 57: mod_base = OTHER; note = 2'-O-methyl ribonucleotide
  modified_base 60: mod_base = OTHER; note = 2'-O-methyl ribonucleotide
  modified_base 61: mod_base = OTHER; note = 2'-O-methyl ribonucleotide
  modified_base 66: mod_base = OTHER; note = 2'-O-methyl ribonucleotide
  modified_base 67: mod_base = OTHER; note = 2'-O-methyl ribonucleotide
  modified_base 70: mod_base = OTHER; note = 2'-O-methyl ribonucleotide
  modified_base 71: mod_base = OTHER; note = 2'-O-methyl ribonucleotide
  modified_base 72: mod_base = OTHER; note = 2'-O-methyl ribonucleotide
  modified_base 73: mod_base = OTHER; note = 2'-O-methyl ribonucleotide
  modified_base 74: mod_base = OTHER; note = 2'-O-methyl ribonucleotide
  modified_base 75: mod_base = OTHER; note = 2'-O-methyl ribonucleotide
  modified_base 76: mod_base = OTHER; note = 2'-O-methyl ribonucleotide
  modified_base 77: mod_base = OTHER; note = 2'-O-methyl ribonucleotide
  modified_base 78: mod_base = OTHER; note = 2'-O-methyl ribonucleotide
  modified_base 79: mod_base = OTHER; note = 2'-O-methyl ribonucleotide
  modified_base 80: mod_base = OTHER; note = 2'-O-methyl ribonucleotide
  modified_base 81: mod_base = OTHER; note = 2'-O-methyl ribonucleotide
  modified_base 83: mod_base = OTHER; note = 2'-O-methyl ribonucleotide
  modified_base 84: mod_base = OTHER; note = 2'-O-methyl ribonucleotide
  modified_base 85: mod_base = OTHER; note = 2'-O-methyl ribonucleotide
  modified_base 86: mod_base = OTHER; note = 2'-O-methyl ribonucleotide
  modified_base 87: mod_base = OTHER; note = 2'-O-methyl ribonucleotide
  modified_base 88: mod_base = OTHER; note = 2'-O-methyl ribonucleotide
  modified_base 89: mod_base = OTHER; note = 2'-O-methyl ribonucleotide
  modified_base 90: mod_base = OTHER; note = 2'-O-methyl ribonucleotide
  modified_base 91: mod_base = OTHER; note = 2'-O-methyl ribonucleotide
  modified_base 92: mod_base = OTHER; note = 2'-O-methyl ribonucleotide
  modified_base 93: mod_base = OTHER; note = 2'-O-methyl ribonucleotide
  modified_base 94: mod_base = OTHER; note = 2'-O-methyl ribonucleotide
  modified_base 95: mod_base = OTHER; note = 2'-O-methyl ribonucleotide
  modified_base 96: mod_base = OTHER; note = 2'-O-methyl ribonucleotide
  modified_base 97: mod_base = OTHER; note = 2'-O-methyl ribonucleotide
  modified_base 98: mod_base = OTHER; note = 2'-O-methyl ribonucleotide
  modified_base 99: mod_base = OTHER; note = 2'-O-methyl ribonucleotide
  modified_base 100: mod_base = OTHER; note = 2'-O-methyl ribonucleotide
  modified_base 14: mod_base = OTHER; note = nebularine
  modified_base 28: mod_base = OTHER; note = nebularine
  modified_base 1..3: mod_base = OTHER; note = phosphorothioate linkage
  modified_base 97..100: mod_base = OTHER; note = phosphorothioate linkage

SEQ ID NO: 1985 - RNA, 100 nt, synthetic construct; identical to SEQ ID NO: 1932
  source 1..100: mol_type = other RNA
  modified_base 1: mod_base = OTHER; note = 2'-O-methyl ribonucleotide
  modified_base 2: mod_base = OTHER; note = 2'-O-methyl ribonucleotide
  modified_base 3: mod_base = OTHER; note = 2'-O-methyl ribonucleotide
  modified_base 21: mod_base = OTHER; note = 2'-O-methyl ribonucleotide
  modified_base 28: mod_base = OTHER; note = 2'-O-methyl ribonucleotide
  modified_base 29: mod_base = OTHER; note = 2'-O-methyl ribonucleotide
  modified_base 30: mod_base = OTHER; note = 2'-O-methyl ribonucleotide
  modified_base 31: mod_base = OTHER; note = 2'-O-methyl ribonucleotide
  modified_base 32: mod_base = OTHER; note = 2'-O-methyl ribonucleotide
  modified_base 33: mod_base = OTHER; note = 2'-O-methyl ribonucleotide
  modified_base 34: mod_base = OTHER; note = 2'-O-methyl ribonucleotide
  modified_base 35: mod_base = OTHER; note = 2'-O-methyl ribonucleotide
  modified_base 36: mod_base = OTHER; note = 2'-O-methyl ribonucleotide
  modified_base 37: mod_base = OTHER; note = 2'-O-methyl ribonucleotide
  modified_base 38: mod_base = OTHER; note = 2'-O-methyl ribonucleotide
  modified_base 39: mod_base = OTHER; note = 2'-O-methyl ribonucleotide
  modified_base 40: mod_base = OTHER; note = 2'-O-methyl ribonucleotide
  modified_base 41: mod_base = OTHER; note = 2'-O-methyl ribonucleotide
  modified_base 42: mod_base = OTHER; note = 2'-O-methyl ribonucleotide
  modified_base 46: mod_base = OTHER; note = 2'-O-methyl ribonucleotide
  modified_base 48: mod_base = OTHER; note = 2'-O-methyl ribonucleotide
  modified_base 50: mod_base = OTHER; note = 2'-O-methyl ribonucleotide
  modified_base 52: mod_base = OTHER; note = 2'-O-methyl ribonucleotide
  modified_base 53: mod_base = OTHER; note = 2'-O-methyl ribonucleotide
  modified_base 54: mod_base = OTHER; note = 2'-O-methyl ribonucleotide
  modified_base 55: mod_base = OTHER; note = 2'-O-methyl ribonucleotide
  modified_base 56: mod_base = OTHER; note = 2'-O-methyl ribonucleotide
  modified_base 57: mod_base = OTHER; note = 2'-O-methyl ribonucleotide
  modified_base 60: mod_base = OTHER; note = 2'-O-methyl ribonucleotide
  modified_base 61: mod_base = OTHER; note = 2'-O-methyl ribonucleotide
  modified_base 66: mod_base = OTHER; note = 2'-O-methyl ribonucleotide
  modified_base 67: mod_base = OTHER; note = 2'-O-methyl ribonucleotide
  modified_base 70: mod_base = OTHER; note = 2'-O-methyl ribonucleotide
  modified_base 71: mod_base = OTHER; note = 2'-O-methyl ribonucleotide
  modified_base 72: mod_base = OTHER; note = 2'-O-methyl ribonucleotide
  modified_base 73: mod_base = OTHER; note = 2'-O-methyl ribonucleotide
  modified_base 74: mod_base = OTHER; note = 2'-O-methyl ribonucleotide
  modified_base 75: mod_base = OTHER; note = 2'-O-methyl ribonucleotide
  modified_base 76: mod_base = OTHER; note = 2'-O-methyl ribonucleotide
  modified_base 77: mod_base = OTHER; note = 2'-O-methyl ribonucleotide
  modified_base 78: mod_base = OTHER; note = 2'-O-methyl ribonucleotide
  modified_base 79: mod_base = OTHER; note = 2'-O-methyl ribonucleotide
  modified_base 80: mod_base = OTHER; note = 2'-O-methyl ribonucleotide
  modified_base 81: mod_base = OTHER; note = 2'-O-methyl ribonucleotide
  modified_base 83: mod_base = OTHER; note = 2'-O-methyl ribonucleotide
  modified_base 84: mod_base = OTHER; note = 2'-O-methyl ribonucleotide
  modified_base 85: mod_base = OTHER; note = 2'-O-methyl ribonucleotide
  modified_base 86: mod_base = OTHER; note = 2'-O-methyl ribonucleotide
  modified_base 87: mod_base = OTHER; note = 2'-O-methyl ribonucleotide
  modified_base 88: mod_base = OTHER; note = 2'-O-methyl ribonucleotide
  modified_base 89: mod_base = OTHER; note = 2'-O-methyl ribonucleotide
  modified_base 90: mod_base = OTHER; note = 2'-O-methyl ribonucleotide
  modified_base 91: mod_base = OTHER; note = 2'-O-methyl ribonucleotide
  modified_base 92: mod_base = OTHER; note = 2'-O-methyl ribonucleotide
  modified_base 93: mod_base = OTHER; note = 2'-O-methyl ribonucleotide
  modified_base 94: mod_base = OTHER; note = 2'-O-methyl ribonucleotide
  modified_base 95: mod_base = OTHER; note = 2'-O-methyl ribonucleotide
  modified_base 96: mod_base = OTHER; note = 2'-O-methyl ribonucleotide
  modified_base 97: mod_base = OTHER; note = 2'-O-methyl ribonucleotide
  modified_base 98: mod_base = OTHER; note = 2'-O-methyl ribonucleotide
  modified_base 99: mod_base = OTHER; note = 2'-O-methyl ribonucleotide
  modified_base 100: mod_base = OTHER; note = 2'-O-methyl ribonucleotide
  modified_base 14: mod_base = OTHER; note = nebularine
  modified_base 42: mod_base = OTHER; note = nebularine
  modified_base 1..3: mod_base = OTHER; note = phosphorothioate linkage
  modified_base 97..100: mod_base = OTHER; note = phosphorothioate linkage

SEQ ID NO: 1986 - RNA, 100 nt, synthetic construct; identical to SEQ ID NO: 1933
  source 1..100: mol_type = other RNA
  modified_base 1: mod_base = OTHER; note = 2'-O-methyl ribonucleotide
  modified_base 2: mod_base = OTHER; note = 2'-O-methyl ribonucleotide
  modified_base 3: mod_base = OTHER; note = 2'-O-methyl ribonucleotide
  modified_base 21: mod_base = OTHER; note = 2'-O-methyl ribonucleotide
  modified_base 28: mod_base = OTHER; note = 2'-O-methyl ribonucleotide
  modified_base 29: mod_base = OTHER; note = 2'-O-methyl ribonucleotide
  modified_base 30: mod_base = OTHER; note = 2'-O-methyl ribonucleotide
  modified_base 31: mod_base = OTHER; note = 2'-O-methyl ribonucleotide
  modified_base 32: mod_base = OTHER; note = 2'-O-methyl ribonucleotide
  modified_base 33: mod_base = OTHER; note = 2'-O-methyl ribonucleotide
  modified_base 34: mod_base = OTHER; note = 2'-O-methyl ribonucleotide
  modified_base 35: mod_base = OTHER; note = 2'-O-methyl ribonucleotide
  modified_base 36: mod_base = OTHER; note = 2'-O-methyl ribonucleotide
  modified_base 37: mod_base = OTHER; note = 2'-O-methyl ribonucleotide
  modified_base 38: mod_base = OTHER; note = 2'-O-methyl ribonucleotide
  modified_base 39: mod_base = OTHER; note = 2'-O-methyl ribonucleotide
  modified_base 40: mod_base = OTHER; note = 2'-O-methyl ribonucleotide
  modified_base 41: mod_base = OTHER; note = 2'-O-methyl ribonucleotide
  modified_base 42: mod_base = OTHER; note = 2'-O-methyl ribonucleotide
  modified_base 46: mod_base = OTHER; note = 2'-O-methyl ribonucleotide
  modified_base 48: mod_base = OTHER; note = 2'-O-methyl ribonucleotide
  modified_base 50: mod_base = OTHER; note = 2'-O-methyl ribonucleotide
  modified_base 52: mod_base = OTHER; note = 2'-O-methyl ribonucleotide
  modified_base 53: mod_base = OTHER; note = 2'-O-methyl ribonucleotide
  modified_base 54: mod_base = OTHER; note = 2'-O-methyl ribonucleotide
  modified_base 55: mod_base = OTHER; note = 2'-O-methyl ribonucleotide
  modified_base 56: mod_base = OTHER; note = 2'-O-methyl ribonucleotide
  modified_base 57: mod_base = OTHER; note = 2'-O-methyl ribonucleotide
  modified_base 60: mod_base = OTHER; note = 2'-O-methyl ribonucleotide
  modified_base 61: mod_base = OTHER; note = 2'-O-methyl ribonucleotide
  modified_base 66: mod_base = OTHER; note = 2'-O-methyl ribonucleotide
  modified_base 67: mod_base = OTHER; note = 2'-O-methyl ribonucleotide
  modified_base 70: mod_base = OTHER; note = 2'-O-methyl ribonucleotide
  modified_base 71: mod_base = OTHER; note = 2'-O-methyl ribonucleotide
  modified_base 72: mod_base = OTHER; note = 2'-O-methyl ribonucleotide
  modified_base 73: mod_base = OTHER; note = 2'-O-methyl ribonucleotide
  modified_base 74: mod_base = OTHER; note = 2'-O-methyl ribonucleotide
  modified_base 75: mod_base = OTHER; note = 2'-O-methyl ribonucleotide
  modified_base 76: mod_base = OTHER; note = 2'-O-methyl ribonucleotide
  modified_base 77: mod_base = OTHER; note = 2'-O-methyl ribonucleotide
  modified_base 78: mod_base = OTHER; note = 2'-O-methyl ribonucleotide
  modified_base 79: mod_base = OTHER; note = 2'-O-methyl ribonucleotide
  modified_base 80: mod_base = OTHER; note = 2'-O-methyl ribonucleotide
  modified_base 81: mod_base = OTHER; note = 2'-O-methyl ribonucleotide
  modified_base 83: mod_base = OTHER; note = 2'-O-methyl ribonucleotide
  modified_base 84: mod_base = OTHER; note = 2'-O-methyl ribonucleotide
  modified_base 85: mod_base = OTHER; note = 2'-O-methyl ribonucleotide
  modified_base 86: mod_base = OTHER; note = 2'-O-methyl ribonucleotide
  modified_base 87: mod_base = OTHER; note = 2'-O-methyl ribonucleotide
  modified_base 88: mod_base = OTHER; note = 2'-O-methyl ribonucleotide
  modified_base 89: mod_base = OTHER; note = 2'-O-methyl ribonucleotide
  modified_base 90: mod_base = OTHER; note = 2'-O-methyl ribonucleotide
  modified_base 91: mod_base = OTHER; note = 2'-O-methyl ribonucleotide
  modified_base 92: mod_base = OTHER; note = 2'-O-methyl ribonucleotide
  modified_base 93: mod_base = OTHER; note = 2'-O-methyl ribonucleotide
  modified_base 94: mod_base = OTHER; note = 2'-O-methyl ribonucleotide
  modified_base 95: mod_base = OTHER; note = 2'-O-methyl ribonucleotide
  modified_base 96: mod_base = OTHER; note = 2'-O-methyl ribonucleotide
  modified_base 97: mod_base = OTHER; note = 2'-O-methyl ribonucleotide
  modified_base 98: mod_base = OTHER; note = 2'-O-methyl ribonucleotide
  modified_base 99: mod_base = OTHER; note = 2'-O-methyl ribonucleotide
  modified_base 100: mod_base = OTHER; note = 2'-O-methyl ribonucleotide
  modified_base 14: mod_base = OTHER; note = nebularine
  modified_base 34: mod_base = OTHER; note = nebularine
  modified_base 42: mod_base = OTHER; note = nebularine
  modified_base 1..3: mod_base = OTHER; note = phosphorothioate linkage
  modified_base 97..100: mod_base = OTHER; note = phosphorothioate linkage

SEQ ID NO: 1987 - RNA, 100 nt, synthetic construct; identical to SEQ ID NO: 1934
  source 1..100: mol_type = other RNA
  modified_base 1: mod_base = OTHER; note = 2'-O-methyl ribonucleotide
  modified_base 2: mod_base = OTHER; note = 2'-O-methyl ribonucleotide
  modified_base 3: mod_base = OTHER; note = 2'-O-methyl ribonucleotide
  modified_base 21: mod_base = OTHER; note = 2'-O-methyl ribonucleotide
  modified_base 28: mod_base = OTHER; note = 2'-O-methyl ribonucleotide
  modified_base 29: mod_base = OTHER; note = 2'-O-methyl ribonucleotide
  modified_base 30: mod_base = OTHER; note = 2'-O-methyl ribonucleotide
  modified_base 31: mod_base = OTHER; note = 2'-O-methyl ribonucleotide
  modified_base 32: mod_base = OTHER; note = 2'-O-methyl ribonucleotide
  modified_base 33: mod_base = OTHER; note = 2'-O-methyl ribonucleotide
  modified_base 34: mod_base = OTHER; note = 2'-O-methyl ribonucleotide
  modified_base 35: mod_base = OTHER; note = 2'-O-methyl ribonucleotide
  modified_base 36: mod_base = OTHER; note = 2'-O-methyl ribonucleotide
  modified_base 37: mod_base = OTHER; note = 2'-O-methyl ribonucleotide
  modified_base 38: mod_base = OTHER; note = 2'-O-methyl ribonucleotide
  modified_base 39: mod_base = OTHER; note = 2'-O-methyl ribonucleotide
  modified_base 40: mod_base = OTHER; note = 2'-O-methyl ribonucleotide
  modified_base 41: mod_base = OTHER; note = 2'-O-methyl ribonucleotide
  modified_base 42: mod_base = OTHER; note = 2'-O-methyl ribonucleotide
  modified_base 46: mod_base = OTHER; note = 2'-O-methyl ribonucleotide
  modified_base 48: mod_base = OTHER; note = 2'-O-methyl ribonucleotide
  modified_base 50: mod_base = OTHER; note = 2'-O-methyl ribonucleotide
  modified_base 52: mod_base = OTHER; note = 2'-O-methyl ribonucleotide
  modified_base 53: mod_base = OTHER; note = 2'-O-methyl ribonucleotide
  modified_base 54: mod_base = OTHER; note = 2'-O-methyl ribonucleotide
  modified_base 55: mod_base = OTHER; note = 2'-O-methyl ribonucleotide
  modified_base 56: mod_base = OTHER; note = 2'-O-methyl ribonucleotide
  modified_base 57: mod_base = OTHER; note = 2'-O-methyl ribonucleotide
  modified_base 60: mod_base = OTHER; note = 2'-O-methyl ribonucleotide
  modified_base 61: mod_base = OTHER; note = 2'-O-methyl ribonucleotide
  modified_base 66: mod_base = OTHER; note = 2'-O-methyl ribonucleotide
  modified_base 67: mod_base = OTHER; note = 2'-O-methyl ribonucleotide
  modified_base 70: mod_base = OTHER; note = 2'-O-methyl ribonucleotide
  modified_base 71: mod_base = OTHER; note = 2'-O-methyl ribonucleotide
  modified_base 72: mod_base = OTHER; note = 2'-O-methyl ribonucleotide
  modified_base 73: mod_base = OTHER; note = 2'-O-methyl ribonucleotide
  modified_base 74: mod_base = OTHER; note = 2'-O-methyl ribonucleotide
  modified_base 75: mod_base = OTHER; note = 2'-O-methyl ribonucleotide
  modified_base 76: mod_base = OTHER; note = 2'-O-methyl ribonucleotide
  modified_base 77: mod_base = OTHER; note = 2'-O-methyl ribonucleotide
  modified_base 78: mod_base = OTHER; note = 2'-O-methyl ribonucleotide
  modified_base 79: mod_base = OTHER; note = 2'-O-methyl ribonucleotide
  modified_base 80: mod_base = OTHER; note = 2'-O-methyl ribonucleotide
  modified_base 81: mod_base = OTHER; note = 2'-O-methyl ribonucleotide
  modified_base 83: mod_base = OTHER; note = 2'-O-methyl ribonucleotide
  modified_base 84: mod_base = OTHER; note = 2'-O-methyl ribonucleotide
  modified_base 85: mod_base = OTHER; note = 2'-O-methyl ribonucleotide
  modified_base 86: mod_base = OTHER; note = 2'-O-methyl ribonucleotide
  modified_base 87: mod_base = OTHER; note = 2'-O-methyl ribonucleotide
  modified_base 88: mod_base = OTHER; note = 2'-O-methyl ribonucleotide
  modified_base 89: mod_base = OTHER; note = 2'-O-methyl ribonucleotide
  modified_base 90: mod_base = OTHER; note = 2'-O-methyl ribonucleotide
  modified_base 91: mod_base = OTHER; note = 2'-O-methyl ribonucleotide
  modified_base 92: mod_base = OTHER; note = 2'-O-methyl ribonucleotide
  modified_base 93: mod_base = OTHER; note = 2'-O-methyl ribonucleotide
  modified_base 94: mod_base = OTHER; note = 2'-O-methyl ribonucleotide
  modified_base 95: mod_base = OTHER; note = 2'-O-methyl ribonucleotide
  modified_base 96: mod_base = OTHER; note = 2'-O-methyl ribonucleotide
  modified_base 97: mod_base = OTHER; note = 2'-O-methyl ribonucleotide
  modified_base 98: mod_base = OTHER; note = 2'-O-methyl ribonucleotide
  modified_base 99: mod_base = OTHER; note = 2'-O-methyl ribonucleotide
  modified_base 100: mod_base = OTHER; note = 2'-O-methyl ribonucleotide
  modified_base 9: mod_base = OTHER; note = nebularine
  modified_base 28: mod_base = OTHER; note = nebularine
  modified_base 34: mod_base = OTHER; note = nebularine
  modified_base 42: mod_base = OTHER; note = nebularine
  modified_base 57: mod_base = OTHER; note = nebularine
  modified_base 1..3: mod_base = OTHER; note = phosphorothioate linkage
  modified_base 97..100: mod_base = OTHER; note = phosphorothioate linkage

SEQ ID NO: 1988 - RNA, 100 nt, synthetic construct; identical to SEQ ID NO: 1935
  source 1..100: mol_type = other RNA
  modified_base 1: mod_base = OTHER; note = 2'-O-methyl ribonucleotide
  modified_base 2: mod_base = OTHER; note = 2'-O-methyl ribonucleotide
  modified_base 3: mod_base = OTHER; note = 2'-O-methyl ribonucleotide
  modified_base 21: mod_base = OTHER; note = 2'-O-methyl ribonucleotide
  modified_base 28: mod_base = OTHER; note = 2'-O-methyl ribonucleotide
  modified_base 29: mod_base = OTHER; note = 2'-O-methyl ribonucleotide
  modified_base 30: mod_base = OTHER; note = 2'-O-methyl ribonucleotide
  modified_base 31: mod_base = OTHER; note = 2'-O-methyl ribonucleotide
  modified_base 32: mod_base = OTHER; note = 2'-O-methyl ribonucleotide
  modified_base 33: mod_base = OTHER; note = 2'-O-methyl ribonucleotide
  modified_base 34: mod_base = OTHER; note = 2'-O-methyl ribonucleotide
  modified_base 35: mod_base = OTHER; note = 2'-O-methyl ribonucleotide
  modified_base 36: mod_base = OTHER; note = 2'-O-methyl ribonucleotide
  modified_base 37: mod_base = OTHER; note = 2'-O-methyl ribonucleotide
  modified_base 38: mod_base = OTHER; note = 2'-O-methyl ribonucleotide
  modified_base 39: mod_base = OTHER; note = 2'-O-methyl ribonucleotide
  modified_base 40: mod_base = OTHER; note = 2'-O-methyl ribonucleotide
  modified_base 41: mod_base = OTHER; note = 2'-O-methyl ribonucleotide
  modified_base 42: mod_base = OTHER; note = 2'-O-methyl ribonucleotide
  modified_base 46: mod_base = OTHER; note = 2'-O-methyl ribonucleotide
  modified_base 48: mod_base = OTHER; note = 2'-O-methyl ribonucleotide
  modified_base 50: mod_base = OTHER; note = 2'-O-methyl ribonucleotide
  modified_base 52: mod_base = OTHER; note = 2'-O-methyl ribonucleotide
  modified_base 53: mod_base = OTHER; note = 2'-O-methyl ribonucleotide
  modified_base 54: mod_base = OTHER; note = 2'-O-methyl ribonucleotide
  modified_base 55: mod_base = OTHER; note = 2'-O-methyl ribonucleotide
  modified_base 56: mod_base = OTHER; note = 2'-O-methyl ribonucleotide
  modified_base 57: mod_base = OTHER; note = 2'-O-methyl ribonucleotide
  modified_base 60: mod_base = OTHER; note = 2'-O-methyl ribonucleotide
  modified_base 61: mod_base = OTHER; note = 2'-O-methyl ribonucleotide
  modified_base 66: mod_base = OTHER; note = 2'-O-methyl ribonucleotide
  modified_base 67: mod_base = OTHER; note = 2'-O-methyl ribonucleotide
  modified_base 70: mod_base = OTHER; note = 2'-O-methyl ribonucleotide
  modified_base 71: mod_base = OTHER; note = 2'-O-methyl ribonucleotide
  modified_base 72: mod_base = OTHER; note = 2'-O-methyl ribonucleotide
  modified_base 73: mod_base = OTHER; note = 2'-O-methyl ribonucleotide
  modified_base 74: mod_base = OTHER; note = 2'-O-methyl ribonucleotide
  modified_base 75: mod_base = OTHER; note = 2'-O-methyl ribonucleotide
  modified_base 76: mod_base = OTHER; note = 2'-O-methyl ribonucleotide
  modified_base 77: mod_base = OTHER; note = 2'-O-methyl ribonucleotide
  modified_base 78: mod_base = OTHER; note = 2'-O-methyl ribonucleotide
  modified_base 79: mod_base = OTHER; note = 2'-O-methyl ribonucleotide
  modified_base 80: mod_base = OTHER; note = 2'-O-methyl ribonucleotide
  modified_base 81: mod_base = OTHER; note = 2'-O-methyl ribonucleotide
  modified_base 83: mod_base = OTHER; note = 2'-O-methyl ribonucleotide
  modified_base 84: mod_base = OTHER; note = 2'-O-methyl ribonucleotide
  modified_base 85: mod_base = OTHER; note = 2'-O-methyl ribonucleotide
  modified_base 86: mod_base = OTHER; note = 2'-O-methyl ribonucleotide
  modified_base 87: mod_base = OTHER; note = 2'-O-methyl ribonucleotide
  modified_base 88: mod_base = OTHER; note = 2'-O-methyl ribonucleotide
  modified_base 89: mod_base = OTHER; note = 2'-O-methyl ribonucleotide
  modified_base 90: mod_base = OTHER; note = 2'-O-methyl ribonucleotide
  modified_base 91: mod_base = OTHER; note = 2'-O-methyl ribonucleotide
  modified_base 92: mod_base = OTHER; note = 2'-O-methyl ribonucleotide
  modified_base 93: mod_base = OTHER; note = 2'-O-methyl ribonucleotide
  modified_base 94: mod_base = OTHER; note = 2'-O-methyl ribonucleotide
  modified_base 95: mod_base = OTHER; note = 2'-O-methyl ribonucleotide
  modified_base 96: mod_base = OTHER; note = 2'-O-methyl ribonucleotide
  modified_base 97: mod_base = OTHER; note = 2'-O-methyl ribonucleotide
  modified_base 98: mod_base = OTHER; note = 2'-O-methyl ribonucleotide
  modified_base 99: mod_base = OTHER; note = 2'-O-methyl ribonucleotide
  modified_base 100: mod_base = OTHER; note = 2'-O-methyl ribonucleotide
  modified_base 9: mod_base = OTHER; note = nebularine
  modified_base 34: mod_base = OTHER; note = nebularine
  modified_base 42: mod_base = OTHER; note = nebularine
  modified_base 57: mod_base = OTHER; note = nebularine
  modified_base 1..3: mod_base = OTHER; note = phosphorothioate linkage
  modified_base 97..100: mod_base = OTHER; note = phosphorothioate linkage

SEQ ID NO: 1989 - RNA, 100 nt, synthetic construct; identical to SEQ ID NO: 1936
  source 1..100: mol_type = other RNA
  modified_base 1: mod_base = OTHER; note = 2'-O-methyl ribonucleotide
  modified_base 2: mod_base = OTHER; note = 2'-O-methyl ribonucleotide
  modified_base 3: mod_base = OTHER; note = 2'-O-methyl ribonucleotide
  modified_base 21: mod_base = OTHER; note = 2'-O-methyl ribonucleotide
  modified_base 28: mod_base = OTHER; note = 2'-O-methyl ribonucleotide
  modified_base 29: mod_base = OTHER; note = 2'-O-methyl ribonucleotide
  modified_base 30: mod_base = OTHER; note = 2'-O-methyl ribonucleotide
  modified_base 31: mod_base = OTHER; note = 2'-O-methyl ribonucleotide
  modified_base 32: mod_base = OTHER; note = 2'-O-methyl ribonucleotide
  modified_base 33: mod_base = OTHER; note = 2'-O-methyl ribonucleotide
  modified_base 34: mod_base = OTHER; note = 2'-O-methyl ribonucleotide
  modified_base 35: mod_base = OTHER; note = 2'-O-methyl ribonucleotide
  modified_base 36: mod_base = OTHER; note = 2'-O-methyl ribonucleotide
  modified_base 37: mod_base = OTHER; note = 2'-O-methyl ribonucleotide
  modified_base 38: mod_base = OTHER; note = 2'-O-methyl ribonucleotide
  modified_base 39: mod_base = OTHER; note = 2'-O-methyl ribonucleotide
  modified_base 40: mod_base = OTHER; note = 2'-O-methyl ribonucleotide
  modified_base 41: mod_base = OTHER; note = 2'-O-methyl ribonucleotide
  modified_base 42: mod_base = OTHER; note = 2'-O-methyl ribonucleotide
  modified_base 46: mod_base = OTHER; note = 2'-O-methyl ribonucleotide
  modified_base 48: mod_base = OTHER; note = 2'-O-methyl ribonucleotide
  modified_base 50: mod_base = OTHER; note = 2'-O-methyl ribonucleotide
  modified_base 52: mod_base = OTHER; note = 2'-O-methyl ribonucleotide
  modified_base 53: mod_base = OTHER; note = 2'-O-methyl ribonucleotide
  modified_base 54: mod_base = OTHER; note = 2'-O-methyl ribonucleotide
  modified_base 55: mod_base = OTHER; note = 2'-O-methyl ribonucleotide
  modified_base 56: mod_base = OTHER; note = 2'-O-methyl ribonucleotide
  modified_base 57: mod_base = OTHER; note = 2'-O-methyl ribonucleotide
  modified_base 60: mod_base = OTHER; note = 2'-O-methyl ribonucleotide
  modified_base 61: mod_base = OTHER; note = 2'-O-methyl ribonucleotide
  modified_base 66: mod_base = OTHER; note = 2'-O-methyl ribonucleotide
  modified_base 67: mod_base = OTHER; note = 2'-O-methyl ribonucleotide
  modified_base 70: mod_base = OTHER; note = 2'-O-methyl ribonucleotide
  modified_base 71: mod_base = OTHER; note = 2'-O-methyl ribonucleotide
  modified_base 72: mod_base = OTHER; note = 2'-O-methyl ribonucleotide
  modified_base 73: mod_base = OTHER; note = 2'-O-methyl ribonucleotide
  modified_base 74: mod_base = OTHER; note = 2'-O-methyl ribonucleotide
  modified_base 75: mod_base = OTHER; note = 2'-O-methyl ribonucleotide
  modified_base 76: mod_base = OTHER; note = 2'-O-methyl ribonucleotide
  modified_base 77: mod_base = OTHER; note = 2'-O-methyl ribonucleotide
  modified_base 78: mod_base = OTHER; note = 2'-O-methyl ribonucleotide
  modified_base 79: mod_base = OTHER; note = 2'-O-methyl ribonucleotide
  modified_base 80: mod_base = OTHER; note = 2'-O-methyl ribonucleotide
  modified_base 81: mod_base = OTHER; note = 2'-O-methyl ribonucleotide
  modified_base 83: mod_base = OTHER; note = 2'-O-methyl ribonucleotide
  modified_base 84: mod_base = OTHER; note = 2'-O-methyl ribonucleotide
  modified_base 85: mod_base = OTHER; note = 2'-O-methyl ribonucleotide
  modified_base 86: mod_base = OTHER; note = 2'-O-methyl ribonucleotide
  modified_base 87: mod_base = OTHER; note = 2'-O-methyl ribonucleotide
  modified_base 88: mod_base = OTHER; note = 2'-O-methyl ribonucleotide
  modified_base 89: mod_base = OTHER; note = 2'-O-methyl ribonucleotide
  modified_base 90: mod_base = OTHER; note = 2'-O-methyl ribonucleotide
  modified_base 91: mod_base = OTHER; note = 2'-O-methyl ribonucleotide
  modified_base 92: mod_base = OTHER; note = 2'-O-methyl ribonucleotide
  modified_base 93: mod_base = OTHER; note = 2'-O-methyl ribonucleotide
  modified_base 94: mod_base = OTHER; note = 2'-O-methyl ribonucleotide
  modified_base 95: mod_base = OTHER; note = 2'-O-methyl ribonucleotide
  modified_base 96: mod_base = OTHER; note = 2'-O-methyl ribonucleotide
  modified_base 97: mod_base = OTHER; note = 2'-O-methyl ribonucleotide
  modified_base 98: mod_base = OTHER; note = 2'-O-methyl ribonucleotide
  modified_base 99: mod_base = OTHER; note = 2'-O-methyl ribonucleotide
  modified_base 100: mod_base = OTHER; note = 2'-O-methyl ribonucleotide
  modified_base 9: mod_base = OTHER; note = nebularine
  modified_base 42: mod_base = OTHER; note = nebularine
  modified_base 57: mod_base = OTHER; note = nebularine
  modified_base 1..3: mod_base = OTHER; note = phosphorothioate linkage
  modified_base 97..100: mod_base = OTHER; note = phosphorothioate linkage

SEQ ID NO: 1990 - RNA, 100 nt, synthetic construct; identical to SEQ ID NO: 1937
  source 1..100: mol_type = other RNA
  modified_base 1: mod_base = OTHER; note = 2'-O-methyl ribonucleotide
  modified_base 2: mod_base = OTHER; note = 2'-O-methyl ribonucleotide
  modified_base 3: mod_base = OTHER; note = 2'-O-methyl ribonucleotide
  modified_base 21: mod_base = OTHER; note = 2'-O-methyl ribonucleotide
  modified_base 28: mod_base = OTHER; note = 2'-O-methyl ribonucleotide
  modified_base 29: mod_base = OTHER; note = 2'-O-methyl ribonucleotide
  modified_base 30: mod_base = OTHER; note = 2'-O-methyl ribonucleotide
  modified_base 31: mod_base = OTHER; note = 2'-O-methyl ribonucleotide
  modified_base 32: mod_base = OTHER; note = 2'-O-methyl ribonucleotide
  modified_base 33: mod_base = OTHER; note = 2'-O-methyl ribonucleotide
  modified_base 34: mod_base = OTHER; note = 2'-O-methyl ribonucleotide
  modified_base 35: mod_base = OTHER; note = 2'-O-methyl ribonucleotide
  modified_base 36: mod_base = OTHER; note = 2'-O-methyl ribonucleotide
  modified_base 37: mod_base = OTHER; note = 2'-O-methyl ribonucleotide
  modified_base 38: mod_base = OTHER; note = 2'-O-methyl ribonucleotide
  modified_base 39: mod_base = OTHER; note = 2'-O-methyl ribonucleotide
  modified_base 40: mod_base = OTHER; note = 2'-O-methyl ribonucleotide
  modified_base 41: mod_base = OTHER; note = 2'-O-methyl ribonucleotide
  modified_base 42: mod_base = OTHER; note = 2'-O-methyl ribonucleotide
  modified_base 46: mod_base = OTHER; note = 2'-O-methyl ribonucleotide
  modified_base 48: mod_base = OTHER; note = 2'-O-methyl ribonucleotide
  modified_base 50: mod_base = OTHER; note = 2'-O-methyl ribonucleotide
  modified_base 52: mod_base = OTHER; note = 2'-O-methyl ribonucleotide
  modified_base 53: mod_base = OTHER; note = 2'-O-methyl ribonucleotide
  modified_base 54: mod_base = OTHER; note = 2'-O-methyl ribonucleotide
  modified_base 55: mod_base = OTHER; note = 2'-O-methyl ribonucleotide
  modified_base 56: mod_base = OTHER; note = 2'-O-methyl ribonucleotide
  modified_base 57: mod_base = OTHER; note = 2'-O-methyl ribonucleotide
  modified_base 60: mod_base = OTHER; note = 2'-O-methyl ribonucleotide
  modified_base 61: mod_base = OTHER; note = 2'-O-methyl ribonucleotide
  modified_base 66: mod_base = OTHER; note = 2'-O-methyl ribonucleotide
  modified_base 67: mod_base = OTHER; note = 2'-O-methyl ribonucleotide
  modified_base 70: mod_base = OTHER; note = 2'-O-methyl ribonucleotide
  modified_base 71: mod_base = OTHER; note = 2'-O-methyl ribonucleotide
  modified_base 72: mod_base = OTHER; note = 2'-O-methyl ribonucleotide
  modified_base 73: mod_base = OTHER; note = 2'-O-methyl ribonucleotide
  modified_base 74: mod_base = OTHER; note = 2'-O-methyl ribonucleotide
  modified_base 75: mod_base = OTHER; note = 2'-O-methyl ribonucleotide
  modified_base 76: mod_base = OTHER; note = 2'-O-methyl ribonucleotide
  modified_base 77: mod_base = OTHER; note = 2'-O-methyl ribonucleotide
  modified_base 78: mod_base = OTHER; note = 2'-O-methyl ribonucleotide
  modified_base 79: mod_base = OTHER; note = 2'-O-methyl ribonucleotide
  modified_base 80: mod_base = OTHER; note = 2'-O-methyl ribonucleotide
  modified_base 81: mod_base = OTHER; note = 2'-O-methyl ribonucleotide
  modified_base 83: mod_base = OTHER; note = 2'-O-methyl ribonucleotide
  modified_base 84: mod_base = OTHER; note = 2'-O-methyl ribonucleotide
  modified_base 85: mod_base = OTHER; note = 2'-O-methyl ribonucleotide
  modified_base 86: mod_base = OTHER; note = 2'-O-methyl ribonucleotide
  modified_base 87: mod_base = OTHER; note = 2'-O-methyl ribonucleotide
  modified_base 88: mod_base = OTHER; note = 2'-O-methyl ribonucleotide
  modified_base 89: mod_base = OTHER; note = 2'-O-methyl ribonucleotide
  modified_base 90: mod_base = OTHER; note = 2'-O-methyl ribonucleotide
  modified_base 91: mod_base = OTHER; note = 2'-O-methyl ribonucleotide
  modified_base 92: mod_base = OTHER; note = 2'-O-methyl ribonucleotide
  modified_base 93: mod_base = OTHER; note = 2'-O-methyl ribonucleotide
  modified_base 94: mod_base = OTHER; note = 2'-O-methyl ribonucleotide
  modified_base 95: mod_base = OTHER; note = 2'-O-methyl ribonucleotide
  modified_base 96: mod_base = OTHER; note = 2'-O-methyl ribonucleotide
  modified_base 97: mod_base = OTHER; note = 2'-O-methyl ribonucleotide
  modified_base 98: mod_base = OTHER; note = 2'-O-methyl ribonucleotide
  modified_base 99: mod_base = OTHER; note = 2'-O-methyl ribonucleotide
  modified_base 100: mod_base = OTHER; note = 2'-O-methyl ribonucleotide
  modified_base 9: mod_base = OTHER; note = nebularine
  modified_base 28: mod_base = OTHER; note = nebularine
  modified_base 1..3: mod_base = OTHER; note = phosphorothioate linkage
  modified_base 97..100: mod_base = OTHER; note = phosphorothioate linkage

SEQ ID NO: 1991 - RNA, 100 nt, synthetic construct; identical to SEQ ID NO: 1938
  source 1..100: mol_type = other RNA
  modified_base 1: mod_base = OTHER; note = 2'-O-methyl ribonucleotide
  modified_base 2: mod_base = OTHER; note = 2'-O-methyl ribonucleotide
  modified_base 3: mod_base = OTHER; note = 2'-O-methyl ribonucleotide
  modified_base 21: mod_base = OTHER; note = 2'-O-methyl ribonucleotide
  modified_base 28: mod_base = OTHER; note = 2'-O-methyl ribonucleotide
  modified_base 29: mod_base = OTHER; note = 2'-O-methyl ribonucleotide
  modified_base 30: mod_base = OTHER; note = 2'-O-methyl ribonucleotide
  modified_base 31: mod_base = OTHER; note = 2'-O-methyl ribonucleotide
  modified_base 32: mod_base = OTHER; note = 2'-O-methyl ribonucleotide
  modified_base 33: mod_base = OTHER; note = 2'-O-methyl ribonucleotide
  modified_base 34: mod_base = OTHER; note = 2'-O-methyl ribonucleotide
  modified_base 35: mod_base = OTHER; note = 2'-O-methyl ribonucleotide
  modified_base 36: mod_base = OTHER; note = 2'-O-methyl ribonucleotide
  modified_base 37: mod_base = OTHER; note = 2'-O-methyl ribonucleotide
  modified_base 38: mod_base = OTHER; note = 2'-O-methyl ribonucleotide
  modified_base 39: mod_base = OTHER; note = 2'-O-methyl ribonucleotide
  modified_base 40: mod_base = OTHER; note = 2'-O-methyl ribonucleotide
  modified_base 41: mod_base = OTHER; note = 2'-O-methyl ribonucleotide
  modified_base 42: mod_base = OTHER; note = 2'-O-methyl ribonucleotide
  modified_base 46: mod_base = OTHER; note = 2'-O-methyl ribonucleotide
  modified_base 48: mod_base = OTHER; note = 2'-O-methyl ribonucleotide
  modified_base 50: mod_base = OTHER; note = 2'-O-methyl ribonucleotide
  modified_base 52: mod_base = OTHER; note = 2'-O-methyl ribonucleotide
  modified_base 53: mod_base = OTHER; note = 2'-O-methyl ribonucleotide
  modified_base 54: mod_base = OTHER; note = 2'-O-methyl ribonucleotide
  modified_base 55: mod_base = OTHER; note = 2'-O-methyl ribonucleotide
  modified_base 56: mod_base = OTHER; note = 2'-O-methyl ribonucleotide
  modified_base 57: mod_base = OTHER; note = 2'-O-methyl ribonucleotide
  modified_base 60: mod_base = OTHER; note = 2'-O-methyl ribonucleotide
  modified_base 61: mod_base = OTHER; note = 2'-O-methyl ribonucleotide
  modified_base 66: mod_base = OTHER; note = 2'-O-methyl ribonucleotide
  modified_base 67: mod_base = OTHER; note = 2'-O-methyl ribonucleotide
  modified_base 70: mod_base = OTHER; note = 2'-O-methyl ribonucleotide
  modified_base 71: mod_base = OTHER; note = 2'-O-methyl ribonucleotide
  modified_base 72: mod_base = OTHER; note = 2'-O-methyl ribonucleotide
  modified_base 73: mod_base = OTHER; note = 2'-O-methyl ribonucleotide
  modified_base 74: mod_base = OTHER; note = 2'-O-methyl ribonucleotide
  modified_base 75: mod_base = OTHER; note = 2'-O-methyl ribonucleotide
  modified_base 76: mod_base = OTHER; note = 2'-O-methyl ribonucleotide
  modified_base 77: mod_base = OTHER; note = 2'-O-methyl ribonucleotide
  modified_base 78: mod_base = OTHER; note = 2'-O-methyl ribonucleotide
  modified_base 79: mod_base = OTHER; note = 2'-O-methyl ribonucleotide
  modified_base 80: mod_base = OTHER; note = 2'-O-methyl ribonucleotide
  modified_base 81: mod_base = OTHER; note = 2'-O-methyl ribonucleotide
  modified_base 83: mod_base = OTHER; note = 2'-O-methyl ribonucleotide
  modified_base 84: mod_base = OTHER; note = 2'-O-methyl ribonucleotide
  modified_base 85: mod_base = OTHER; note = 2'-O-methyl ribonucleotide
  modified_base 86: mod_base = OTHER; note = 2'-O-methyl ribonucleotide
  modified_base 87: mod_base = OTHER; note = 2'-O-methyl ribonucleotide
  modified_base 88: mod_base = OTHER; note = 2'-O-methyl ribonucleotide
  modified_base 89: mod_base = OTHER; note = 2'-O-methyl ribonucleotide
  modified_base 90: mod_base = OTHER; note = 2'-O-methyl ribonucleotide
  modified_base 91: mod_base = OTHER; note = 2'-O-methyl ribonucleotide
  modified_base 92: mod_base = OTHER; note = 2'-O-methyl ribonucleotide
  modified_base 93: mod_base = OTHER; note = 2'-O-methyl ribonucleotide
  modified_base 94: mod_base = OTHER; note = 2'-O-methyl ribonucleotide
  modified_base 95: mod_base = OTHER; note = 2'-O-methyl ribonucleotide
  modified_base 96: mod_base = OTHER; note = 2'-O-methyl ribonucleotide
  modified_base 97: mod_base = OTHER; note = 2'-O-methyl ribonucleotide
  modified_base 98: mod_base = OTHER; note = 2'-O-methyl ribonucleotide
  modified_base 99: mod_base = OTHER; note = 2'-O-methyl ribonucleotide
  modified_base 100: mod_base = OTHER; note = 2'-O-methyl ribonucleotide
  modified_base 9: mod_base = OTHER; note = nebularine
  modified_base 42: mod_base = OTHER; note = nebularine
  modified_base 1..3: mod_base = OTHER; note = phosphorothioate linkage
  modified_base 97..100: mod_base = OTHER; note = phosphorothioate linkage

SEQ ID NO: 1992 - RNA, 100 nt, synthetic construct; identical to SEQ ID NO: 1939
  source 1..100: mol_type = other RNA
  modified_base 1: mod_base = OTHER; note = 2'-O-methyl ribonucleotide
  modified_base 2: mod_base = OTHER; note = 2'-O-methyl ribonucleotide
  modified_base 3: mod_base = OTHER; note = 2'-O-methyl ribonucleotide
  modified_base 21: mod_base = OTHER; note = 2'-O-methyl ribonucleotide
  modified_base 28: mod_base = OTHER; note = 2'-O-methyl ribonucleotide
  modified_base 29: mod_base = OTHER; note = 2'-O-methyl ribonucleotide
  modified_base 30: mod_base = OTHER; note = 2'-O-methyl ribonucleotide
  modified_base 31: mod_base = OTHER; note = 2'-O-methyl ribonucleotide
  modified_base 32: mod_base = OTHER; note = 2'-O-methyl ribonucleotide
  modified_base 33: mod_base = OTHER; note = 2'-O-methyl ribonucleotide
  modified_base 34: mod_base = OTHER; note = 2'-O-methyl ribonucleotide
  modified_base 35: mod_base = OTHER; note = 2'-O-methyl ribonucleotide
  modified_base 36: mod_base = OTHER; note = 2'-O-methyl ribonucleotide
  modified_base 37: mod_base = OTHER; note = 2'-O-methyl ribonucleotide
  modified_base 38: mod_base = OTHER; note = 2'-O-methyl ribonucleotide
  modified_base 39: mod_base = OTHER; note = 2'-O-methyl ribonucleotide
  modified_base 40: mod_base = OTHER; note = 2'-O-methyl ribonucleotide
  modified_base 41: mod_base = OTHER; note = 2'-O-methyl ribonucleotide
  modified_base 42: mod_base = OTHER; note = 2'-O-methyl ribonucleotide
  modified_base 46: mod_base = OTHER; note = 2'-O-methyl ribonucleotide
  modified_base 48: mod_base = OTHER; note = 2'-O-methyl ribonucleotide
  modified_base 50: mod_base = OTHER; note = 2'-O-methyl ribonucleotide
  modified_base 52: mod_base = OTHER; note = 2'-O-methyl ribonucleotide
  modified_base 53: mod_base = OTHER; note = 2'-O-methyl ribonucleotide
  modified_base 54: mod_base = OTHER; note = 2'-O-methyl ribonucleotide
  modified_base 55: mod_base = OTHER; note = 2'-O-methyl ribonucleotide
  modified_base 56: mod_base = OTHER; note = 2'-O-methyl ribonucleotide
  modified_base 57: mod_base = OTHER; note = 2'-O-methyl ribonucleotide
  modified_base 60: mod_base = OTHER; note = 2'-O-methyl ribonucleotide
  modified_base 61: mod_base = OTHER; note = 2'-O-methyl ribonucleotide
  modified_base 66: mod_base = OTHER; note = 2'-O-methyl ribonucleotide
  modified_base 67: mod_base = OTHER; note = 2'-O-methyl ribonucleotide
  modified_base 70: mod_base = OTHER; note = 2'-O-methyl ribonucleotide
  modified_base 71: mod_base = OTHER; note = 2'-O-methyl ribonucleotide
  modified_base 72: mod_base = OTHER; note = 2'-O-methyl ribonucleotide
  modified_base 73: mod_base = OTHER; note = 2'-O-methyl ribonucleotide
  modified_base 74: mod_base = OTHER; note = 2'-O-methyl ribonucleotide
  modified_base 75: mod_base = OTHER; note = 2'-O-methyl ribonucleotide
  modified_base 76: mod_base = OTHER; note = 2'-O-methyl ribonucleotide
  modified_base 77: mod_base = OTHER; note = 2'-O-methyl ribonucleotide
  modified_base 78: mod_base = OTHER; note = 2'-O-methyl ribonucleotide
  modified_base 79: mod_base = OTHER; note = 2'-O-methyl ribonucleotide
  modified_base 80: mod_base = OTHER; note = 2'-O-methyl ribonucleotide
  modified_base 81: mod_base = OTHER; note = 2'-O-methyl ribonucleotide
  modified_base 83: mod_base = OTHER; note = 2'-O-methyl ribonucleotide
  modified_base 84: mod_base = OTHER; note = 2'-O-methyl ribonucleotide
  modified_base 85: mod_base = OTHER; note = 2'-O-methyl ribonucleotide
  modified_base 86: mod_base = OTHER; note = 2'-O-methyl ribonucleotide
  modified_base 87: mod_base = OTHER; note = 2'-O-methyl ribonucleotide
  modified_base 88: mod_base = OTHER; note = 2'-O-methyl ribonucleotide
  modified_base 89: mod_base = OTHER; note = 2'-O-methyl ribonucleotide
  modified_base 90: mod_base = OTHER; note = 2'-O-methyl ribonucleotide
  modified_base 91: mod_base = OTHER; note = 2'-O-methyl ribonucleotide
  modified_base 92: mod_base = OTHER; note = 2'-O-methyl ribonucleotide
  modified_base 93: mod_base = OTHER; note = 2'-O-methyl ribonucleotide
  modified_base 94: mod_base = OTHER; note = 2'-O-methyl ribonucleotide
  modified_base 95: mod_base = OTHER; note = 2'-O-methyl ribonucleotide
  modified_base 96: mod_base = OTHER; note = 2'-O-methyl ribonucleotide
  modified_base 97: mod_base = OTHER; note = 2'-O-methyl ribonucleotide
  modified_base 98: mod_base = OTHER; note = 2'-O-methyl ribonucleotide
  modified_base 99: mod_base = OTHER; note = 2'-O-methyl ribonucleotide
  modified_base 100: mod_base = OTHER; note = 2'-O-methyl ribonucleotide
  modified_base 9: mod_base = OTHER; note = nebularine
  modified_base 34: mod_base = OTHER; note = nebularine
  modified_base 42: mod_base = OTHER; note = nebularine
  modified_base 1..3: mod_base = OTHER; note = phosphorothioate linkage
  modified_base 97..100: mod_base = OTHER; note = phosphorothioate linkage

SEQ ID NO: 1993 - RNA, 100 nt, synthetic construct; identical to SEQ ID NO: 1940
  source 1..100: mol_type = other RNA
  modified_base 1: mod_base = OTHER; note = 2'-O-methyl ribonucleotide
  modified_base 2: mod_base = OTHER; note = 2'-O-methyl ribonucleotide
  modified_base 3: mod_base = OTHER; note = 2'-O-methyl ribonucleotide
  modified_base 21: mod_base = OTHER; note = 2'-O-methyl ribonucleotide
  modified_base 28: mod_base = OTHER; note = 2'-O-methyl ribonucleotide
  modified_base 29: mod_base = OTHER; note = 2'-O-methyl ribonucleotide
  modified_base 30: mod_base = OTHER; note = 2'-O-methyl ribonucleotide
  modified_base 31: mod_base = OTHER; note = 2'-O-methyl ribonucleotide
  modified_base 32: mod_base = OTHER; note = 2'-O-methyl ribonucleotide
  modified_base 33: mod_base = OTHER; note = 2'-O-methyl ribonucleotide
  modified_base 34: mod_base = OTHER; note = 2'-O-methyl ribonucleotide
  modified_base 35: mod_base = OTHER; note = 2'-O-methyl ribonucleotide
  modified_base 36: mod_base = OTHER; note = 2'-O-methyl ribonucleotide
  modified_base 37: mod_base = OTHER; note = 2'-O-methyl ribonucleotide
  modified_base 38: mod_base = OTHER; note = 2'-O-methyl ribonucleotide
  modified_base 39: mod_base = OTHER; note = 2'-O-methyl ribonucleotide
  modified_base 40: mod_base = OTHER; note = 2'-O-methyl ribonucleotide
  modified_base 41: mod_base = OTHER; note = 2'-O-methyl ribonucleotide
  modified_base 42: mod_base = OTHER; note = 2'-O-methyl ribonucleotide
  modified_base 46: mod_base = OTHER; note = 2'-O-methyl ribonucleotide
  modified_base 48: mod_base = OTHER; note = 2'-O-methyl ribonucleotide
  modified_base 50: mod_base = OTHER; note = 2'-O-methyl ribonucleotide
  modified_base 52: mod_base = OTHER; note = 2'-O-methyl ribonucleotide
  modified_base 53: mod_base = OTHER; note = 2'-O-methyl ribonucleotide
  modified_base 54: mod_base = OTHER; note = 2'-O-methyl ribonucleotide
  modified_base 55: mod_base = OTHER; note = 2'-O-methyl ribonucleotide
  modified_base 56: mod_base = OTHER; note = 2'-O-methyl ribonucleotide
  modified_base 57: mod_base = OTHER; note = 2'-O-methyl ribonucleotide
  modified_base 60: mod_base = OTHER; note = 2'-O-methyl ribonucleotide
  modified_base 61: mod_base = OTHER; note = 2'-O-methyl ribonucleotide
  modified_base 66: mod_base = OTHER; note = 2'-O-methyl ribonucleotide
  modified_base 67: mod_base = OTHER; note = 2'-O-methyl ribonucleotide
  modified_base 70: mod_base = OTHER; note = 2'-O-methyl ribonucleotide
  modified_base 71: mod_base = OTHER; note = 2'-O-methyl ribonucleotide
  modified_base 72: mod_base = OTHER; note = 2'-O-methyl ribonucleotide
  modified_base 73: mod_base = OTHER; note = 2'-O-methyl ribonucleotide
  modified_base 74: mod_base = OTHER; note = 2'-O-methyl ribonucleotide
  modified_base 75: mod_base = OTHER; note = 2'-O-methyl ribonucleotide
  modified_base 76: mod_base = OTHER; note = 2'-O-methyl ribonucleotide
  modified_base 77: mod_base = OTHER; note = 2'-O-methyl ribonucleotide
  modified_base 78: mod_base = OTHER; note = 2'-O-methyl ribonucleotide
  modified_base 79: mod_base = OTHER; note = 2'-O-methyl ribonucleotide
  modified_base 80: mod_base = OTHER; note = 2'-O-methyl ribonucleotide
  modified_base 81: mod_base = OTHER; note = 2'-O-methyl ribonucleotide
  modified_base 83: mod_base = OTHER; note = 2'-O-methyl ribonucleotide
  modified_base 84: mod_base = OTHER; note = 2'-O-methyl ribonucleotide
  modified_base 85: mod_base = OTHER; note = 2'-O-methyl ribonucleotide
  modified_base 86: mod_base = OTHER; note = 2'-O-methyl ribonucleotide
  modified_base 87: mod_base = OTHER; note = 2'-O-methyl ribonucleotide
  modified_base 88: mod_base = OTHER; note = 2'-O-methyl ribonucleotide
  modified_base 89: mod_base = OTHER; note = 2'-O-methyl ribonucleotide
  modified_base 90: mod_base = OTHER; note = 2'-O-methyl ribonucleotide
  modified_base 91: mod_base = OTHER; note = 2'-O-methyl ribonucleotide
  modified_base 92: mod_base = OTHER; note = 2'-O-methyl ribonucleotide
  modified_base 93: mod_base = OTHER; note = 2'-O-methyl ribonucleotide
  modified_base 94: mod_base = OTHER; note = 2'-O-methyl ribonucleotide
  modified_base 95: mod_base = OTHER; note = 2'-O-methyl ribonucleotide
  modified_base 96: mod_base = OTHER; note = 2'-O-methyl ribonucleotide
  modified_base 97: mod_base = OTHER; note = 2'-O-methyl ribonucleotide
  modified_base 98: mod_base = OTHER; note = 2'-O-methyl ribonucleotide
  modified_base 99: mod_base = OTHER; note = 2'-O-methyl ribonucleotide
  modified_base 100: mod_base = OTHER; note = 2'-O-methyl ribonucleotide
  modified_base 9: mod_base = OTHER; note = nebularine
  modified_base 34: mod_base = OTHER; note = nebularine
  modified_base 1..3: mod_base = OTHER; note = phosphorothioate linkage
  modified_base 97..100: mod_base = OTHER; note = phosphorothioate linkage

SEQ ID NO: 1994 - DNA, 100 bp, synthetic construct; identical to SEQ ID NO: 1941
  source 1..100: mol_type = other DNA
  modified_base 1: mod_base = OTHER; note = 2'-O-methyl ribonucleotide
  modified_base 2: mod_base = OTHER; note = 2'-O-methyl ribonucleotide
  modified_base 3: mod_base = OTHER; note = 2'-O-methyl ribonucleotide
  modified_base 21: mod_base = OTHER; note = 2'-O-methyl ribonucleotide
  modified_base 28: mod_base = OTHER; note = 2'-O-methyl ribonucleotide
  modified_base 29: mod_base = OTHER; note = 2'-O-methyl ribonucleotide
  modified_base 30: mod_base = OTHER; note = 2'-O-methyl ribonucleotide
  modified_base 31: mod_base = OTHER; note = 2'-O-methyl ribonucleotide
  modified_base 32: mod_base = OTHER; note = 2'-O-methyl ribonucleotide
  modified_base 33: mod_base = OTHER; note = 2'-O-methyl ribonucleotide
  modified_base 34: mod_base = OTHER; note = 2'-O-methyl ribonucleotide
  modified_base 35: mod_base = OTHER; note = 2'-O-methyl ribonucleotide
  modified_base 36: mod_base = OTHER; note = 2'-O-methyl ribonucleotide
  modified_base 37: mod_base = OTHER; note = 2'-O-methyl ribonucleotide
  modified_base 38: mod_base = OTHER; note = 2'-O-methyl ribonucleotide
  modified_base 39: mod_base = OTHER; note = 2'-O-methyl ribonucleotide
  modified_base 40: mod_base = OTHER; note = 2'-O-methyl ribonucleotide
  modified_base 41: mod_base = OTHER; note = 2'-O-methyl ribonucleotide
  modified_base 42: mod_base = OTHER; note = 2'-O-methyl ribonucleotide
  modified_base 46: mod_base = OTHER; note = 2'-O-methyl ribonucleotide
  modified_base 48: mod_base = OTHER; note = 2'-O-methyl ribonucleotide
  modified_base 50: mod_base = OTHER; note = 2'-O-methyl ribonucleotide
  modified_base 52: mod_base = OTHER; note = 2'-O-methyl ribonucleotide
  modified_base 53: mod_base = OTHER; note = 2'-O-methyl ribonucleotide
  modified_base 54: mod_base = OTHER; note = 2'-O-methyl ribonucleotide
  modified_base 55: mod_base = OTHER; note = 2'-O-methyl ribonucleotide
  modified_base 56: mod_base = OTHER; note = 2'-O-methyl ribonucleotide
  modified_base 57: mod_base = OTHER; note = 2'-O-methyl ribonucleotide
  modified_base 60: mod_base = OTHER; note = 2'-O-methyl ribonucleotide
  modified_base 61: mod_base = OTHER; note = 2'-O-methyl ribonucleotide
  modified_base 66: mod_base = OTHER; note = 2'-O-methyl ribonucleotide
  modified_base 67: mod_base = OTHER; note = 2'-O-methyl ribonucleotide
  modified_base 70: mod_base = OTHER; note = 2'-O-methyl ribonucleotide
  modified_base 71: mod_base = OTHER; note = 2'-O-methyl ribonucleotide
  modified_base 72: mod_base = OTHER; note = 2'-O-methyl ribonucleotide
  modified_base 73: mod_base = OTHER; note = 2'-O-methyl ribonucleotide
  modified_base 74: mod_base = OTHER; note = 2'-O-methyl ribonucleotide
  modified_base 75: mod_base = OTHER; note = 2'-O-methyl ribonucleotide
  modified_base 76: mod_base = OTHER; note = 2'-O-methyl ribonucleotide
  modified_base 77: mod_base = OTHER; note = 2'-O-methyl ribonucleotide
  modified_base 78: mod_base = OTHER; note = 2'-O-methyl ribonucleotide
  modified_base 79: mod_base = OTHER; note = 2'-O-methyl ribonucleotide
  modified_base 80: mod_base = OTHER; note = 2'-O-methyl ribonucleotide
  modified_base 81: mod_base = OTHER; note = 2'-O-methyl ribonucleotide
  modified_base 83: mod_base = OTHER; note = 2'-O-methyl ribonucleotide
  modified_base 84: mod_base = OTHER; note = 2'-O-methyl ribonucleotide
  modified_base 85: mod_base = OTHER; note = 2'-O-methyl ribonucleotide
  modified_base 86: mod_base = OTHER; note = 2'-O-methyl ribonucleotide
  modified_base 87: mod_base = OTHER; note = 2'-O-methyl ribonucleotide
  modified_base 88: mod_base = OTHER; note = 2'-O-methyl ribonucleotide
  modified_base 89: mod_base = OTHER; note = 2'-O-methyl ribonucleotide
  modified_base 90: mod_base = OTHER; note = 2'-O-methyl ribonucleotide
  modified_base 91: mod_base = OTHER; note = 2'-O-methyl ribonucleotide
  modified_base 92: mod_base = OTHER; note = 2'-O-methyl ribonucleotide
  modified_base 93: mod_base = OTHER; note = 2'-O-methyl ribonucleotide
  modified_base 94: mod_base = OTHER; note = 2'-O-methyl ribonucleotide
  modified_base 95: mod_base = OTHER; note = 2'-O-methyl ribonucleotide
  modified_base 96: mod_base = OTHER; note = 2'-O-methyl ribonucleotide
  modified_base 97: mod_base = OTHER; note = 2'-O-methyl ribonucleotide
  modified_base 98: mod_base = OTHER; note = 2'-O-methyl ribonucleotide
  modified_base 99: mod_base = OTHER; note = 2'-O-methyl ribonucleotide
  modified_base 100: mod_base = OTHER; note = 2'-O-methyl ribonucleotide
  modified_base 9: mod_base = OTHER; note = nebularine
  modified_base 14: mod_base = OTHER; note = nebularine
  modified_base 1..3: mod_base = OTHER; note = phosphorothioate linkage
  modified_base 97..100: mod_base = OTHER; note = phosphorothioate linkage
  misc_feature 1: note = RNA
  misc_feature 2: note = RNA
  misc_feature 3: note = RNA
  misc_feature 4: note = RNA
  misc_feature 5: note = RNA
  misc_feature 6: note = RNA
  misc_feature 7: note = RNA
  misc_feature 8: note = RNA
  misc_feature 10: note = RNA
  misc_feature 11: note = RNA
  misc_feature 12: note = RNA
  misc_feature 13: note = RNA
  misc_feature 15: note = RNA
  misc_feature 16: note = RNA
  misc_feature 17: note = RNA
  misc_feature 18: note = RNA
  misc_feature 19: note = RNA
  misc_feature 20: note = RNA
  misc_feature 21: note = RNA
  misc_feature 22: note = RNA
  misc_feature 23: note = RNA
  misc_feature 24: note = RNA
  misc_feature 25: note = RNA
  misc_feature 26: note = RNA
  misc_feature 27: note = RNA
  misc_feature 28: note = RNA
  misc_feature 29: note = RNA
  misc_feature 30: note = RNA
  misc_feature 31: note = RNA
  misc_feature 32: note = RNA
  misc_feature 33: note = RNA
  misc_feature 34: note = RNA
  misc_feature 35: note = RNA
  misc_feature 36: note = RNA
  misc_feature 37: note = RNA
  misc_feature 38: note = RNA
  misc_feature 39: note = RNA
  misc_feature 40: note = RNA
  misc_feature 41: note = RNA
  misc_feature 42: note = RNA
  misc_feature 43: note = RNA
  misc_feature 44: note = RNA
  misc_feature 45: note = RNA
  misc_feature 46: note = RNA
  misc_feature 47: note = RNA
  misc_feature 48: note = RNA
  misc_feature 49: note = RNA
  misc_feature 50: note = RNA
  misc_feature 51: note = RNA
  misc_feature 52: note = RNA
  misc_feature 53: note = RNA
  misc_feature 54: note = RNA
  misc_feature 55: note = RNA
  misc_feature 56: note = RNA
  misc_feature 57: note = RNA
  misc_feature 58: note = RNA
  misc_feature 59: note = RNA
  misc_feature 60: note = RNA
  misc_feature 61: note = RNA
  misc_feature 62: note = RNA
  misc_feature 63: note = RNA
  misc_feature 64: note = RNA
  misc_feature 65: note = RNA
  misc_feature 66: note = RNA
  misc_feature 67: note = RNA
  misc_feature 68: note = RNA
  misc_feature 69: note = RNA
  misc_feature 70: note = RNA
  misc_feature 71: note = RNA
  misc_feature 72: note = RNA
  misc_feature 73: note = RNA
  misc_feature 74: note = RNA
  misc_feature 75: note = RNA
  misc_feature 76: note = RNA
  misc_feature 77: note = RNA
  misc_feature 78: note = RNA
  misc_feature 79: note = RNA
  misc_feature 80: note = RNA
  misc_feature 81: note = RNA
  misc_feature 82: note = RNA
  misc_feature 83: note = RNA
  misc_feature 84: note = RNA
  misc_feature 85: note = RNA
  misc_feature 86: note = RNA
  misc_feature 87: note = RNA
  misc_feature 88: note = RNA
  misc_feature 89: note = RNA
  misc_feature 90: note = RNA
  misc_feature 91: note = RNA
  misc_feature 92: note = RNA
  misc_feature 93: note = RNA
  misc_feature 94: note = RNA
  misc_feature 95: note = RNA
  misc_feature 96: note = RNA
  misc_feature 97: note = RNA
  misc_feature 98: note = RNA
  misc_feature 99: note = RNA
  misc_feature 100: note = RNA
  misc_feature 9: note = DNA
  misc_feature 14: note = DNA

SEQ ID NO: 1995 - DNA, 100 bp, synthetic construct; identical to SEQ ID NO: 1942
  source 1..100: mol_type = other DNA
  modified_base 1: mod_base = OTHER; note = 2'-O-methyl ribonucleotide
  modified_base 2: mod_base = OTHER; note = 2'-O-methyl ribonucleotide
  modified_base 3: mod_base = OTHER; note = 2'-O-methyl ribonucleotide
  modified_base 21: mod_base = OTHER; note = 2'-O-methyl ribonucleotide
  modified_base 28: mod_base = OTHER; note = 2'-O-methyl ribonucleotide
  modified_base 29: mod_base = OTHER; note = 2'-O-methyl ribonucleotide
  modified_base 30: mod_base = OTHER; note = 2'-O-methyl ribonucleotide
  modified_base 31: mod_base = OTHER; note = 2'-O-methyl ribonucleotide
  modified_base 32: mod_base = OTHER; note = 2'-O-methyl ribonucleotide
  modified_base 33: mod_base = OTHER; note = 2'-O-methyl ribonucleotide
  modified_base 34: mod_base = OTHER; note = 2'-O-methyl ribonucleotide
  modified_base 35: mod_base = OTHER; note = 2'-O-methyl ribonucleotide
  modified_base 36: mod_base = OTHER; note = 2'-O-methyl ribonucleotide
  modified_base 37: mod_base = OTHER; note = 2'-O-methyl ribonucleotide
  modified_base 38: mod_base = OTHER; note = 2'-O-methyl ribonucleotide
  modified_base 39: mod_base = OTHER; note = 2'-O-methyl ribonucleotide
  modified_base 40: mod_base = OTHER; note = 2'-O-methyl ribonucleotide
  modified_base 41: mod_base = OTHER; note = 2'-O-methyl ribonucleotide
  modified_base 42: mod_base = OTHER; note = 2'-O-methyl ribonucleotide
  modified_base 46: mod_base = OTHER; note = 2'-O-methyl ribonucleotide
  modified_base 48: mod_base = OTHER; note = 2'-O-methyl ribonucleotide
  modified_base 50: mod_base = OTHER; note = 2'-O-methyl ribonucleotide
  modified_base 52: mod_base = OTHER; note = 2'-O-methyl ribonucleotide
  modified_base 53: mod_base = OTHER; note = 2'-O-methyl ribonucleotide
  modified_base 54: mod_base = OTHER; note = 2'-O-methyl ribonucleotide
  modified_base 55: mod_base = OTHER; note = 2'-O-methyl ribonucleotide
  modified_base 56: mod_base = OTHER; note = 2'-O-methyl ribonucleotide
  modified_base 57: mod_base = OTHER; note = 2'-O-methyl ribonucleotide
  modified_base 60: mod_base = OTHER; note = 2'-O-methyl ribonucleotide
  modified_base 61: mod_base = OTHER; note = 2'-O-methyl ribonucleotide
  modified_base 66: mod_base = OTHER; note = 2'-O-methyl ribonucleotide
  modified_base 67: mod_base = OTHER; note = 2'-O-methyl ribonucleotide
  modified_base 70: mod_base = OTHER; note = 2'-O-methyl ribonucleotide
  modified_base 71: mod_base = OTHER; note = 2'-O-methyl ribonucleotide
  modified_base 72: mod_base = OTHER; note = 2'-O-methyl ribonucleotide
  modified_base 73: mod_base = OTHER; note = 2'-O-methyl ribonucleotide
  modified_base 74: mod_base = OTHER; note = 2'-O-methyl ribonucleotide
  modified_base 75: mod_base = OTHER; note = 2'-O-methyl ribonucleotide
  modified_base 76: mod_base = OTHER; note = 2'-O-methyl ribonucleotide
  modified_base 77: mod_base = OTHER; note = 2'-O-methyl ribonucleotide
  modified_base 78: mod_base = OTHER; note = 2'-O-methyl ribonucleotide
  modified_base 79: mod_base = OTHER; note = 2'-O-methyl ribonucleotide
  modified_base 80: mod_base = OTHER; note = 2'-O-methyl ribonucleotide
  modified_base 81: mod_base = OTHER; note = 2'-O-methyl ribonucleotide
  modified_base 83: mod_base = OTHER; note = 2'-O-methyl ribonucleotide
  modified_base 84: mod_base = OTHER; note = 2'-O-methyl ribonucleotide
  modified_base 85: mod_base = OTHER; note = 2'-O-methyl ribonucleotide
  modified_base 86: mod_base = OTHER; note = 2'-O-methyl ribonucleotide
  modified_base 87: mod_base = OTHER; note = 2'-O-methyl ribonucleotide
  modified_base 88: mod_base = OTHER; note = 2'-O-methyl ribonucleotide
  modified_base 89: mod_base = OTHER; note = 2'-O-methyl ribonucleotide
  modified_base 90: mod_base = OTHER; note = 2'-O-methyl ribonucleotide
  modified_base 91: mod_base = OTHER; note = 2'-O-methyl ribonucleotide
  modified_base 92: mod_base = OTHER; note = 2'-O-methyl ribonucleotide
  modified_base 93: mod_base = OTHER; note = 2'-O-methyl ribonucleotide
  modified_base 94: mod_base = OTHER; note = 2'-O-methyl ribonucleotide
  modified_base 95: mod_base = OTHER; note = 2'-O-methyl ribonucleotide
  modified_base 96: mod_base = OTHER; note = 2'-O-methyl ribonucleotide
  modified_base 97: mod_base = OTHER; note = 2'-O-methyl ribonucleotide
  modified_base 98: mod_base = OTHER; note = 2'-O-methyl ribonucleotide
  modified_base 99: mod_base = OTHER; note = 2'-O-methyl ribonucleotide
  modified_base 100: mod_base = OTHER; note = 2'-O-methyl ribonucleotide
  modified_base 9: mod_base = OTHER; note = nebularine
  modified_base 1..3: mod_base = OTHER; note = phosphorothioate linkage
  modified_base 97..100: mod_base = OTHER; note = phosphorothioate linkage
  misc_feature 1: note = RNA
  misc_feature 2: note = RNA
  misc_feature 3: note = RNA
  misc_feature 4: note = RNA
  misc_feature 5: note = RNA
  misc_feature 6: note = RNA
  misc_feature 7: note = RNA
  misc_feature 8: note = RNA
  misc_feature 10: note = RNA
  misc_feature 11: note = RNA
  misc_feature 12: note = RNA
  misc_feature 13: note = RNA
  misc_feature 14: note = RNA
  misc_feature 15: note = RNA
  misc_feature 16: note = RNA
  misc_feature 17: note = RNA
  misc_feature 18: note = RNA
  misc_feature 19: note = RNA
  misc_feature 20: note = RNA
  misc_feature 21: note = RNA
  misc_feature 22: note = RNA
  misc_feature 23: note = RNA
  misc_feature 24: note = RNA
  misc_feature 25: note = RNA
  misc_feature 26: note = RNA
  misc_feature 27: note = RNA
  misc_feature 28: note = RNA
  misc_feature 29: note = RNA
  misc_feature 30: note = RNA
  misc_feature 31: note = RNA
  misc_feature 32: note = RNA
  misc_feature 33: note = RNA
  misc_feature 34: note = RNA
  misc_feature 35: note = RNA
  misc_feature 36: note = RNA
  misc_feature 37: note = RNA
  misc_feature 38: note = RNA
  misc_feature 39: note = RNA
  misc_feature 40: note = RNA
  misc_feature 41: note = RNA
  misc_feature 42: note = RNA
  misc_feature 43: note = RNA
  misc_feature 44: note = RNA
  misc_feature 45: note = RNA
  misc_feature 46: note = RNA
  misc_feature 47: note = RNA
  misc_feature 48: note = RNA
  misc_feature 49: note = RNA
  misc_feature 50: note = RNA
  misc_feature 51: note = RNA
  misc_feature 52: note = RNA
  misc_feature 53: note = RNA
  misc_feature 54: note = RNA
  misc_feature 55: note = RNA
  misc_feature 56: note = RNA
  misc_feature 57: note = RNA
  misc_feature 58: note = RNA
  misc_feature 59: note = RNA
  misc_feature 60: note = RNA
  misc_feature 61: note = RNA
  misc_feature 62: note = RNA
  misc_feature 63: note = RNA
  misc_feature 64: note = RNA
  misc_feature 65: note = RNA
  misc_feature 66: note = RNA
  misc_feature 67: note = RNA
  misc_feature 68: note = RNA
  misc_feature 69: note = RNA
  misc_feature 70: note = RNA
  misc_feature 71: note = RNA
  misc_feature 72: note = RNA
  misc_feature 73: note = RNA
  misc_feature 74: note = RNA
  misc_feature 75: note = RNA
  misc_feature 76: note = RNA
  misc_feature 77: note = RNA
  misc_feature 78: note = RNA
  misc_feature 79: note = RNA
  misc_feature 80: note = RNA
  misc_feature 81: note = RNA
  misc_feature 82: note = RNA
  misc_feature 83: note = RNA
  misc_feature 84: note = RNA
  misc_feature 85: note = RNA
  misc_feature 86: note = RNA
  misc_feature 87: note = RNA
  misc_feature 88: note = RNA
  misc_feature 89: note = RNA
  misc_feature 90: note = RNA
  misc_feature 91: note = RNA
  misc_feature 92: note = RNA
  misc_feature 93: note = RNA
  misc_feature 94: note = RNA
  misc_feature 95: note = RNA
  misc_feature 96: note = RNA
  misc_feature 97: note = RNA
  misc_feature 98: note = RNA
  misc_feature 99: note = RNA
  misc_feature 100: note = RNA
  misc_feature 9: note = DNA

SEQ ID NO: 1996 - DNA, 100 bp, synthetic construct; identical to SEQ ID NO: 1943
  source 1..100: mol_type = other DNA
  modified_base 1: mod_base = OTHER; note = 2'-O-methyl ribonucleotide
  modified_base 2: mod_base = OTHER; note = 2'-O-methyl ribonucleotide
  modified_base 3: mod_base = OTHER; note = 2'-O-methyl ribonucleotide
  modified_base 21: mod_base = OTHER; note = 2'-O-methyl ribonucleotide
  modified_base 28: mod_base = OTHER; note = 2'-O-methyl ribonucleotide
  modified_base 29: mod_base = OTHER; note = 2'-O-methyl ribonucleotide
  modified_base 30: mod_base = OTHER; note = 2'-O-methyl ribonucleotide
  modified_base 31: mod_base = OTHER; note = 2'-O-methyl ribonucleotide
  modified_base 32: mod_base = OTHER; note = 2'-O-methyl ribonucleotide
  modified_base 33: mod_base = OTHER; note = 2'-O-methyl ribonucleotide
  modified_base 34: mod_base = OTHER; note = 2'-O-methyl ribonucleotide
  modified_base 35: mod_base = OTHER; note = 2'-O-methyl ribonucleotide
  modified_base 36: mod_base = OTHER; note = 2'-O-methyl ribonucleotide
  modified_base 37: mod_base = OTHER; note = 2'-O-methyl ribonucleotide
  modified_base 38: mod_base = OTHER; note = 2'-O-methyl ribonucleotide
  modified_base 39: mod_base = OTHER; note = 2'-O-methyl ribonucleotide
  modified_base 40: mod_base = OTHER; note = 2'-O-methyl ribonucleotide
  modified_base 41: mod_base = OTHER; note = 2'-O-methyl ribonucleotide
  modified_base 42: mod_base = OTHER; note = 2'-O-methyl ribonucleotide
  modified_base 46: mod_base = OTHER; note = 2'-O-methyl ribonucleotide
  modified_base 48: mod_base = OTHER; note = 2'-O-methyl ribonucleotide
  modified_base 50: mod_base = OTHER; note = 2'-O-methyl ribonucleotide
  modified_base 52: mod_base = OTHER; note = 2'-O-methyl ribonucleotide
  modified_base 53: mod_base = OTHER; note = 2'-O-methyl ribonucleotide
  modified_base 54: mod_base = OTHER; note = 2'-O-methyl ribonucleotide
  modified_base 55: mod_base = OTHER; note = 2'-O-methyl ribonucleotide
  modified_base 56: mod_base = OTHER; note = 2'-O-methyl ribonucleotide
  modified_base 57: mod_base = OTHER; note = 2'-O-methyl ribonucleotide
  modified_base 60: mod_base = OTHER; note = 2'-O-methyl ribonucleotide
  modified_base 61: mod_base = OTHER; note = 2'-O-methyl ribonucleotide
  modified_base 66: mod_base = OTHER; note = 2'-O-methyl ribonucleotide
  modified_base 67: mod_base = OTHER; note = 2'-O-methyl ribonucleotide
  modified_base 70: mod_base = OTHER; note = 2'-O-methyl ribonucleotide
  modified_base 71: mod_base = OTHER; note = 2'-O-methyl ribonucleotide
  modified_base 72: mod_base = OTHER; note = 2'-O-methyl ribonucleotide
  modified_base 73: mod_base = OTHER; note = 2'-O-methyl ribonucleotide
  modified_base 74: mod_base = OTHER; note = 2'-O-methyl ribonucleotide
  modified_base 75: mod_base = OTHER; note = 2'-O-methyl ribonucleotide
  modified_base 76: mod_base = OTHER; note = 2'-O-methyl ribonucleotide
  modified_base 77: mod_base = OTHER; note = 2'-O-methyl ribonucleotide
  modified_base 78: mod_base = OTHER; note = 2'-O-methyl ribonucleotide
  modified_base 79: mod_base = OTHER; note = 2'-O-methyl ribonucleotide
  modified_base 80: mod_base = OTHER; note = 2'-O-methyl ribonucleotide
  modified_base 81: mod_base = OTHER; note = 2'-O-methyl ribonucleotide
  modified_base 83: mod_base = OTHER; note = 2'-O-methyl ribonucleotide
  modified_base 84: mod_base = OTHER; note = 2'-O-methyl ribonucleotide
  modified_base 85: mod_base = OTHER; note = 2'-O-methyl ribonucleotide
  modified_base 86: mod_base = OTHER; note = 2'-O-methyl ribonucleotide
  modified_base 87: mod_base = OTHER; note = 2'-O-methyl ribonucleotide
  modified_base 88: mod_base = OTHER; note = 2'-O-methyl ribonucleotide
  modified_base 89: mod_base = OTHER; note = 2'-O-methyl ribonucleotide
  modified_base 90: mod_base = OTHER; note = 2'-O-methyl ribonucleotide
  modified_base 91: mod_base = OTHER; note = 2'-O-methyl ribonucleotide
  modified_base 92: mod_base = OTHER; note = 2'-O-methyl ribonucleotide
  modified_base 93: mod_base = OTHER; note = 2'-O-methyl ribonucleotide
  modified_base 94: mod_base = OTHER; note = 2'-O-methyl ribonucleotide
  modified_base 95: mod_base = OTHER; note = 2'-O-methyl ribonucleotide
  modified_base 96: mod_base = OTHER; note = 2'-O-methyl ribonucleotide
  modified_base 97: mod_base = OTHER; note = 2'-O-methyl ribonucleotide
  modified_base 98: mod_base = OTHER; note = 2'-O-methyl ribonucleotide
  modified_base 99: mod_base = OTHER; note = 2'-O-methyl ribonucleotide
  modified_base 100: mod_base = OTHER; note = 2'-O-methyl ribonucleotide
  modified_base 14: mod_base = OTHER; note = nebularine
  modified_base 1..3: mod_base = OTHER; note = phosphorothioate linkage
  modified_base 97..100: mod_base = OTHER; note = phosphorothioate linkage
  misc_feature 1: note = RNA
  misc_feature 2: note = RNA
  misc_feature 3: note = RNA
  misc_feature 4: note = RNA
  misc_feature 5: note = RNA
  misc_feature 6: note = RNA
  misc_feature 7: note = RNA
  misc_feature 8: note = RNA
  misc_feature 9: note = RNA
  misc_feature 10: note = RNA
  misc_feature 11: note = RNA
  misc_feature 12: note = RNA
  misc_feature 13: note = RNA
  misc_feature 15: note = RNA
  misc_feature 16: note = RNA
  misc_feature 17: note = RNA
  misc_feature 18: note = RNA
  misc_feature 19: note = RNA
  misc_feature 20: note = RNA
  misc_feature 21: note = RNA
  misc_feature 22: note = RNA
  misc_feature 23: note = RNA
  misc_feature 24: note = RNA
  misc_feature 25: note = RNA
  misc_feature 26: note = RNA
  misc_feature 27: note = RNA
  misc_feature 28: note = RNA
  misc_feature 29: note = RNA
  misc_feature 30: note = RNA
  misc_feature 31: note = RNA
  misc_feature 32: note = RNA
  misc_feature 33: note = RNA
  misc_feature 34: note = RNA
  misc_feature 35: note = RNA
  misc_feature 36: note = RNA
  misc_feature 37: note = RNA
  misc_feature 38: note = RNA
  misc_feature 39: note = RNA
  misc_feature 40: note = RNA
  misc_feature 41: note = RNA
  misc_feature 42: note = RNA
  misc_feature 43: note = RNA
  misc_feature 44: note = RNA
  misc_feature 45: note = RNA
  misc_feature 46: note = RNA
  misc_feature 47: note = RNA
  misc_feature 48: note = RNA
  misc_feature 49: note = RNA
  misc_feature 50: note = RNA
  misc_feature 51: note = RNA
  misc_feature 52: note = RNA
  misc_feature 53: note = RNA
  misc_feature 54: note = RNA
  misc_feature 55: note = RNA
  misc_feature 56: note = RNA
  misc_feature 57: note = RNA
  misc_feature 58: note = RNA
  misc_feature 59: note = RNA
  misc_feature 60: note = RNA
  misc_feature 61: note = RNA
  misc_feature 62: note = RNA
  misc_feature 63: note = RNA
  misc_feature 64: note = RNA
  misc_feature 65: note = RNA
  misc_feature 66: note = RNA
  misc_feature 67: note = RNA
  misc_feature 68: note = RNA
  misc_feature 69: note = RNA
  misc_feature 70: note = RNA
  misc_feature 71: note = RNA
  misc_feature 72: note = RNA
  misc_feature 73: note = RNA
  misc_feature 74: note = RNA
  misc_feature 75: note = RNA
  misc_feature 76: note = RNA
  misc_feature 77: note = RNA
  misc_feature 78: note = RNA
  misc_feature 79: note = RNA
  misc_feature 80: note = RNA
  misc_feature 81: note = RNA
  misc_feature 82: note = RNA
  misc_feature 83: note = RNA
  misc_feature 84: note = RNA
  misc_feature 85: note = RNA
  misc_feature 86: note = RNA
  misc_feature 87: note = RNA
  misc_feature 88: note = RNA
  misc_feature 89: note = RNA
  misc_feature 90: note = RNA
  misc_feature 91: note = RNA
  misc_feature 92: note = RNA
  misc_feature 93: note = RNA
  misc_feature 94: note = RNA
  misc_feature 95: note = RNA
  misc_feature 96: note = RNA
  misc_feature 97: note = RNA
  misc_feature 98: note = RNA
  misc_feature 99: note = RNA
  misc_feature 100: note = RNA
  misc_feature 14: note = DNA

SEQ ID NO: 1997 - DNA, 100 bp, synthetic construct; identical to SEQ ID NO: 1944
  source 1..100: mol_type = other DNA
  modified_base 1: mod_base = OTHER; note = 2'-O-methyl ribonucleotide
  modified_base 2: mod_base = OTHER; note = 2'-O-methyl ribonucleotide
  modified_base 3: mod_base = OTHER; note = 2'-O-methyl ribonucleotide
  modified_base 21: mod_base = OTHER; note = 2'-O-methyl ribonucleotide
  modified_base 28: mod_base = OTHER; note = 2'-O-methyl ribonucleotide
  modified_base 29: mod_base = OTHER; note = 2'-O-methyl ribonucleotide
  modified_base 30: mod_base = OTHER; note = 2'-O-methyl ribonucleotide
  modified_base 31: mod_base = OTHER; note = 2'-O-methyl ribonucleotide
  modified_base 32: mod_base = OTHER; note = 2'-O-methyl ribonucleotide
  modified_base 33: mod_base = OTHER; note = 2'-O-methyl ribonucleotide
  modified_base 35: mod_base = OTHER; note = 2'-O-methyl ribonucleotide
  modified_base 36: mod_base = OTHER; note = 2'-O-methyl ribonucleotide
  modified_base 37: mod_base = OTHER; note = 2'-O-methyl ribonucleotide
  modified_base 38: mod_base = OTHER; note = 2'-O-methyl ribonucleotide
  modified_base 39: mod_base = OTHER; note = 2'-O-methyl ribonucleotide
  modified_base 40: mod_base = OTHER; note = 2'-O-methyl ribonucleotide
  modified_base 41: mod_base = OTHER; note = 2'-O-methyl ribonucleotide
  modified_base 42: mod_base = OTHER; note = 2'-O-methyl ribonucleotide
  modified_base 46: mod_base = OTHER; note = 2'-O-methyl ribonucleotide
  modified_base 48: mod_base = OTHER; note = 2'-O-methyl ribonucleotide
  modified_base 50: mod_base = OTHER; note = 2'-O-methyl ribonucleotide
  modified_base 52: mod_base = OTHER; note = 2'-O-methyl ribonucleotide
  modified_base 53: mod_base = OTHER; note = 2'-O-methyl ribonucleotide
  modified_base 54: mod_base = OTHER; note = 2'-O-methyl ribonucleotide
  modified_base 55: mod_base = OTHER; note = 2'-O-methyl ribonucleotide
  modified_base 56: mod_base = OTHER; note = 2'-O-methyl ribonucleotide
  modified_base 57: mod_base = OTHER; note = 2'-O-methyl ribonucleotide
  modified_base 60: mod_base = OTHER; note = 2'-O-methyl ribonucleotide
  modified_base 61: mod_base = OTHER; note = 2'-O-methyl ribonucleotide
  modified_base 66: mod_base = OTHER; note = 2'-O-methyl ribonucleotide
  modified_base 67: mod_base = OTHER; note = 2'-O-methyl ribonucleotide
  modified_base 70: mod_base = OTHER; note = 2'-O-methyl ribonucleotide
  modified_base 71: mod_base = OTHER; note = 2'-O-methyl ribonucleotide
  modified_base 72: mod_base = OTHER; note = 2'-O-methyl ribonucleotide
  modified_base 73: mod_base = OTHER; note = 2'-O-methyl ribonucleotide
  modified_base 74: mod_base = OTHER; note = 2'-O-methyl ribonucleotide
  modified_base 75: mod_base = OTHER; note = 2'-O-methyl ribonucleotide
  modified_base 76: mod_base = OTHER; note = 2'-O-methyl ribonucleotide
  modified_base 77: mod_base = OTHER; note = 2'-O-methyl ribonucleotide
  modified_base 78: mod_base = OTHER; note = 2'-O-methyl ribonucleotide
  modified_base 79: mod_base = OTHER; note = 2'-O-methyl ribonucleotide
  modified_base 80: mod_base = OTHER; note = 2'-O-methyl ribonucleotide
  modified_base 81: mod_base = OTHER; note = 2'-O-methyl ribonucleotide
  modified_base 83: mod_base = OTHER; note = 2'-O-methyl ribonucleotide
  modified_base 84: mod_base = OTHER; note = 2'-O-methyl ribonucleotide
  modified_base 85: mod_base = OTHER; note = 2'-O-methyl ribonucleotide
  modified_base 86: mod_base = OTHER; note = 2'-O-methyl ribonucleotide
  modified_base 87: mod_base = OTHER; note = 2'-O-methyl ribonucleotide
  modified_base 88: mod_base = OTHER; note = 2'-O-methyl ribonucleotide
  modified_base 89: mod_base = OTHER; note = 2'-O-methyl ribonucleotide
  modified_base 90: mod_base = OTHER; note = 2'-O-methyl ribonucleotide
  modified_base 91: mod_base = OTHER; note = 2'-O-methyl ribonucleotide
  modified_base 92: mod_base = OTHER; note = 2'-O-methyl ribonucleotide
  modified_base 93: mod_base = OTHER; note = 2'-O-methyl ribonucleotide
  modified_base 94: mod_base = OTHER; note = 2'-O-methyl ribonucleotide
  modified_base 95: mod_base = OTHER; note = 2'-O-methyl ribonucleotide
  modified_base 96: mod_base = OTHER; note = 2'-O-methyl ribonucleotide
  modified_base 97: mod_base = OTHER; note = 2'-O-methyl ribonucleotide
  modified_base 98: mod_base = OTHER; note = 2'-O-methyl ribonucleotide
  modified_base 99: mod_base = OTHER; note = 2'-O-methyl ribonucleotide
  modified_base 100: mod_base = OTHER; note = 2'-O-methyl ribonucleotide
  modified_base 34: mod_base = OTHER; note = nebularine
  modified_base 1..3: mod_base = OTHER; note = phosphorothioate linkage
  modified_base 97..100: mod_base = OTHER; note = phosphorothioate linkage
  misc_feature 1: note = RNA
  misc_feature 2: note = RNA
  misc_feature 3: note = RNA
  misc_feature 4: note = RNA
  misc_feature 5: note = RNA
  misc_feature 6: note = RNA
  misc_feature 7: note = RNA
  misc_feature 8: note = RNA
  misc_feature 9: note = RNA
  misc_feature 10: note = RNA
  misc_feature 11: note = RNA
  misc_feature 12: note = RNA
  misc_feature 13: note = RNA
  misc_feature 14: note = RNA
  misc_feature 15: note = RNA
  misc_feature 16: note = RNA
  misc_feature 17: note = RNA
  misc_feature 18: note = RNA
  misc_feature 19: note = RNA
  misc_feature 20: note = RNA
  misc_feature 21: note = RNA
  misc_feature 22: note = RNA
  misc_feature 23: note = RNA
  misc_feature 24: note = RNA
  misc_feature 25: note = RNA
  misc_feature 26: note = RNA
  misc_feature 27: note = RNA
  misc_feature 28: note = RNA
  misc_feature 29: note = RNA
  misc_feature 30: note = RNA
  misc_feature 31: note = RNA
  misc_feature 32: note = RNA
  misc_feature 33: note = RNA
  misc_feature 35: note = RNA
  misc_feature 36: note = RNA
  misc_feature 37: note = RNA
  misc_feature 38: note = RNA
  misc_feature 39: note = RNA
  misc_feature 40: note = RNA
  misc_feature 41: note = RNA
  misc_feature 42: note = RNA
  misc_feature 43: note = RNA
  misc_feature 44: note = RNA
  misc_feature 45: note = RNA
  misc_feature 46: note = RNA
  misc_feature 47: note = RNA
  misc_feature 48: note = RNA
  misc_feature 49: note = RNA
  misc_feature 50: note = RNA
  misc_feature 51: note = RNA
  misc_feature 52: note = RNA
  misc_feature 53: note = RNA
  misc_feature 54: note = RNA
  misc_feature 55: note = RNA
  misc_feature 56: note = RNA
  misc_feature 57: note = RNA
  misc_feature 58: note = RNA
  misc_feature 59: note = RNA
  misc_feature 60: note = RNA
  misc_feature 61: note = RNA
  misc_feature 62: note = RNA
  misc_feature 63: note = RNA
  misc_feature 64: note = RNA
  misc_feature 65: note = RNA
  misc_feature 66: note = RNA
  misc_feature 67: note = RNA
  misc_feature 68: note = RNA
  misc_feature 69: note = RNA
  misc_feature 70: note = RNA
  misc_feature 71: note = RNA
  misc_feature 72: note = RNA
  misc_feature 73: note = RNA
  misc_feature 74: note = RNA
  misc_feature 75: note = RNA
  misc_feature 76: note = RNA
  misc_feature 77: note = RNA
  misc_feature 78: note = RNA
  misc_feature 79: note = RNA
  misc_feature 80: note = RNA
  misc_feature 81: note = RNA
  misc_feature 82: note = RNA
  misc_feature 83: note = RNA
  misc_feature 84: note = RNA
  misc_feature 85: note = RNA
  misc_feature 86: note = RNA
  misc_feature 87: note = RNA
  misc_feature 88: note = RNA
  misc_feature 89: note = RNA
  misc_feature 90: note = RNA
  misc_feature 91: note = RNA
  misc_feature 92: note = RNA
  misc_feature 93: note = RNA
  misc_feature 94: note = RNA
  misc_feature 95: note = RNA
  misc_feature 96: note = RNA
  misc_feature 97: note = RNA
  misc_feature 98: note = RNA
  misc_feature 99: note = RNA
  misc_feature 100: note = RNA
  misc_feature 34: note = DNA

SEQ ID NO: 1998 - DNA, 100 bp, synthetic construct; identical to SEQ ID NO: 1945
  source 1..100: mol_type = other DNA
  modified_base 1: mod_base = OTHER; note = 2'-O-methyl ribonucleotide
  modified_base 2: mod_base = OTHER; note = 2'-O-methyl ribonucleotide
  modified_base 3: mod_base = OTHER; note = 2'-O-methyl ribonucleotide
  modified_base 21: mod_base = OTHER; note = 2'-O-methyl ribonucleotide
  modified_base 28: mod_base = OTHER; note = 2'-O-methyl ribonucleotide
  modified_base 29: mod_base = OTHER; note = 2'-O-methyl ribonucleotide
  modified_base 30: mod_base = OTHER; note = 2'-O-methyl ribonucleotide
  modified_base 31: mod_base = OTHER; note = 2'-O-methyl ribonucleotide
  modified_base 32: mod_base = OTHER; note = 2'-O-methyl ribonucleotide
  modified_base 33: mod_base = OTHER; note = 2'-O-methyl ribonucleotide
  modified_base 35: mod_base = OTHER; note = 2'-O-methyl ribonucleotide
  modified_base 36: mod_base = OTHER; note = 2'-O-methyl ribonucleotide
  modified_base 37: mod_base = OTHER; note = 2'-O-methyl ribonucleotide
  modified_base 38: mod_base = OTHER; note = 2'-O-methyl ribonucleotide
  modified_base 39: mod_base = OTHER; note = 2'-O-methyl ribonucleotide
  modified_base 40: mod_base = OTHER; note = 2'-O-methyl ribonucleotide
  modified_base 41: mod_base = OTHER; note = 2'-O-methyl ribonucleotide
  modified_base 42: mod_base = OTHER; note = 2'-O-methyl ribonucleotide
  modified_base 46: mod_base = OTHER; note = 2'-O-methyl ribonucleotide
  modified_base 48: mod_base = OTHER; note = 2'-O-methyl ribonucleotide
  modified_base 50: mod_base = OTHER; note = 2'-O-methyl ribonucleotide
  modified_base 52: mod_base = OTHER; note = 2'-O-methyl ribonucleotide
  modified_base 53: mod_base = OTHER; note = 2'-O-methyl ribonucleotide
  modified_base 54: mod_base = OTHER; note = 2'-O-methyl ribonucleotide
  modified_base 55: mod_base = OTHER; note = 2'-O-methyl ribonucleotide
  modified_base 56: mod_base = OTHER; note = 2'-O-methyl ribonucleotide
  modified_base 60: mod_base = OTHER; note = 2'-O-methyl ribonucleotide
  modified_base 61: mod_base = OTHER; note = 2'-O-methyl ribonucleotide
  modified_base 66: mod_base = OTHER; note = 2'-O-methyl ribonucleotide
  modified_base 67: mod_base = OTHER; note = 2'-O-methyl ribonucleotide
  modified_base 70: mod_base = OTHER; note = 2'-O-methyl ribonucleotide
  modified_base 71: mod_base = OTHER; note = 2'-O-methyl ribonucleotide
  modified_base 72: mod_base = OTHER; note = 2'-O-methyl ribonucleotide
  modified_base 73: mod_base = OTHER; note = 2'-O-methyl ribonucleotide
  modified_base 74: mod_base = OTHER; note = 2'-O-methyl ribonucleotide
  modified_base 75: mod_base = OTHER; note = 2'-O-methyl ribonucleotide
  modified_base 76: mod_base = OTHER; note = 2'-O-methyl ribonucleotide
  modified_base 77: mod_base = OTHER; note = 2'-O-methyl ribonucleotide
  modified_base 78: mod_base = OTHER; note = 2'-O-methyl ribonucleotide
  modified_base 79: mod_base = OTHER; note = 2'-O-methyl ribonucleotide
  modified_base 80: mod_base = OTHER; note = 2'-O-methyl ribonucleotide
  modified_base 81: mod_base = OTHER; note = 2'-O-methyl ribonucleotide
  modified_base 83: mod_base = OTHER; note = 2'-O-methyl ribonucleotide
  modified_base 84: mod_base = OTHER; note = 2'-O-methyl ribonucleotide
  modified_base 85: mod_base = OTHER; note = 2'-O-methyl ribonucleotide
  modified_base 86: mod_base = OTHER; note = 2'-O-methyl ribonucleotide
  modified_base 87: mod_base = OTHER; note = 2'-O-methyl ribonucleotide
  modified_base 88: mod_base = OTHER; note = 2'-O-methyl ribonucleotide
  modified_base 89: mod_base = OTHER; note = 2'-O-methyl ribonucleotide
  modified_base 90: mod_base = OTHER; note = 2'-O-methyl ribonucleotide
  modified_base 91: mod_base = OTHER; note = 2'-O-methyl ribonucleotide
  modified_base 92: mod_base = OTHER; note = 2'-O-methyl ribonucleotide
  modified_base 93: mod_base = OTHER; note = 2'-O-methyl ribonucleotide
  modified_base 94: mod_base = OTHER; note = 2'-O-methyl ribonucleotide
  modified_base 95: mod_base = OTHER; note = 2'-O-methyl ribonucleotide
  modified_base 96: mod_base = OTHER; note = 2'-O-methyl ribonucleotide
  modified_base 97: mod_base = OTHER; note = 2'-O-methyl ribonucleotide
  modified_base 98: mod_base = OTHER; note = 2'-O-methyl ribonucleotide
  modified_base 99: mod_base = OTHER; note = 2'-O-methyl ribonucleotide
  modified_base 100: mod_base = OTHER; note = 2'-O-methyl ribonucleotide
  modified_base 34: mod_base = OTHER; note = nebularine
  modified_base 57: mod_base = OTHER; note = nebularine
  modified_base 1..3: mod_base = OTHER; note = phosphorothioate linkage
  modified_base 97..100: mod_base = OTHER; note = phosphorothioate linkage
  misc_feature 1: note = RNA
  misc_feature 2: note = RNA
  misc_feature 3: note = RNA
  misc_feature 4: note = RNA
  misc_feature 5: note = RNA
  misc_feature 6: note = RNA
  misc_feature 7: note = RNA
  misc_feature 8: note = RNA
  misc_feature 9: note = RNA
  misc_feature 10: note = RNA
  misc_feature 11: note = RNA
  misc_feature 12: note = RNA
  misc_feature 13: note = RNA
  misc_feature 14: note = RNA
  misc_feature 15: note = RNA
  misc_feature 16: note = RNA
  misc_feature 17: note = RNA
  misc_feature 18: note = RNA
  misc_feature 19: note = RNA
  misc_feature 20: note = RNA
  misc_feature 21: note = RNA
  misc_feature 22: note = RNA
  misc_feature 23: note = RNA
  misc_feature 24: note = RNA
  misc_feature 25: note = RNA
  misc_feature 26: note = RNA
  misc_feature 27: note = RNA
  misc_feature 28: note = RNA
  misc_feature 29: note = RNA
  misc_feature 30: note = RNA
  misc_feature 31: note = RNA
  misc_feature 32: note = RNA
  misc_feature 33: note = RNA
  misc_feature 35: note = RNA
  misc_feature 36: note = RNA
  misc_feature 37: note = RNA
  misc_feature 38: note = RNA
  misc_feature 39: note = RNA
  misc_feature 40: note = RNA
  misc_feature 41: note = RNA
  misc_feature 42: note = RNA
  misc_feature 43: note = RNA
  misc_feature 44: note = RNA
  misc_feature 45: note = RNA
  misc_feature 46: note = RNA
  misc_feature 47: note = RNA
  misc_feature 48: note = RNA
  misc_feature 49: note = RNA
  misc_feature 50: note = RNA
  misc_feature 51: note = RNA
  misc_feature 52: note = RNA
  misc_feature 53: note = RNA
  misc_feature 54: note = RNA
  misc_feature 55: note = RNA
  misc_feature 56: note = RNA
  misc_feature 58: note = RNA
  misc_feature 59: note = RNA
  misc_feature 60: note = RNA
  misc_feature 61: note = RNA
  misc_feature 62: note = RNA
  misc_feature 63: note = RNA
  misc_feature 64: note = RNA
  misc_feature 65: note = RNA
  misc_feature 66: note = RNA
  misc_feature 67: note = RNA
  misc_feature 68: note = RNA
  misc_feature 69: note = RNA
  misc_feature 70: note = RNA
  misc_feature 71: note = RNA
  misc_feature 72: note = RNA
  misc_feature 73: note = RNA
  misc_feature 74: note = RNA
  misc_feature 75: note = RNA
  misc_feature 76: note = RNA
  misc_feature 77: note = RNA
  misc_feature 78: note = RNA
  misc_feature 79: note = RNA
  misc_feature 80: note = RNA
  misc_feature 81: note = RNA
  misc_feature 82: note = RNA
  misc_feature 83: note = RNA
  misc_feature 84: note = RNA
  misc_feature 85: note = RNA
  misc_feature 86: note = RNA
  misc_feature 87: note = RNA
  misc_feature 88: note = RNA
  misc_feature 89: note = RNA
  misc_feature 90: note = RNA
  misc_feature 91: note = RNA
  misc_feature 92: note = RNA
  misc_feature 93: note = RNA
  misc_feature 94: note = RNA
  misc_feature 95: note = RNA
  misc_feature 96: note = RNA
  misc_feature 97: note = RNA
  misc_feature 98: note = RNA
  misc_feature 99: note = RNA
  misc_feature 100: note = RNA
  misc_feature 34: note = DNA
  misc_feature 57: note = DNA

SEQ ID NO: 1999 - DNA, 100 bp, synthetic construct; identical to SEQ ID NO: 1946
  source 1..100: mol_type = other DNA
  modified_base 1: mod_base = OTHER; note = 2'-O-methyl ribonucleotide
  modified_base 2: mod_base = OTHER; note = 2'-O-methyl ribonucleotide
  modified_base 3: mod_base = OTHER; note = 2'-O-methyl ribonucleotide
  modified_base 21: mod_base = OTHER; note = 2'-O-methyl ribonucleotide
  modified_base 28: mod_base = OTHER; note = 2'-O-methyl ribonucleotide
  modified_base 29: mod_base = OTHER; note = 2'-O-methyl ribonucleotide
  modified_base 30: mod_base = OTHER; note = 2'-O-methyl ribonucleotide
  modified_base 31: mod_base = OTHER; note = 2'-O-methyl ribonucleotide
  modified_base 32: mod_base = OTHER; note = 2'-O-methyl ribonucleotide
  modified_base 33: mod_base = OTHER; note = 2'-O-methyl ribonucleotide
  modified_base 34: mod_base = OTHER; note = 2'-O-methyl ribonucleotide
  modified_base 35: mod_base = OTHER; note = 2'-O-methyl ribonucleotide
  modified_base 36: mod_base = OTHER; note = 2'-O-methyl ribonucleotide
  modified_base 37: mod_base = OTHER; note = 2'-O-methyl ribonucleotide
  modified_base 38: mod_base = OTHER; note = 2'-O-methyl ribonucleotide
  modified_base 39: mod_base = OTHER; note = 2'-O-methyl ribonucleotide
  modified_base 40: mod_base = OTHER; note = 2'-O-methyl ribonucleotide
  modified_base 41: mod_base = OTHER; note = 2'-O-methyl ribonucleotide
  modified_base 42: mod_base = OTHER; note = 2'-O-methyl ribonucleotide
  modified_base 46: mod_base = OTHER; note = 2'-O-methyl ribonucleotide
  modified_base 48: mod_base = OTHER; note = 2'-O-methyl ribonucleotide
  modified_base 50: mod_base = OTHER; note = 2'-O-methyl ribonucleotide
  modified_base 52: mod_base = OTHER; note = 2'-O-methyl ribonucleotide
  modified_base 53: mod_base = OTHER; note = 2'-O-methyl ribonucleotide
  modified_base 54: mod_base = OTHER; note = 2'-O-methyl ribonucleotide
  modified_base 55: mod_base = OTHER; note = 2'-O-methyl ribonucleotide
  modified_base 56: mod_base = OTHER; note = 2'-O-methyl ribonucleotide
  modified_base 60: mod_base = OTHER; note = 2'-O-methyl ribonucleotide
  modified_base 61: mod_base = OTHER; note = 2'-O-methyl ribonucleotide
  modified_base 66: mod_base = OTHER; note = 2'-O-methyl ribonucleotide
  modified_base 67: mod_base = OTHER; note = 2'-O-methyl ribonucleotide
  modified_base 70: mod_base = OTHER; note = 2'-O-methyl ribonucleotide
  modified_base 71: mod_base = OTHER; note = 2'-O-methyl ribonucleotide
  modified_base 72: mod_base = OTHER; note = 2'-O-methyl ribonucleotide
  modified_base 73: mod_base = OTHER; note = 2'-O-methyl ribonucleotide
  modified_base 74: mod_base = OTHER; note = 2'-O-methyl ribonucleotide
  modified_base 75: mod_base = OTHER; note = 2'-O-methyl ribonucleotide
  modified_base 76: mod_base = OTHER; note = 2'-O-methyl ribonucleotide
  modified_base 77: mod_base = OTHER; note = 2'-O-methyl ribonucleotide
  modified_base 78: mod_base = OTHER; note = 2'-O-methyl ribonucleotide
  modified_base 79: mod_base = OTHER; note = 2'-O-methyl ribonucleotide
  modified_base 80: mod_base = OTHER; note = 2'-O-methyl ribonucleotide
  modified_base 81: mod_base = OTHER; note = 2'-O-methyl ribonucleotide
  modified_base 83: mod_base = OTHER; note = 2'-O-methyl ribonucleotide
  modified_base 84: mod_base = OTHER; note = 2'-O-methyl ribonucleotide
  modified_base 85: mod_base = OTHER; note = 2'-O-methyl ribonucleotide
  modified_base 86: mod_base = OTHER; note = 2'-O-methyl ribonucleotide
  modified_base 87: mod_base = OTHER; note = 2'-O-methyl ribonucleotide
  modified_base 88: mod_base = OTHER; note = 2'-O-methyl ribonucleotide
  modified_base 89: mod_base = OTHER; note = 2'-O-methyl ribonucleotide
  modified_base 90: mod_base = OTHER; note = 2'-O-methyl ribonucleotide
  modified_base 91: mod_base = OTHER; note = 2'-O-methyl ribonucleotide
  modified_base 92: mod_base = OTHER; note = 2'-O-methyl ribonucleotide
  modified_base 93: mod_base = OTHER; note = 2'-O-methyl ribonucleotide
  modified_base 94: mod_base = OTHER; note = 2'-O-methyl ribonucleotide
  modified_base 95: mod_base = OTHER; note = 2'-O-methyl ribonucleotide
  modified_base 96: mod_base = OTHER; note = 2'-O-methyl ribonucleotide
  modified_base 97: mod_base = OTHER; note = 2'-O-methyl ribonucleotide
  modified_base 98: mod_base = OTHER; note = 2'-O-methyl ribonucleotide
  modified_base 99: mod_base = OTHER; note = 2'-O-methyl ribonucleotide
  modified_base 100: mod_base = OTHER; note = 2'-O-methyl ribonucleotide
  modified_base 57: mod_base = OTHER; note = nebularine
  modified_base 1..3: mod_base = OTHER; note = phosphorothioate linkage
  modified_base 97..100: mod_base = OTHER; note = phosphorothioate linkage
  misc_feature 1: note = RNA
  misc_feature 2: note = RNA
  misc_feature 3: note = RNA
  misc_feature 4: note = RNA
  misc_feature 5: note = RNA
  misc_feature 6: note = RNA
  misc_feature 7: note = RNA
  misc_feature 8: note = RNA
  misc_feature 9: note = RNA
  misc_feature 10: note = RNA
  misc_feature 11: note = RNA
  misc_feature 12: note = RNA
  misc_feature 13: note = RNA
  misc_feature 14: note = RNA
  misc_feature 15: note = RNA
  misc_feature 16: note = RNA
  misc_feature 17: note = RNA
  misc_feature 18: note = RNA
  misc_feature 19: note = RNA
  misc_feature 20: note = RNA
  misc_feature 21: note = RNA
  misc_feature 22: note = RNA
  misc_feature 23: note = RNA
  misc_feature 24: note = RNA
  misc_feature 25: note = RNA
  misc_feature 26: note = RNA
  misc_feature 27: note = RNA
  misc_feature 28: note = RNA
  misc_feature 29: note = RNA
  misc_feature 30: note = RNA
  misc_feature 31: note = RNA
  misc_feature 32: note = RNA
  misc_feature 33: note = RNA
  misc_feature 34: note = RNA
  misc_feature 35: note = RNA
  misc_feature 36: note = RNA
  misc_feature 37: note = RNA
  misc_feature 38: note = RNA
  misc_feature 39: note = RNA
  misc_feature 40: note = RNA
  misc_feature 41: note = RNA
  misc_feature 42: note = RNA
  misc_feature 43: note = RNA
  misc_feature 44: note = RNA
  misc_feature 45: note = RNA
  misc_feature 46: note = RNA
  misc_feature 47: note = RNA
  misc_feature 48: note = RNA
  misc_feature 49: note = RNA
  misc_feature 50: note = RNA
  misc_feature 51: note = RNA
  misc_feature 52: note = RNA
  misc_feature 53: note = RNA
  misc_feature 54: note = RNA
  misc_feature 55: note = RNA
  misc_feature 56: note = RNA
  misc_feature 58: note = RNA
  misc_feature 59: note = RNA
  misc_feature 60: note = RNA
  misc_feature 61: note = RNA
  misc_feature 62: note = RNA
  misc_feature 63: note = RNA
  misc_feature 64: note = RNA
  misc_feature 65: note = RNA
  misc_feature 66: note = RNA
  misc_feature 67: note = RNA
  misc_feature 68: note = RNA
  misc_feature 69: note = RNA
  misc_feature 70: note = RNA
  misc_feature 71: note = RNA
  misc_feature 72: note = RNA
  misc_feature 73: note = RNA
  misc_feature 74: note = RNA
  misc_feature 75: note = RNA
  misc_feature 76: note = RNA
  misc_feature 77: note = RNA
  misc_feature 78: note = RNA
  misc_feature 79: note = RNA
  misc_feature 80: note = RNA
  misc_feature 81: note = RNA
  misc_feature 82: note = RNA
  misc_feature 83: note = RNA
  misc_feature 84: note = RNA
  misc_feature 85: note = RNA
  misc_feature 86: note = RNA
  misc_feature 87: note = RNA
  misc_feature 88: note = RNA
  misc_feature 89: note = RNA
  misc_feature 90: note = RNA
  misc_feature 91: note = RNA
  misc_feature 92: note = RNA
  misc_feature 93: note = RNA
  misc_feature 94: note = RNA
  misc_feature 95: note = RNA
  misc_feature 96: note = RNA
  misc_feature 97: note = RNA
  misc_feature 98: note = RNA
  misc_feature 99: note = RNA
  misc_feature 100: note = RNA
  misc_feature 57: note = DNA

SEQ ID NO: 2000 - DNA, 100 bp, synthetic construct; identical to SEQ ID NO: 1947
  source 1..100: mol_type = other DNA
  modified_base 1: mod_base = OTHER; note = 2'-O-methyl ribonucleotide
  modified_base 2: mod_base = OTHER; note = 2'-O-methyl ribonucleotide
  modified_base 3: mod_base = OTHER; note = 2'-O-methyl ribonucleotide
  modified_base 21: mod_base = OTHER; note = 2'-O-methyl ribonucleotide
  modified_base 28: mod_base = OTHER; note = 2'-O-methyl ribonucleotide
  modified_base 29: mod_base = OTHER; note = 2'-O-methyl ribonucleotide
  modified_base 30: mod_base = OTHER; note = 2'-O-methyl ribonucleotide
  modified_base 31: mod_base = OTHER; note = 2'-O-methyl ribonucleotide
  modified_base 32: mod_base = OTHER; note = 2'-O-methyl ribonucleotide
  modified_base 33: mod_base = OTHER; note = 2'-O-methyl ribonucleotide
  modified_base 34: mod_base = OTHER; note = 2'-O-methyl ribonucleotide
  modified_base 35: mod_base = OTHER; note = 2'-O-methyl ribonucleotide
  modified_base 36: mod_base = OTHER; note = 2'-O-methyl ribonucleotide
  modified_base 37: mod_base = OTHER; note = 2'-O-methyl ribonucleotide
  modified_base 38: mod_base = OTHER; note = 2'-O-methyl ribonucleotide
  modified_base 39: mod_base = OTHER; note = 2'-O-methyl ribonucleotide
  modified_base 40: mod_base = OTHER; note = 2'-O-methyl ribonucleotide
  modified_base 41: mod_base = OTHER; note = 2'-O-methyl ribonucleotide
  modified_base 42: mod_base = OTHER; note = 2'-O-methyl ribonucleotide
  modified_base 46: mod_base = OTHER; note = 2'-O-methyl ribonucleotide
  modified_base 48: mod_base = OTHER; note = 2'-O-methyl ribonucleotide
  modified_base 50: mod_base = OTHER; note = 2'-O-methyl ribonucleotide
  modified_base 52: mod_base = OTHER; note = 2'-O-methyl ribonucleotide
  modified_base 53: mod_base = OTHER; note = 2'-O-methyl ribonucleotide
  modified_base 54: mod_base = OTHER; note = 2'-O-methyl ribonucleotide
  modified_base 55: mod_base = OTHER; note = 2'-O-methyl ribonucleotide
  modified_base 56: mod_base = OTHER; note = 2'-O-methyl ribonucleotide
  modified_base 57: mod_base = OTHER; note = 2'-O-methyl ribonucleotide
  modified_base 60: mod_base = OTHER; note = 2'-O-methyl ribonucleotide
  modified_base 61: mod_base = OTHER; note = 2'-O-methyl ribonucleotide
  modified_base 66: mod_base = OTHER; note = 2'-O-methyl ribonucleotide
  modified_base 67: mod_base = OTHER; note = 2'-O-methyl ribonucleotide
  modified_base 70: mod_base = OTHER; note = 2'-O-methyl ribonucleotide
  modified_base 71: mod_base = OTHER; note = 2'-O-methyl ribonucleotide
  modified_base 72: mod_base = OTHER; note = 2'-O-methyl ribonucleotide
  modified_base 73: mod_base = OTHER; note = 2'-O-methyl ribonucleotide
  modified_base 74: mod_base = OTHER; note = 2'-O-methyl ribonucleotide
  modified_base 75: mod_base = OTHER; note = 2'-O-methyl ribonucleotide
  modified_base 76: mod_base = OTHER; note = 2'-O-methyl ribonucleotide
  modified_base 77: mod_base = OTHER; note = 2'-O-methyl ribonucleotide
  modified_base 78: mod_base = OTHER; note = 2'-O-methyl ribonucleotide
  modified_base 79: mod_base = OTHER; note = 2'-O-methyl ribonucleotide
  modified_base 80: mod_base = OTHER; note = 2'-O-methyl ribonucleotide
  modified_base 81: mod_base = OTHER; note = 2'-O-methyl ribonucleotide
  modified_base 83: mod_base = OTHER; note = 2'-O-methyl ribonucleotide
  modified_base 84: mod_base = OTHER; note = 2'-O-methyl ribonucleotide
  modified_base 85: mod_base = OTHER; note = 2'-O-methyl ribonucleotide
  modified_base 86: mod_base = OTHER; note = 2'-O-methyl ribonucleotide
  modified_base 87: mod_base = OTHER; note = 2'-O-methyl ribonucleotide
  modified_base 88: mod_base = OTHER; note = 2'-O-methyl ribonucleotide
  modified_base 89: mod_base = OTHER; note = 2'-O-methyl ribonucleotide
  modified_base 90: mod_base = OTHER; note = 2'-O-methyl ribonucleotide
  modified_base 91: mod_base = OTHER; note = 2'-O-methyl ribonucleotide
  modified_base 92: mod_base = OTHER; note = 2'-O-methyl ribonucleotide
  modified_base 93: mod_base = OTHER; note = 2'-O-methyl ribonucleotide
  modified_base 94: mod_base = OTHER; note = 2'-O-methyl ribonucleotide
  modified_base 95: mod_base = OTHER; note = 2'-O-methyl ribonucleotide
  modified_base 96: mod_base = OTHER; note = 2'-O-methyl ribonucleotide
  modified_base 97: mod_base = OTHER; note = 2'-O-methyl ribonucleotide
  modified_base 98: mod_base = OTHER; note = 2'-O-methyl ribonucleotide
  modified_base 99: mod_base = OTHER; note = 2'-O-methyl ribonucleotide
  modified_base 100: mod_base = OTHER; note = 2'-O-methyl ribonucleotide
  modified_base 65: mod_base = OTHER; note = nebularine
  modified_base 1..3: mod_base = OTHER; note = phosphorothioate linkage
  modified_base 97..100: mod_base = OTHER; note = phosphorothioate linkage
  misc_feature 1: note = RNA
  misc_feature 2: note = RNA
  misc_feature 3: note = RNA
  misc_feature 4: note = RNA
  misc_feature 5: note = RNA
  misc_feature 6: note = RNA
  misc_feature 7: note = RNA
  misc_feature 8: note = RNA
  misc_feature 9: note = RNA
  misc_feature 10: note = RNA
  misc_feature 11: note = RNA
  misc_feature 12: note = RNA
  misc_feature 13: note = RNA
  misc_feature 14: note = RNA
  misc_feature 15: note = RNA
  misc_feature 16: note = RNA
  misc_feature 17: note = RNA
  misc_feature 18: note = RNA
  misc_feature 19: note = RNA
  misc_feature 20: note = RNA
  misc_feature 21: note = RNA
  misc_feature 22: note = RNA
  misc_feature 23: note = RNA
  misc_feature 24: note = RNA
  misc_feature 25: note = RNA
  misc_feature 26: note = RNA
  misc_feature 27: note = RNA
  misc_feature 28: note = RNA
  misc_feature 29: note = RNA
  misc_feature 30: note = RNA
  misc_feature 31: note = RNA
  misc_feature 32: note = RNA
  misc_feature 33: note = RNA
  misc_feature 34: note = RNA
  misc_feature 35: note = RNA
  misc_feature 36: note = RNA
  misc_feature 37: note = RNA
  misc_feature 38: note = RNA
  misc_feature 39: note = RNA
  misc_feature 40: note = RNA
  misc_feature 41: note = RNA
  misc_feature 42: note = RNA
  misc_feature 43: note = RNA
  misc_feature 44: note = RNA
  misc_feature 45: note = RNA
  misc_feature 46: note = RNA
  misc_feature 47: note = RNA
  misc_feature 48: note = RNA
  misc_feature 49: note = RNA
  misc_feature 50: note = RNA
  misc_feature 51: note = RNA
  misc_feature 52: note = RNA
  misc_feature 53: note = RNA
  misc_feature 54: note = RNA
  misc_feature 55: note = RNA
  misc_feature 56: note = RNA
  misc_feature 57: note = RNA
  misc_feature 58: note = RNA
  misc_feature 59: note = RNA
  misc_feature 60: note = RNA
  misc_feature 61: note = RNA
  misc_feature 62: note = RNA
  misc_feature 63: note = RNA
  misc_feature 64: note = RNA
  misc_feature 66: note = RNA
  misc_feature 67: note = RNA
  misc_feature 68: note = RNA
  misc_feature 69: note = RNA
  misc_feature 70: note = RNA
  misc_feature 71: note = RNA
  misc_feature 72: note = RNA
  misc_feature 73: note = RNA
  misc_feature 74: note = RNA
  misc_feature 75: note = RNA
  misc_feature 76: note = RNA
  misc_feature 77: note = RNA
  misc_feature 78: note = RNA
  misc_feature 79: note = RNA
  misc_feature 80: note = RNA
  misc_feature 81: note = RNA
  misc_feature 82: note = RNA
  misc_feature 83: note = RNA
  misc_feature 84: note = RNA
  misc_feature 85: note = RNA
  misc_feature 86: note = RNA
  misc_feature 87: note = RNA
  misc_feature 88: note = RNA
  misc_feature 89: note = RNA
  misc_feature 90: note = RNA
  misc_feature 91: note = RNA
  misc_feature 92: note = RNA
  misc_feature 93: note = RNA
  misc_feature 94: note = RNA
  misc_feature 95: note = RNA
  misc_feature 96: note = RNA
  misc_feature 97: note = RNA
  misc_feature 98: note = RNA
  misc_feature 99: note = RNA
  misc_feature 100: note = RNA
  misc_feature 65: note = DNA

SEQ ID NO: 2001 - DNA, 100 bp, synthetic construct; identical to SEQ ID NO: 1948
  source 1..100: mol_type = other DNA
  modified_base 1: mod_base = OTHER; note = 2'-O-methyl ribonucleotide
  modified_base 2: mod_base = OTHER; note = 2'-O-methyl ribonucleotide
  modified_base 3: mod_base = OTHER; note = 2'-O-methyl ribonucleotide
  modified_base 21: mod_base = OTHER; note = 2'-O-methyl ribonucleotide
  modified_base 28: mod_base = OTHER; note = 2'-O-methyl ribonucleotide
  modified_base 29: mod_base = OTHER; note = 2'-O-methyl ribonucleotide
  modified_base 30: mod_base = OTHER; note = 2'-O-methyl ribonucleotide
  modified_base 31: mod_base = OTHER; note = 2'-O-methyl ribonucleotide
  modified_base 32: mod_base = OTHER; note = 2'-O-methyl ribonucleotide
  modified_base 33: mod_base = OTHER; note = 2'-O-methyl ribonucleotide
  modified_base 35: mod_base = OTHER; note = 2'-O-methyl ribonucleotide
  modified_base 36: mod_base = OTHER; note = 2'-O-methyl ribonucleotide
  modified_base 37: mod_base = OTHER; note = 2'-O-methyl ribonucleotide
  modified_base 38: mod_base = OTHER; note = 2'-O-methyl ribonucleotide
  modified_base 39: mod_base = OTHER; note = 2'-O-methyl ribonucleotide
  modified_base 40: mod_base = OTHER; note = 2'-O-methyl ribonucleotide
  modified_base 41: mod_base = OTHER; note = 2'-O-methyl ribonucleotide
  modified_base 42: mod_base = OTHER; note = 2'-O-methyl ribonucleotide
  modified_base 46: mod_base = OTHER; note = 2'-O-methyl ribonucleotide
  modified_base 48: mod_base = OTHER; note = 2'-O-methyl ribonucleotide
  modified_base 50: mod_base = OTHER; note = 2'-O-methyl ribonucleotide
  modified_base 52: mod_base = OTHER; note = 2'-O-methyl ribonucleotide
  modified_base 53: mod_base = OTHER; note = 2'-O-methyl ribonucleotide
  modified_base 54: mod_base = OTHER; note = 2'-O-methyl ribonucleotide
  modified_base 55: mod_base = OTHER; note = 2'-O-methyl ribonucleotide
  modified_base 56: mod_base = OTHER; note = 2'-O-methyl ribonucleotide
  modified_base 60: mod_base = OTHER; note = 2'-O-methyl ribonucleotide
  modified_base 61: mod_base = OTHER; note = 2'-O-methyl ribonucleotide
  modified_base 66: mod_base = OTHER; note = 2'-O-methyl ribonucleotide
  modified_base 67: mod_base = OTHER; note = 2'-O-methyl ribonucleotide
  modified_base 70: mod_base = OTHER; note = 2'-O-methyl ribonucleotide
  modified_base 71: mod_base = OTHER; note = 2'-O-methyl ribonucleotide
  modified_base 72: mod_base = OTHER; note = 2'-O-methyl ribonucleotide
  modified_base 73: mod_base = OTHER; note = 2'-O-methyl ribonucleotide
  modified_base 74: mod_base = OTHER; note = 2'-O-methyl ribonucleotide
  modified_base 75: mod_base = OTHER; note = 2'-O-methyl ribonucleotide
  modified_base 76: mod_base = OTHER; note = 2'-O-methyl ribonucleotide
  modified_base 77: mod_base = OTHER; note = 2'-O-methyl ribonucleotide
  modified_base 78: mod_base = OTHER; note = 2'-O-methyl ribonucleotide
  modified_base 79: mod_base = OTHER; note = 2'-O-methyl ribonucleotide
  modified_base 80: mod_base = OTHER; note = 2'-O-methyl ribonucleotide
  modified_base 81: mod_base = OTHER; note = 2'-O-methyl ribonucleotide
  modified_base 83: mod_base = OTHER; note = 2'-O-methyl ribonucleotide
  modified_base 84: mod_base = OTHER; note = 2'-O-methyl ribonucleotide
  modified_base 85: mod_base = OTHER; note = 2'-O-methyl ribonucleotide
  modified_base 86: mod_base = OTHER; note = 2'-O-methyl ribonucleotide
  modified_base 87: mod_base = OTHER; note = 2'-O-methyl ribonucleotide
  modified_base 88: mod_base = OTHER; note = 2'-O-methyl ribonucleotide
  modified_base 89: mod_base = OTHER; note = 2'-O-methyl ribonucleotide
  modified_base 90: mod_base = OTHER; note = 2'-O-methyl ribonucleotide
  modified_base 91: mod_base = OTHER; note = 2'-O-methyl ribonucleotide
  modified_base 92: mod_base = OTHER; note = 2'-O-methyl ribonucleotide
  modified_base 93: mod_base = OTHER; note = 2'-O-methyl ribonucleotide
  modified_base 94: mod_base = OTHER; note = 2'-O-methyl ribonucleotide
  modified_base 95: mod_base = OTHER; note = 2'-O-methyl ribonucleotide
  modified_base 96: mod_base = OTHER; note = 2'-O-methyl ribonucleotide
  modified_base 97: mod_base = OTHER; note = 2'-O-methyl ribonucleotide
  modified_base 98: mod_base = OTHER; note = 2'-O-methyl ribonucleotide
  modified_base 99: mod_base = OTHER; note = 2'-O-methyl ribonucleotide
  modified_base 100: mod_base = OTHER; note = 2'-O-methyl ribonucleotide
  modified_base 34: mod_base = OTHER; note = nebularine
  modified_base 57: mod_base = OTHER; note = nebularine
  modified_base 65: mod_base = OTHER; note = nebularine
  modified_base 1..3: mod_base = OTHER; note = phosphorothioate linkage
  modified_base 97..100: mod_base = OTHER; note = phosphorothioate linkage
  misc_feature 1: note = RNA
  misc_feature 2: note = RNA
  misc_feature 3: note = RNA
  misc_feature 4: note = RNA
  misc_feature 5: note = RNA
  misc_feature 6: note = RNA
  misc_feature 7: note = RNA
  misc_feature 8: note = RNA
  misc_feature 9: note = RNA
  misc_feature 10: note = RNA
  misc_feature 11: note = RNA
  misc_feature 12: note = RNA
  misc_feature 13: note = RNA
  misc_feature 14: note = RNA
  misc_feature 15: note = RNA
  misc_feature 16: note = RNA
  misc_feature 17: note = RNA
  misc_feature 18: note = RNA
  misc_feature 19: note = RNA
  misc_feature 20: note = RNA
  misc_feature 21: note = RNA
  misc_feature 22: note = RNA
  misc_feature 23: note = RNA
  misc_feature 24: note = RNA
  misc_feature 25: note = RNA
  misc_feature 26: note = RNA
  misc_feature 27: note = RNA
  misc_feature 28: note = RNA
  misc_feature 29: note = RNA
  misc_feature 30: note = RNA
  misc_feature 31: note = RNA
  misc_feature 32: note = RNA
  misc_feature 33: note = RNA
  misc_feature 35: note = RNA
  misc_feature 36: note = RNA
  misc_feature 37: note = RNA
  misc_feature 38: note = RNA
  misc_feature 39: note = RNA
  misc_feature 40: note = RNA
  misc_feature 41: note = RNA
  misc_feature 42: note = RNA
  misc_feature 43: note = RNA
  misc_feature 44: note = RNA
  misc_feature 45: note = RNA
  misc_feature 46: note = RNA
  misc_feature 47: note = RNA
  misc_feature 48: note = RNA
  misc_feature 49: note = RNA
  misc_feature 50: note = RNA
  misc_feature 51: note = RNA
  misc_feature 52: note = RNA
  misc_feature 53: note = RNA
  misc_feature 54: note = RNA
  misc_feature 55: note = RNA
  misc_feature 56: note = RNA
  misc_feature 58: note = RNA
  misc_feature 59: note = RNA
  misc_feature 60: note = RNA
  misc_feature 61: note = RNA
  misc_feature 62: note = RNA
  misc_feature 63: note = RNA
  misc_feature 64: note = RNA
  misc_feature 66: note = RNA
  misc_feature 67: note = RNA
  misc_feature 68: note = RNA
  misc_feature 69: note = RNA
  misc_feature 70: note = RNA
  misc_feature 71: note = RNA
  misc_feature 72: note = RNA
  misc_feature 73: note = RNA
  misc_feature 74: note = RNA
  misc_feature 75: note = RNA
  misc_feature 76: note = RNA
  misc_feature 77: note = RNA
  misc_feature 78: note = RNA
  misc_feature 79: note = RNA
  misc_feature 80: note = RNA
  misc_feature 81: note = RNA
  misc_feature 82: note = RNA
  misc_feature 83: note = RNA
  misc_feature 84: note = RNA
  misc_feature 85: note = RNA
  misc_feature 86: note = RNA
  misc_feature 87: note = RNA
  misc_feature 88: note = RNA
  misc_feature 89: note = RNA
  misc_feature 90: note = RNA
  misc_feature 91: note = RNA
  misc_feature 92: note = RNA
  misc_feature 93: note = RNA
  misc_feature 94: note = RNA
  misc_feature 95: note = RNA
  misc_feature 96: note = RNA
  misc_feature 97: note = RNA
  misc_feature 98: note = RNA
  misc_feature 99: note = RNA
  misc_feature 100: note = RNA
  misc_feature 34: note = DNA
  misc_feature 57: note = DNA
  misc_feature 65: note = DNA

SEQ ID NO: 2002 - DNA, 100 bp, synthetic construct; identical to SEQ ID NO: 1949
  source 1..100: mol_type = other DNA
  modified_base 1: mod_base = OTHER; note = 2'-O-methyl ribonucleotide
  modified_base 2: mod_base = OTHER; note = 2'-O-methyl ribonucleotide
  modified_base 3: mod_base = OTHER; note = 2'-O-methyl ribonucleotide
  modified_base 21: mod_base = OTHER; note = 2'-O-methyl ribonucleotide
  modified_base 29: mod_base = OTHER; note = 2'-O-methyl ribonucleotide
  modified_base 30: mod_base = OTHER; note = 2'-O-methyl ribonucleotide
  modified_base 31: mod_base = OTHER; note = 2'-O-methyl ribonucleotide
  modified_base 32: mod_base = OTHER; note = 2'-O-methyl ribonucleotide
  modified_base 33: mod_base = OTHER; note = 2'-O-methyl ribonucleotide
  modified_base 35: mod_base = OTHER; note = 2'-O-methyl ribonucleotide
  modified_base 36: mod_base = OTHER; note = 2'-O-methyl ribonucleotide
  modified_base 37: mod_base = OTHER; note = 2'-O-methyl ribonucleotide
  modified_base 38: mod_base = OTHER; note = 2'-O-methyl ribonucleotide
  modified_base 39: mod_base = OTHER; note = 2'-O-methyl ribonucleotide
  modified_base 40: mod_base = OTHER; note = 2'-O-methyl ribonucleotide
  modified_base 41: mod_base = OTHER; note = 2'-O-methyl ribonucleotide
  modified_base 46: mod_base = OTHER; note = 2'-O-methyl ribonucleotide
  modified_base 48: mod_base = OTHER; note = 2'-O-methyl ribonucleotide
  modified_base 50: mod_base = OTHER; note = 2'-O-methyl ribonucleotide
  modified_base 52: mod_base = OTHER; note = 2'-O-methyl ribonucleotide
  modified_base 53: mod_base = OTHER; note = 2'-O-methyl ribonucleotide
  modified_base 54: mod_base = OTHER; note = 2'-O-methyl ribonucleotide
  modified_base 55: mod_base = OTHER; note = 2'-O-methyl ribonucleotide
  modified_base 56: mod_base = OTHER; note = 2'-O-methyl ribonucleotide
  modified_base 60: mod_base = OTHER; note = 2'-O-methyl ribonucleotide
  modified_base 61: mod_base = OTHER; note = 2'-O-methyl ribonucleotide
  modified_base 66: mod_base = OTHER; note = 2'-O-methyl ribonucleotide
  modified_base 67: mod_base = OTHER; note = 2'-O-methyl ribonucleotide
  modified_base 70: mod_base = OTHER; note = 2'-O-methyl ribonucleotide
  modified_base 71: mod_base = OTHER; note = 2'-O-methyl ribonucleotide
  modified_base 72: mod_base = OTHER; note = 2'-O-methyl ribonucleotide
  modified_base 73: mod_base = OTHER; note = 2'-O-methyl ribonucleotide
  modified_base 74: mod_base = OTHER; note = 2'-O-methyl ribonucleotide
  modified_base 75: mod_base = OTHER; note = 2'-O-methyl ribonucleotide
  modified_base 76: mod_base = OTHER; note = 2'-O-methyl ribonucleotide
  modified_base 77: mod_base = OTHER; note = 2'-O-methyl ribonucleotide
  modified_base 78: mod_base = OTHER; note = 2'-O-methyl ribonucleotide
  modified_base 79: mod_base = OTHER; note = 2'-O-methyl ribonucleotide
  modified_base 80: mod_base = OTHER; note = 2'-O-methyl ribonucleotide
  modified_base 81: mod_base = OTHER; note = 2'-O-methyl ribonucleotide
  modified_base 83: mod_base = OTHER; note = 2'-O-methyl ribonucleotide
  modified_base 84: mod_base = OTHER; note = 2'-O-methyl ribonucleotide
  modified_base 85: mod_base = OTHER; note = 2'-O-methyl ribonucleotide
  modified_base 86: mod_base = OTHER; note = 2'-O-methyl ribonucleotide
  modified_base 87: mod_base = OTHER; note = 2'-O-methyl ribonucleotide
  modified_base 88: mod_base = OTHER; note = 2'-O-methyl ribonucleotide
  modified_base 89: mod_base = OTHER; note = 2'-O-methyl ribonucleotide
  modified_base 90: mod_base = OTHER; note = 2'-O-methyl ribonucleotide
  modified_base 91: mod_base = OTHER; note = 2'-O-methyl ribonucleotide
  modified_base 92: mod_base = OTHER; note = 2'-O-methyl ribonucleotide
  modified_base 93: mod_base = OTHER; note = 2'-O-methyl ribonucleotide
  modified_base 94: mod_base = OTHER; note = 2'-O-methyl ribonucleotide
  modified_base 95: mod_base = OTHER; note = 2'-O-methyl ribonucleotide
  modified_base 96: mod_base = OTHER; note = 2'-O-methyl ribonucleotide
  modified_base 97: mod_base = OTHER; note = 2'-O-methyl ribonucleotide
  modified_base 98: mod_base = OTHER; note = 2'-O-methyl ribonucleotide
  modified_base 99: mod_base = OTHER; note = 2'-O-methyl ribonucleotide
  modified_base 100: mod_base = OTHER; note = 2'-O-methyl ribonucleotide
  modified_base 28: mod_base = OTHER; note = nebularine
  modified_base 34: mod_base = OTHER; note = nebularine
  modified_base 42: mod_base = OTHER; note = nebularine
  modified_base 57: mod_base = OTHER; note = nebularine
  modified_base 65: mod_base = OTHER; note = nebularine
  modified_base 1..3: mod_base = OTHER; note = phosphorothioate linkage
  modified_base 97..100: mod_base = OTHER; note = phosphorothioate linkage
  misc_feature 1: note = RNA
  misc_feature 2: note = RNA
  misc_feature 3: note = RNA
  misc_feature 4: note = RNA
  misc_feature 5: note = RNA
  misc_feature 6: note = RNA
  misc_feature 7: note = RNA
  misc_feature 8: note = RNA
  misc_feature 9: note = RNA
  misc_feature 10: note = RNA
  misc_feature 11: note = RNA
  misc_feature 12: note = RNA
  misc_feature 13: note = RNA
  misc_feature 14: note = RNA
  misc_feature 15: note = RNA
  misc_feature 16: note = RNA
  misc_feature 17: note = RNA
  misc_feature 18: note = RNA
  misc_feature 19: note = RNA
  misc_feature 20: note = RNA
  misc_feature 21: note = RNA
  misc_feature 22: note = RNA
  misc_feature 23: note = RNA
  misc_feature 24: note = RNA
  misc_feature 25: note = RNA
  misc_feature 26: note = RNA
  misc_feature 27: note = RNA
  misc_feature 29: note = RNA
  misc_feature 30: note = RNA
  misc_feature 31: note = RNA
  misc_feature 32: note = RNA
  misc_feature 33: note = RNA
  misc_feature 35: note = RNA
  misc_feature 36: note = RNA
  misc_feature 37: note = RNA
  misc_feature 38: note = RNA
  misc_feature 39: note = RNA
  misc_feature 40: note = RNA
  misc_feature 41: note = RNA
  misc_feature 43: note = RNA
  misc_feature 44: note = RNA
  misc_feature 45: note = RNA
  misc_feature 46: note = RNA
  misc_feature 47: note = RNA
  misc_feature 48: note = RNA
  misc_feature 49: note = RNA
  misc_feature 50: note = RNA
  misc_feature 51: note = RNA
  misc_feature 52: note = RNA
  misc_feature 53: note = RNA
  misc_feature 54: note = RNA
  misc_feature 55: note = RNA
  misc_feature 56: note = RNA
  misc_feature 58: note = RNA
  misc_feature 59: note = RNA
  misc_feature 60: note = RNA
  misc_feature 61: note = RNA
  misc_feature 62: note = RNA
  misc_feature 63: note = RNA
  misc_feature 64: note = RNA
  misc_feature 66: note = RNA
  misc_feature 67: note = RNA
  misc_feature 68: note = RNA
  misc_feature 69: note = RNA
  misc_feature 70: note = RNA
  misc_feature 71: note = RNA
  misc_feature 72: note = RNA
  misc_feature 73: note = RNA
  misc_feature 74: note = RNA
  misc_feature 75: note = RNA
  misc_feature 76: note = RNA
  misc_feature 77: note = RNA
  misc_feature 78: note = RNA
  misc_feature 79: note = RNA
  misc_feature 80: note = RNA
  misc_feature 81: note = RNA
  misc_feature 82: note = RNA
  misc_feature 83: note = RNA
  misc_feature 84: note = RNA
  misc_feature 85: note = RNA
  misc_feature 86: note = RNA
  misc_feature 87: note = RNA
  misc_feature 88: note = RNA
  misc_feature 89: note = RNA
  misc_feature 90: note = RNA
  misc_feature 91: note = RNA
  misc_feature 92: note = RNA
  misc_feature 93: note = RNA
  misc_feature 94: note = RNA
  misc_feature 95: note = RNA
  misc_feature 96: note = RNA
  misc_feature 97: note = RNA
  misc_feature 98: note = RNA
  misc_feature 99: note = RNA
  misc_feature 100: note = RNA
  misc_feature 28: note = DNA
  misc_feature 34: note = DNA
  misc_feature 42: note = DNA
  misc_feature 57: note = DNA
  misc_feature 65: note = DNA

SEQ ID NO: 2003 - RNA, 100 nt, synthetic construct; identical to SEQ ID NO: 1896
  source 1..100: mol_type = other RNA
  modified_base 1: mod_base = OTHER; note = 2'-O-methyl ribonucleotide
  modified_base 2: mod_base = OTHER; note = 2'-O-methyl ribonucleotide
  modified_base 3: mod_base = OTHER; note = 2'-O-methyl ribonucleotide
  modified_base 21: mod_base = OTHER; note = 2'-O-methyl ribonucleotide
  modified_base 28: mod_base = OTHER; note = 2'-O-methyl ribonucleotide
  modified_base 29: mod_base = OTHER; note = 2'-O-methyl ribonucleotide
  modified_base 30: mod_base = OTHER; note = 2'-O-methyl ribonucleotide
  modified_base 31: mod_base = OTHER; note = 2'-O-methyl ribonucleotide
  modified_base 32: mod_base = OTHER; note = 2'-O-methyl ribonucleotide
  modified_base 33: mod_base = OTHER; note = 2'-O-methyl ribonucleotide
  modified_base 34: mod_base = OTHER; note = 2'-O-methyl ribonucleotide
  modified_base 35: mod_base = OTHER; note = 2'-O-methyl ribonucleotide
  modified_base 36: mod_base = OTHER; note = 2'-O-methyl ribonucleotide
  modified_base 37: mod_base = OTHER; note = 2'-O-methyl ribonucleotide
  modified_base 38: mod_base = OTHER; note = 2'-O-methyl ribonucleotide
  modified_base 39: mod_base = OTHER; note = 2'-O-methyl ribonucleotide
  modified_base 40: mod_base = OTHER; note = 2'-O-methyl ribonucleotide
  modified_base 41: mod_base = OTHER; note = 2'-O-methyl ribonucleotide
  modified_base 42: mod_base = OTHER; note = 2'-O-methyl ribonucleotide
  modified_base 46: mod_base = OTHER; note = 2'-O-methyl ribonucleotide
  modified_base 48: mod_base = OTHER; note = 2'-O-methyl ribonucleotide
  modified_base 50: mod_base = OTHER; note = 2'-O-methyl ribonucleotide
  modified_base 52: mod_base = OTHER; note = 2'-O-methyl ribonucleotide
  modified_base 53: mod_base = OTHER; note = 2'-O-methyl ribonucleotide
  modified_base 54: mod_base = OTHER; note = 2'-O-methyl ribonucleotide
  modified_base 55: mod_base = OTHER; note = 2'-O-methyl ribonucleotide
  modified_base 56: mod_base = OTHER; note = 2'-O-methyl ribonucleotide
  modified_base 57: mod_base = OTHER; note = 2'-O-methyl ribonucleotide
  modified_base 60: mod_base = OTHER; note = 2'-O-methyl ribonucleotide
  modified_base 61: mod_base = OTHER; note = 2'-O-methyl ribonucleotide
  modified_base 66: mod_base = OTHER; note = 2'-O-methyl ribonucleotide
  modified_base 67: mod_base = OTHER; note = 2'-O-methyl ribonucleotide
  modified_base 70: mod_base = OTHER; note = 2'-O-methyl ribonucleotide
  modified_base 71: mod_base = OTHER; note = 2'-O-methyl ribonucleotide
  modified_base 72: mod_base = OTHER; note = 2'-O-methyl ribonucleotide
  modified_base 73: mod_base = OTHER; note = 2'-O-methyl ribonucleotide
  modified_base 74: mod_base = OTHER; note = 2'-O-methyl ribonucleotide
  modified_base 75: mod_base = OTHER; note = 2'-O-methyl ribonucleotide
  modified_base 76: mod_base = OTHER; note = 2'-O-methyl ribonucleotide
  modified_base 77: mod_base = OTHER; note = 2'-O-methyl ribonucleotide
  modified_base 78: mod_base = OTHER; note = 2'-O-methyl ribonucleotide
  modified_base 79: mod_base = OTHER; note = 2'-O-methyl ribonucleotide
  modified_base 80: mod_base = OTHER; note = 2'-O-methyl ribonucleotide
  modified_base 81: mod_base = OTHER; note = 2'-O-methyl ribonucleotide
  modified_base 83: mod_base = OTHER; note = 2'-O-methyl ribonucleotide
  modified_base 84: mod_base = OTHER; note = 2'-O-methyl ribonucleotide
  modified_base 85: mod_base = OTHER; note = 2'-O-methyl ribonucleotide
  modified_base 86: mod_base = OTHER; note = 2'-O-methyl ribonucleotide
  modified_base 87: mod_base = OTHER; note = 2'-O-methyl ribonucleotide
  modified_base 88: mod_base = OTHER; note = 2'-O-methyl ribonucleotide
  modified_base 89: mod_base = OTHER; note = 2'-O-methyl ribonucleotide
  modified_base 90: mod_base = OTHER; note = 2'-O-methyl ribonucleotide
  modified_base 91: mod_base = OTHER; note = 2'-O-methyl ribonucleotide
  modified_base 92: mod_base = OTHER; note = 2'-O-methyl ribonucleotide
  modified_base 93: mod_base = OTHER; note = 2'-O-methyl ribonucleotide
  modified_base 94: mod_base = OTHER; note = 2'-O-methyl ribonucleotide
  modified_base 95: mod_base = OTHER; note = 2'-O-methyl ribonucleotide
  modified_base 96: mod_base = OTHER; note = 2'-O-methyl ribonucleotide
  modified_base 97: mod_base = OTHER; note = 2'-O-methyl ribonucleotide
  modified_base 98: mod_base = OTHER; note = 2'-O-methyl ribonucleotide
  modified_base 99: mod_base = OTHER; note = 2'-O-methyl ribonucleotide
  modified_base 100: mod_base = OTHER; note = 2'-O-methyl ribonucleotide
  modified_base 9: mod_base = OTHER; note = nebularine
  modified_base 14: mod_base = OTHER; note = nebularine
  modified_base 1..4: mod_base = OTHER; note = phosphorothioate linkage
  modified_base 98..100: mod_base = OTHER; note = phosphorothioate linkage

SEQ ID NO: 2004 - RNA, 100 nt, synthetic construct; identical to SEQ ID NO: 1897
  source 1..100: mol_type = other RNA
  modified_base 1: mod_base = OTHER; note = 2'-O-methyl ribonucleotide
  modified_base 2: mod_base = OTHER; note = 2'-O-methyl ribonucleotide
  modified_base 3: mod_base = OTHER; note = 2'-O-methyl ribonucleotide
  modified_base 21: mod_base = OTHER; note = 2'-O-methyl ribonucleotide
  modified_base 28: mod_base = OTHER; note = 2'-O-methyl ribonucleotide
  modified_base 29: mod_base = OTHER; note = 2'-O-methyl ribonucleotide
  modified_base 30: mod_base = OTHER; note = 2'-O-methyl ribonucleotide
  modified_base 31: mod_base = OTHER; note = 2'-O-methyl ribonucleotide
  modified_base 32: mod_base = OTHER; note = 2'-O-methyl ribonucleotide
  modified_base 33: mod_base = OTHER; note = 2'-O-methyl ribonucleotide
  modified_base 34: mod_base = OTHER; note = 2'-O-methyl ribonucleotide
  modified_base 35: mod_base = OTHER; note = 2'-O-methyl ribonucleotide
  modified_base 36: mod_base = OTHER; note = 2'-O-methyl ribonucleotide
  modified_base 37: mod_base = OTHER; note = 2'-O-methyl ribonucleotide
  modified_base 38: mod_base = OTHER; note = 2'-O-methyl ribonucleotide
  modified_base 39: mod_base = OTHER; note = 2'-O-methyl ribonucleotide
  modified_base 40: mod_base = OTHER; note = 2'-O-methyl ribonucleotide
  modified_base 41: mod_base = OTHER; note = 2'-O-methyl ribonucleotide
  modified_base 42: mod_base = OTHER; note = 2'-O-methyl ribonucleotide
  modified_base 46: mod_base = OTHER; note = 2'-O-methyl ribonucleotide
  modified_base 48: mod_base = OTHER; note = 2'-O-methyl ribonucleotide
  modified_base 50: mod_base = OTHER; note = 2'-O-methyl ribonucleotide
  modified_base 52: mod_base = OTHER; note = 2'-O-methyl ribonucleotide
  modified_base 53: mod_base = OTHER; note = 2'-O-methyl ribonucleotide
  modified_base 54: mod_base = OTHER; note = 2'-O-methyl ribonucleotide
  modified_base 55: mod_base = OTHER; note = 2'-O-methyl ribonucleotide
  modified_base 56: mod_base = OTHER; note = 2'-O-methyl ribonucleotide
  modified_base 57: mod_base = OTHER; note = 2'-O-methyl ribonucleotide
  modified_base 60: mod_base = OTHER; note = 2'-O-methyl ribonucleotide
  modified_base 61: mod_base = OTHER; note = 2'-O-methyl ribonucleotide
  modified_base 66: mod_base = OTHER; note = 2'-O-methyl ribonucleotide
  modified_base 67: mod_base = OTHER; note = 2'-O-methyl ribonucleotide
  modified_base 70: mod_base = OTHER; note = 2'-O-methyl ribonucleotide
  modified_base 71: mod_base = OTHER; note = 2'-O-methyl ribonucleotide
  modified_base 72: mod_base = OTHER; note = 2'-O-methyl ribonucleotide
  modified_base 73: mod_base = OTHER; note = 2'-O-methyl ribonucleotide
  modified_base 74: mod_base = OTHER; note = 2'-O-methyl ribonucleotide
  modified_base 75: mod_base = OTHER; note = 2'-O-methyl ribonucleotide
  modified_base 76: mod_base = OTHER; note = 2'-O-methyl ribonucleotide
  modified_base 77: mod_base = OTHER; note = 2'-O-methyl ribonucleotide
  modified_base 78: mod_base = OTHER; note = 2'-O-methyl ribonucleotide
  modified_base 79: mod_base = OTHER; note = 2'-O-methyl ribonucleotide
  modified_base 80: mod_base = OTHER; note = 2'-O-methyl ribonucleotide
  modified_base 81: mod_base = OTHER; note = 2'-O-methyl ribonucleotide
  modified_base 83: mod_base = OTHER; note = 2'-O-methyl ribonucleotide
  modified_base 84: mod_base = OTHER; note = 2'-O-methyl ribonucleotide
  modified_base 85: mod_base = OTHER; note = 2'-O-methyl ribonucleotide
  modified_base 86: mod_base = OTHER; note = 2'-O-methyl ribonucleotide
  modified_base 87: mod_base = OTHER; note = 2'-O-methyl ribonucleotide
  modified_base 88: mod_base = OTHER; note = 2'-O-methyl ribonucleotide
  modified_base 89: mod_base = OTHER; note = 2'-O-methyl ribonucleotide
  modified_base 90: mod_base = OTHER; note = 2'-O-methyl ribonucleotide
  modified_base 91: mod_base = OTHER; note = 2'-O-methyl ribonucleotide
  modified_base 92: mod_base = OTHER; note = 2'-O-methyl ribonucleotide
  modified_base 93: mod_base = OTHER; note = 2'-O-methyl ribonucleotide
  modified_base 94: mod_base = OTHER; note = 2'-O-methyl ribonucleotide
  modified_base 95: mod_base = OTHER; note = 2'-O-methyl ribonucleotide
  modified_base 96: mod_base = OTHER; note = 2'-O-methyl ribonucleotide
  modified_base 97: mod_base = OTHER; note = 2'-O-methyl ribonucleotide
  modified_base 98: mod_base = OTHER; note = 2'-O-methyl ribonucleotide
  modified_base 99: mod_base = OTHER; note = 2'-O-methyl ribonucleotide
  modified_base 100: mod_base = OTHER; note = 2'-O-methyl ribonucleotide
  modified_base 9: mod_base = OTHER; note = nebularine
  modified_base 1..4: mod_base = OTHER; note = phosphorothioate linkage
  modified_base 98..100: mod_base = OTHER; note = phosphorothioate linkage

SEQ ID NO: 2005 - RNA, 100 nt, synthetic construct; identical to SEQ ID NO: 1898
  source 1..100: mol_type = other RNA
  modified_base 1: mod_base = OTHER; note = 2'-O-methyl ribonucleotide
  modified_base 2: mod_base = OTHER; note = 2'-O-methyl ribonucleotide
  modified_base 3: mod_base = OTHER; note = 2'-O-methyl ribonucleotide
  modified_base 21: mod_base = OTHER; note = 2'-O-methyl ribonucleotide
  modified_base 28: mod_base = OTHER; note = 2'-O-methyl ribonucleotide
  modified_base 29: mod_base = OTHER; note = 2'-O-methyl ribonucleotide
  modified_base 30: mod_base = OTHER; note = 2'-O-methyl ribonucleotide
  modified_base 31: mod_base = OTHER; note = 2'-O-methyl ribonucleotide
  modified_base 32: mod_base = OTHER; note = 2'-O-methyl ribonucleotide
  modified_base 33: mod_base = OTHER; note = 2'-O-methyl ribonucleotide
  modified_base 34: mod_base = OTHER; note = 2'-O-methyl ribonucleotide
  modified_base 35: mod_base = OTHER; note = 2'-O-methyl ribonucleotide
  modified_base 36: mod_base = OTHER; note = 2'-O-methyl ribonucleotide
  modified_base 37: mod_base = OTHER; note = 2'-O-methyl ribonucleotide
  modified_base 38: mod_base = OTHER; note = 2'-O-methyl ribonucleotide
  modified_base 39: mod_base = OTHER; note = 2'-O-methyl ribonucleotide
  modified_base 40: mod_base = OTHER; note = 2'-O-methyl ribonucleotide
  modified_base 41: mod_base = OTHER; note = 2'-O-methyl ribonucleotide
  modified_base 42: mod_base = OTHER; note = 2'-O-methyl ribonucleotide
  modified_base 46: mod_base = OTHER; note = 2'-O-methyl ribonucleotide
  modified_base 48: mod_base = OTHER; note = 2'-O-methyl ribonucleotide
  modified_base 50: mod_base = OTHER; note = 2'-O-methyl ribonucleotide
  modified_base 52: mod_base = OTHER; note = 2'-O-methyl ribonucleotide
  modified_base 53: mod_base = OTHER; note = 2'-O-methyl ribonucleotide
  modified_base 54: mod_base = OTHER; note = 2'-O-methyl ribonucleotide
  modified_base 55: mod_base = OTHER; note = 2'-O-methyl ribonucleotide
  modified_base 56: mod_base = OTHER; note = 2'-O-methyl ribonucleotide
  modified_base 57: mod_base = OTHER; note = 2'-O-methyl ribonucleotide
  modified_base 60: mod_base = OTHER; note = 2'-O-methyl ribonucleotide
  modified_base 61: mod_base = OTHER; note = 2'-O-methyl ribonucleotide
  modified_base 66: mod_base = OTHER; note = 2'-O-methyl ribonucleotide
  modified_base 67: mod_base = OTHER; note = 2'-O-methyl ribonucleotide
  modified_base 70: mod_base = OTHER; note = 2'-O-methyl ribonucleotide
  modified_base 71: mod_base = OTHER; note = 2'-O-methyl ribonucleotide
  modified_base 72: mod_base = OTHER; note = 2'-O-methyl ribonucleotide
  modified_base 73: mod_base = OTHER; note = 2'-O-methyl ribonucleotide
  modified_base 74: mod_base = OTHER; note = 2'-O-methyl ribonucleotide
  modified_base 75: mod_base = OTHER; note = 2'-O-methyl ribonucleotide
  modified_base 76: mod_base = OTHER; note = 2'-O-methyl ribonucleotide
  modified_base 77: mod_base = OTHER; note = 2'-O-methyl ribonucleotide
  modified_base 78: mod_base = OTHER; note = 2'-O-methyl ribonucleotide
  modified_base 79: mod_base = OTHER; note = 2'-O-methyl ribonucleotide
  modified_base 80: mod_base = OTHER; note = 2'-O-methyl ribonucleotide
  modified_base 81: mod_base = OTHER; note = 2'-O-methyl ribonucleotide
  modified_base 83: mod_base = OTHER; note = 2'-O-methyl ribonucleotide
  modified_base 84: mod_base = OTHER; note = 2'-O-methyl ribonucleotide
  modified_base 85: mod_base = OTHER; note = 2'-O-methyl ribonucleotide
  modified_base 86: mod_base = OTHER; note = 2'-O-methyl ribonucleotide
  modified_base 87: mod_base = OTHER; note = 2'-O-methyl ribonucleotide
  modified_base 88: mod_base = OTHER; note = 2'-O-methyl ribonucleotide
  modified_base 89: mod_base = OTHER; note = 2'-O-methyl ribonucleotide
  modified_base 90: mod_base = OTHER; note = 2'-O-methyl ribonucleotide
  modified_base 91: mod_base = OTHER; note = 2'-O-methyl ribonucleotide
  modified_base 92: mod_base = OTHER; note = 2'-O-methyl ribonucleotide
  modified_base 93: mod_base = OTHER; note = 2'-O-methyl ribonucleotide
  modified_base 94: mod_base = OTHER; note = 2'-O-methyl ribonucleotide
  modified_base 95: mod_base = OTHER; note = 2'-O-methyl ribonucleotide
  modified_base 96: mod_base = OTHER; note = 2'-O-methyl ribonucleotide
  modified_base 97: mod_base = OTHER; note = 2'-O-methyl ribonucleotide
  modified_base 98: mod_base = OTHER; note = 2'-O-methyl ribonucleotide
  modified_base 99: mod_base = OTHER; note = 2'-O-methyl ribonucleotide
  modified_base 100: mod_base = OTHER; note = 2'-O-methyl ribonucleotide
  modified_base 14: mod_base = OTHER; note = nebularine
  modified_base 1..4: mod_base = OTHER; note = phosphorothioate linkage
  modified_base 98..100: mod_base = OTHER; note = phosphorothioate linkage

SEQ ID NO: 2006 - RNA, 100 nt, synthetic construct; identical to SEQ ID NO: 1899
  source 1..100: mol_type = other RNA
  modified_base 1: mod_base = OTHER; note = 2'-O-methyl ribonucleotide
  modified_base 2: mod_base = OTHER; note = 2'-O-methyl ribonucleotide
  modified_base 3: mod_base = OTHER; note = 2'-O-methyl ribonucleotide
  modified_base 21: mod_base = OTHER; note = 2'-O-methyl ribonucleotide
  modified_base 28: mod_base = OTHER; note = 2'-O-methyl ribonucleotide
  modified_base 29: mod_base = OTHER; note = 2'-O-methyl ribonucleotide
  modified_base 30: mod_base = OTHER; note = 2'-O-methyl ribonucleotide
  modified_base 31: mod_base = OTHER; note = 2'-O-methyl ribonucleotide
  modified_base 32: mod_base = OTHER; note = 2'-O-methyl ribonucleotide
  modified_base 33: mod_base = OTHER; note = 2'-O-methyl ribonucleotide
  modified_base 35: mod_base = OTHER; note = 2'-O-methyl ribonucleotide
  modified_base 36: mod_base = OTHER; note = 2'-O-methyl ribonucleotide
  modified_base 37: mod_base = OTHER; note = 2'-O-methyl ribonucleotide
  modified_base 38: mod_base = OTHER; note = 2'-O-methyl ribonucleotide
  modified_base 39: mod_base = OTHER; note = 2'-O-methyl ribonucleotide
  modified_base 40: mod_base = OTHER; note = 2'-O-methyl ribonucleotide
  modified_base 41: mod_base = OTHER; note = 2'-O-methyl ribonucleotide
  modified_base 42: mod_base = OTHER; note = 2'-O-methyl ribonucleotide
  modified_base 46: mod_base = OTHER; note = 2'-O-methyl ribonucleotide
  modified_base 48: mod_base = OTHER; note = 2'-O-methyl ribonucleotide
  modified_base 50: mod_base = OTHER; note = 2'-O-methyl ribonucleotide
  modified_base 52: mod_base = OTHER; note = 2'-O-methyl ribonucleotide
  modified_base 53: mod_base = OTHER; note = 2'-O-methyl ribonucleotide
  modified_base 54: mod_base = OTHER; note = 2'-O-methyl ribonucleotide
  modified_base 55: mod_base = OTHER; note = 2'-O-methyl ribonucleotide
  modified_base 56: mod_base = OTHER; note = 2'-O-methyl ribonucleotide
  modified_base 57: mod_base = OTHER; note = 2'-O-methyl ribonucleotide
  modified_base 60: mod_base = OTHER; note = 2'-O-methyl ribonucleotide
  modified_base 61: mod_base = OTHER; note = 2'-O-methyl ribonucleotide
  modified_base 66: mod_base = OTHER; note = 2'-O-methyl ribonucleotide
  modified_base 67: mod_base = OTHER; note = 2'-O-methyl ribonucleotide
  modified_base 70: mod_base = OTHER; note = 2'-O-methyl ribonucleotide
  modified_base 71: mod_base = OTHER; note = 2'-O-methyl ribonucleotide
  modified_base 72: mod_base = OTHER; note = 2'-O-methyl ribonucleotide
  modified_base 73: mod_base = OTHER; note = 2'-O-methyl ribonucleotide
  modified_base 74: mod_base = OTHER; note = 2'-O-methyl ribonucleotide
  modified_base 75: mod_base = OTHER; note = 2'-O-methyl ribonucleotide
  modified_base 76: mod_base = OTHER; note = 2'-O-methyl ribonucleotide
  modified_base 77: mod_base = OTHER; note = 2'-O-methyl ribonucleotide
  modified_base 78: mod_base = OTHER; note = 2'-O-methyl ribonucleotide
  modified_base 79: mod_base = OTHER; note = 2'-O-methyl ribonucleotide
  modified_base 80: mod_base = OTHER; note = 2'-O-methyl ribonucleotide
  modified_base 81: mod_base = OTHER; note = 2'-O-methyl ribonucleotide
  modified_base 83: mod_base = OTHER; note = 2'-O-methyl ribonucleotide
  modified_base 84: mod_base = OTHER; note = 2'-O-methyl ribonucleotide
  modified_base 85: mod_base = OTHER; note = 2'-O-methyl ribonucleotide
  modified_base 86: mod_base = OTHER; note = 2'-O-methyl ribonucleotide
  modified_base 87: mod_base = OTHER; note = 2'-O-methyl ribonucleotide
  modified_base 88: mod_base = OTHER; note = 2'-O-methyl ribonucleotide
  modified_base 89: mod_base = OTHER; note = 2'-O-methyl ribonucleotide
  modified_base 90: mod_base = OTHER; note = 2'-O-methyl ribonucleotide
  modified_base 91: mod_base = OTHER; note = 2'-O-methyl ribonucleotide
  modified_base 92: mod_base = OTHER; note = 2'-O-methyl ribonucleotide
  modified_base 93: mod_base = OTHER; note = 2'-O-methyl ribonucleotide
  modified_base 94: mod_base = OTHER; note = 2'-O-methyl ribonucleotide
  modified_base 95: mod_base = OTHER; note = 2'-O-methyl ribonucleotide
  modified_base 96: mod_base = OTHER; note = 2'-O-methyl ribonucleotide
  modified_base 97: mod_base = OTHER; note = 2'-O-methyl ribonucleotide
  modified_base 98: mod_base = OTHER; note = 2'-O-methyl ribonucleotide
  modified_base 99: mod_base = OTHER; note = 2'-O-methyl ribonucleotide
  modified_base 100: mod_base = OTHER; note = 2'-O-methyl ribonucleotide
  modified_base 34: mod_base = OTHER; note = nebularine
  modified_base 1..4: mod_base = OTHER; note = phosphorothioate linkage
  modified_base 98..100: mod_base = OTHER; note = phosphorothioate linkage

SEQ ID NO: 2007 - RNA, 100 nt, synthetic construct; identical to SEQ ID NO: 1900
  source 1..100: mol_type = other RNA
  modified_base 1: mod_base = OTHER; note = 2'-O-methyl ribonucleotide
  modified_base 2: mod_base = OTHER; note = 2'-O-methyl ribonucleotide
  modified_base 3: mod_base = OTHER; note = 2'-O-methyl ribonucleotide
  modified_base 21: mod_base = OTHER; note = 2'-O-methyl ribonucleotide
  modified_base 28: mod_base = OTHER; note = 2'-O-methyl ribonucleotide
  modified_base 29: mod_base = OTHER; note = 2'-O-methyl ribonucleotide
  modified_base 30: mod_base = OTHER; note = 2'-O-methyl ribonucleotide
  modified_base 31: mod_base = OTHER; note = 2'-O-methyl ribonucleotide
  modified_base 32: mod_base = OTHER; note = 2'-O-methyl ribonucleotide
  modified_base 33: mod_base = OTHER; note = 2'-O-methyl ribonucleotide
  modified_base 35: mod_base = OTHER; note = 2'-O-methyl ribonucleotide
  modified_base 36: mod_base = OTHER; note = 2'-O-methyl ribonucleotide
  modified_base 37: mod_base = OTHER; note = 2'-O-methyl ribonucleotide
  modified_base 38: mod_base = OTHER; note = 2'-O-methyl ribonucleotide
  modified_base 39: mod_base = OTHER; note = 2'-O-methyl ribonucleotide
  modified_base 40: mod_base = OTHER; note = 2'-O-methyl ribonucleotide
  modified_base 41: mod_base = OTHER; note = 2'-O-methyl ribonucleotide
  modified_base 42: mod_base = OTHER; note = 2'-O-methyl ribonucleotide
  modified_base 46: mod_base = OTHER; note = 2'-O-methyl ribonucleotide
  modified_base 48: mod_base = OTHER; note = 2'-O-methyl ribonucleotide
  modified_base 50: mod_base = OTHER; note = 2'-O-methyl ribonucleotide
  modified_base 52: mod_base = OTHER; note = 2'-O-methyl ribonucleotide
  modified_base 53: mod_base = OTHER; note = 2'-O-methyl ribonucleotide
  modified_base 54: mod_base = OTHER; note = 2'-O-methyl ribonucleotide
  modified_base 55: mod_base = OTHER; note = 2'-O-methyl ribonucleotide
  modified_base 56: mod_base = OTHER; note = 2'-O-methyl ribonucleotide
  modified_base 60: mod_base = OTHER; note = 2'-O-methyl ribonucleotide
  modified_base 61: mod_base = OTHER; note = 2'-O-methyl ribonucleotide
  modified_base 66: mod_base = OTHER; note = 2'-O-methyl ribonucleotide
  modified_base 67: mod_base = OTHER; note = 2'-O-methyl ribonucleotide
  modified_base 70: mod_base = OTHER; note = 2'-O-methyl ribonucleotide
  modified_base 71: mod_base = OTHER; note = 2'-O-methyl ribonucleotide
  modified_base 72: mod_base = OTHER; note = 2'-O-methyl ribonucleotide
  modified_base 73: mod_base = OTHER; note = 2'-O-methyl ribonucleotide
  modified_base 74: mod_base = OTHER; note = 2'-O-methyl ribonucleotide
  modified_base 75: mod_base = OTHER; note = 2'-O-methyl ribonucleotide
  modified_base 76: mod_base = OTHER; note = 2'-O-methyl ribonucleotide
  modified_base 77: mod_base = OTHER; note = 2'-O-methyl ribonucleotide
  modified_base 78: mod_base = OTHER; note = 2'-O-methyl ribonucleotide
  modified_base 79: mod_base = OTHER; note = 2'-O-methyl ribonucleotide
  modified_base 80: mod_base = OTHER; note = 2'-O-methyl ribonucleotide
  modified_base 81: mod_base = OTHER; note = 2'-O-methyl ribonucleotide
  modified_base 83: mod_base = OTHER; note = 2'-O-methyl ribonucleotide
  modified_base 84: mod_base = OTHER; note = 2'-O-methyl ribonucleotide
  modified_base 85: mod_base = OTHER; note = 2'-O-methyl ribonucleotide
  modified_base 86: mod_base = OTHER; note = 2'-O-methyl ribonucleotide
  modified_base 87: mod_base = OTHER; note = 2'-O-methyl ribonucleotide
  modified_base 88: mod_base = OTHER; note = 2'-O-methyl ribonucleotide
  modified_base 89: mod_base = OTHER; note = 2'-O-methyl ribonucleotide
  modified_base 90: mod_base = OTHER; note = 2'-O-methyl ribonucleotide
  modified_base 91: mod_base = OTHER; note = 2'-O-methyl ribonucleotide
  modified_base 92: mod_base = OTHER; note = 2'-O-methyl ribonucleotide
  modified_base 93: mod_base = OTHER; note = 2'-O-methyl ribonucleotide
  modified_base 94: mod_base = OTHER; note = 2'-O-methyl ribonucleotide
  modified_base 95: mod_base = OTHER; note = 2'-O-methyl ribonucleotide
  modified_base 96: mod_base = OTHER; note = 2'-O-methyl ribonucleotide
  modified_base 97: mod_base = OTHER; note = 2'-O-methyl ribonucleotide
  modified_base 98: mod_base = OTHER; note = 2'-O-methyl ribonucleotide
  modified_base 99: mod_base = OTHER; note = 2'-O-methyl ribonucleotide
  modified_base 100: mod_base = OTHER; note = 2'-O-methyl ribonucleotide
  modified_base 34: mod_base = OTHER; note = nebularine
  modified_base 57: mod_base = OTHER; note = nebularine
  modified_base 1..4: mod_base = OTHER; note = phosphorothioate linkage
  modified_base 98..100: mod_base = OTHER; note = phosphorothioate linkage

SEQ ID NO: 2008 - RNA, 100 nt, synthetic construct; identical to SEQ ID NO: 1901
  source 1..100: mol_type = other RNA
  modified_base 1: mod_base = OTHER; note = 2'-O-methyl ribonucleotide
  modified_base 2: mod_base = OTHER; note = 2'-O-methyl ribonucleotide
  modified_base 3: mod_base = OTHER; note = 2'-O-methyl ribonucleotide
  modified_base 21: mod_base = OTHER; note = 2'-O-methyl ribonucleotide
  modified_base 28: mod_base = OTHER; note = 2'-O-methyl ribonucleotide
  modified_base 29: mod_base = OTHER; note = 2'-O-methyl ribonucleotide
  modified_base 30: mod_base = OTHER; note = 2'-O-methyl ribonucleotide
  modified_base 31: mod_base = OTHER; note = 2'-O-methyl ribonucleotide
  modified_base 32: mod_base = OTHER; note = 2'-O-methyl ribonucleotide
  modified_base 33: mod_base = OTHER; note = 2'-O-methyl ribonucleotide
  modified_base 34: mod_base = OTHER; note = 2'-O-methyl ribonucleotide
  modified_base 35: mod_base = OTHER; note = 2'-O-methyl ribonucleotide
  modified_base 36: mod_base = OTHER; note = 2'-O-methyl ribonucleotide
  modified_base 37: mod_base = OTHER; note = 2'-O-methyl ribonucleotide
  modified_base 38: mod_base = OTHER; note = 2'-O-methyl ribonucleotide
  modified_base 39: mod_base = OTHER; note = 2'-O-methyl ribonucleotide
  modified_base 40: mod_base = OTHER; note = 2'-O-methyl ribonucleotide
  modified_base 41: mod_base = OTHER; note = 2'-O-methyl ribonucleotide
  modified_base 42: mod_base = OTHER; note = 2'-O-methyl ribonucleotide
  modified_base 46: mod_base = OTHER; note = 2'-O-methyl ribonucleotide
  modified_base 48: mod_base = OTHER; note = 2'-O-methyl ribonucleotide
  modified_base 50: mod_base = OTHER; note = 2'-O-methyl ribonucleotide
  modified_base 52: mod_base = OTHER; note = 2'-O-methyl ribonucleotide
  modified_base 53: mod_base = OTHER; note = 2'-O-methyl ribonucleotide
  modified_base 54: mod_base = OTHER; note = 2'-O-methyl ribonucleotide
  modified_base 55: mod_base = OTHER; note = 2'-O-methyl ribonucleotide
  modified_base 56: mod_base = OTHER; note = 2'-O-methyl ribonucleotide
  modified_base 60: mod_base = OTHER; note = 2'-O-methyl ribonucleotide
  modified_base 61: mod_base = OTHER; note = 2'-O-methyl ribonucleotide
  modified_base 66: mod_base = OTHER; note = 2'-O-methyl ribonucleotide
  modified_base 67: mod_base = OTHER; note = 2'-O-methyl ribonucleotide
  modified_base 70: mod_base = OTHER; note = 2'-O-methyl ribonucleotide
  modified_base 71: mod_base = OTHER; note = 2'-O-methyl ribonucleotide
  modified_base 72: mod_base = OTHER; note = 2'-O-methyl ribonucleotide
  modified_base 73: mod_base = OTHER; note = 2'-O-methyl ribonucleotide
  modified_base 74: mod_base = OTHER; note = 2'-O-methyl ribonucleotide
  modified_base 75: mod_base = OTHER; note = 2'-O-methyl ribonucleotide
  modified_base 76: mod_base = OTHER; note = 2'-O-methyl ribonucleotide
  modified_base 77: mod_base = OTHER; note = 2'-O-methyl ribonucleotide
  modified_base 78: mod_base = OTHER; note = 2'-O-methyl ribonucleotide
  modified_base 79: mod_base = OTHER; note = 2'-O-methyl ribonucleotide
  modified_base 80: mod_base = OTHER; note = 2'-O-methyl ribonucleotide
  modified_base 81: mod_base = OTHER; note = 2'-O-methyl ribonucleotide
  modified_base 83: mod_base = OTHER; note = 2'-O-methyl ribonucleotide
  modified_base 84: mod_base = OTHER; note = 2'-O-methyl ribonucleotide
  modified_base 85: mod_base = OTHER; note = 2'-O-methyl ribonucleotide
  modified_base 86: mod_base = OTHER; note = 2'-O-methyl ribonucleotide
  modified_base 87: mod_base = OTHER; note = 2'-O-methyl ribonucleotide
  modified_base 88: mod_base = OTHER; note = 2'-O-methyl ribonucleotide
  modified_base 89: mod_base = OTHER; note = 2'-O-methyl ribonucleotide
  modified_base 90: mod_base = OTHER; note = 2'-O-methyl ribonucleotide
  modified_base 91: mod_base = OTHER; note = 2'-O-methyl ribonucleotide
  modified_base 92: mod_base = OTHER; note = 2'-O-methyl ribonucleotide
  modified_base 93: mod_base = OTHER; note = 2'-O-methyl ribonucleotide
  modified_base 94: mod_base = OTHER; note = 2'-O-methyl ribonucleotide
  modified_base 95: mod_base = OTHER; note = 2'-O-methyl ribonucleotide
  modified_base 96: mod_base = OTHER; note = 2'-O-methyl ribonucleotide
  modified_base 97: mod_base = OTHER; note = 2'-O-methyl ribonucleotide
  modified_base 98: mod_base = OTHER; note = 2'-O-methyl ribonucleotide
  modified_base 99: mod_base = OTHER; note = 2'-O-methyl ribonucleotide
  modified_base 100: mod_base = OTHER; note = 2'-O-methyl ribonucleotide
  modified_base 57: mod_base = OTHER; note = nebularine
  modified_base 1..4: mod_base = OTHER; note = phosphorothioate linkage
  modified_base 98..100: mod_base = OTHER; note = phosphorothioate linkage

SEQ ID NO: 2009 - RNA, 100 nt, synthetic construct; identical to SEQ ID NO: 1902
  source 1..100: mol_type = other RNA
  modified_base 1: mod_base = OTHER; note = 2'-O-methyl ribonucleotide
  modified_base 2: mod_base = OTHER; note = 2'-O-methyl ribonucleotide
  modified_base 3: mod_base = OTHER; note = 2'-O-methyl ribonucleotide
  modified_base 21: mod_base = OTHER; note = 2'-O-methyl ribonucleotide
  modified_base 28: mod_base = OTHER; note = 2'-O-methyl ribonucleotide
  modified_base 29: mod_base = OTHER; note = 2'-O-methyl ribonucleotide
  modified_base 30: mod_base = OTHER; note = 2'-O-methyl ribonucleotide
  modified_base 31: mod_base = OTHER; note = 2'-O-methyl ribonucleotide
  modified_base 32: mod_base = OTHER; note = 2'-O-methyl ribonucleotide
  modified_base 33: mod_base = OTHER; note = 2'-O-methyl ribonucleotide
  modified_base 34: mod_base = OTHER; note = 2'-O-methyl ribonucleotide
  modified_base 35: mod_base = OTHER; note = 2'-O-methyl ribonucleotide
  modified_base 36: mod_base = OTHER; note = 2'-O-methyl ribonucleotide
  modified_base 37: mod_base = OTHER; note = 2'-O-methyl ribonucleotide
  modified_base 38: mod_base = OTHER; note = 2'-O-methyl ribonucleotide
  modified_base 39: mod_base = OTHER; note = 2'-O-methyl ribonucleotide
  modified_base 40: mod_base = OTHER; note = 2'-O-methyl ribonucleotide
  modified_base 41: mod_base = OTHER; note = 2'-O-methyl ribonucleotide
  modified_base 42: mod_base = OTHER; note = 2'-O-methyl ribonucleotide
  modified_base 46: mod_base = OTHER; note = 2'-O-methyl ribonucleotide
  modified_base 48: mod_base = OTHER; note = 2'-O-methyl ribonucleotide
  modified_base 50: mod_base = OTHER; note = 2'-O-methyl ribonucleotide
  modified_base 52: mod_base = OTHER; note = 2'-O-methyl ribonucleotide
  modified_base 53: mod_base = OTHER; note = 2'-O-methyl ribonucleotide
  modified_base 54: mod_base = OTHER; note = 2'-O-methyl ribonucleotide
  modified_base 55: mod_base = OTHER; note = 2'-O-methyl ribonucleotide
  modified_base 56: mod_base = OTHER; note = 2'-O-methyl ribonucleotide
  modified_base 57: mod_base = OTHER; note = 2'-O-methyl ribonucleotide
  modified_base 60: mod_base = OTHER; note = 2'-O-methyl ribonucleotide
  modified_base 61: mod_base = OTHER; note = 2'-O-methyl ribonucleotide
  modified_base 66: mod_base = OTHER; note = 2'-O-methyl ribonucleotide
  modified_base 67: mod_base = OTHER; note = 2'-O-methyl ribonucleotide
  modified_base 70: mod_base = OTHER; note = 2'-O-methyl ribonucleotide
  modified_base 71: mod_base = OTHER; note = 2'-O-methyl ribonucleotide
  modified_base 72: mod_base = OTHER; note = 2'-O-methyl ribonucleotide
  modified_base 73: mod_base = OTHER; note = 2'-O-methyl ribonucleotide
  modified_base 74: mod_base = OTHER; note = 2'-O-methyl ribonucleotide
  modified_base 75: mod_base = OTHER; note = 2'-O-methyl ribonucleotide
  modified_base 76: mod_base = OTHER; note = 2'-O-methyl ribonucleotide
  modified_base 77: mod_base = OTHER; note = 2'-O-methyl ribonucleotide
  modified_base 78: mod_base = OTHER; note = 2'-O-methyl ribonucleotide
  modified_base 79: mod_base = OTHER; note = 2'-O-methyl ribonucleotide
  modified_base 80: mod_base = OTHER; note = 2'-O-methyl ribonucleotide
  modified_base 81: mod_base = OTHER; note = 2'-O-methyl ribonucleotide
  modified_base 83: mod_base = OTHER; note = 2'-O-methyl ribonucleotide
  modified_base 84: mod_base = OTHER; note = 2'-O-methyl ribonucleotide
  modified_base 85: mod_base = OTHER; note = 2'-O-methyl ribonucleotide
  modified_base 86: mod_base = OTHER; note = 2'-O-methyl ribonucleotide
  modified_base 87: mod_base = OTHER; note = 2'-O-methyl ribonucleotide
  modified_base 88: mod_base = OTHER; note = 2'-O-methyl ribonucleotide
  modified_base 89: mod_base = OTHER; note = 2'-O-methyl ribonucleotide
  modified_base 90: mod_base = OTHER; note = 2'-O-methyl ribonucleotide
  modified_base 91: mod_base = OTHER; note = 2'-O-methyl ribonucleotide
  modified_base 92: mod_base = OTHER; note = 2'-O-methyl ribonucleotide
  modified_base 93: mod_base = OTHER; note = 2'-O-methyl ribonucleotide
  modified_base 94: mod_base = OTHER; note = 2'-O-methyl ribonucleotide
  modified_base 95: mod_base = OTHER; note = 2'-O-methyl ribonucleotide
  modified_base 96: mod_base = OTHER; note = 2'-O-methyl ribonucleotide
  modified_base 97: mod_base = OTHER; note = 2'-O-methyl ribonucleotide
  modified_base 98: mod_base = OTHER; note = 2'-O-methyl ribonucleotide
  modified_base 99: mod_base = OTHER; note = 2'-O-methyl ribonucleotide
  modified_base 100: mod_base = OTHER; note = 2'-O-methyl ribonucleotide
  modified_base 65: mod_base = OTHER; note = nebularine
  modified_base 1..4: mod_base = OTHER; note = phosphorothioate linkage
  modified_base 98..100: mod_base = OTHER; note = phosphorothioate linkage

(The sequence listing continues in the following parts.)
